United States Patent Application Publication US 2022/0211838 A1 - sequence listing, part 11

SEQ ID NO: 14864 - RNA, 4334 nt, Artificial Sequence
  MERS-CoV/Riyadh_14_2013__AHI48572.1 spike protein mRNA human (1-1353)(R1020Q)
aggagagucccgcagucggcguccagcggcucugcuuguucgugugugugucguugcaggccuuauucaagcuuaccaugauccacagcguguuccugcucauguuucuucugacccccacagaguccuacgucgacguuggcccugauucugugaagucagccugcauugaaguagacauacagcaaacuuucuuugauaaaacguggccaagaccgaucgacgugaguaaggcugaugggauuaucuauccccagggaaggaccuacagcaacauuacaaucacuuaucaggguuuguucccuuaccagggcgaccauggggauauguaugucuacuccgcaggacacgccaccggcacaaccccacaaaaauuauuuguggcgaauuauucucaggacguuaagcaguucgcuaacgguuuugugguccggauaggggccgcagccaauucgacuggaacagugaucauuucacccagcaccagugcuacgauccgcaaaauuuacccugcauucaugcugggcuccucuguaggcaacuuuagcgaugggaagaugggacgauucuuuaaucauacucuaguucuccugccagacgguuguggcacccuucugcgugccuucuacugcaucuuggagcccagauccgggaaccacuguccugcuggaaauucauauacaaguuuugccacuuaccauaccccagcgacagauugcagcgacggcaacuauaauaggaacgcaucucucaauuccuucaaggaauacuucaaccugcggaauuguaccuuuauguauacguacaacauaacugaggaugaaauucuggagugguucgguaucacacagaccgcccaaggggugcaccucuuuucaagccgcuaugucgacuuauacggaggcaauauguuccaguuugcuacucugccgguguacgacacaauuaaauauuacaguaucaucccccacucuauuagauccauacagagcgauaggaaggccugggcagcuuucuauguguacaaacuucagccuuugaccuuucugcuagacuucucggucgauggcuauauccggcgcgccauugacugcggguuuaacgaucucucucaacugcauuguuccuacgagucauucgacguugaaaguggaguguauagcguauccucuuuugaggcgaagccaagcgguucaguggucgaacaggccgagggcguggagugcgauuucaguccccuucuguccgggacgccuccacagguuuacaacuuuaaacgauugguguucaccaauuguaacuacaaucucacaaagcuguuaagccuguucucugucaacgacuuuacuugcucacaaaucagucccgcagcuauagccagcaauuguuauuccucucucauucuugauuacuucucguauccgcugagcaugaaguccgacuugucagugaguucugcuggaccuaucagccaguuuaacuacaaacaguccuucucaaauccaaccugccuaauccuggccacaguaccccacaaccucacuaccauuacaaagccucugaaauauagcuacaucaauaagugcucuagacuucuguccgaugacaggaccgaaguuccccaguuggugaacgcaaaucaauauaguccaugugucagcauugugcccucuacugucugggaggacggcgauuacuaccggaaacagcucuccccucuggaaggugggggcugguuaguggccucaggaaguacgguugcuaugacagagcagcugcagaugggcuuugggauaaccgugcaauauggaacugacaccaacagcguaugcccaaagcuagaguucgcgaaugauacaaaaaucgcaucgcagcucgguaacugugucgaauacucccuguauggcgugucugggcguggaguuuuucagaauugcaccgccgugggcguccgccagcaaagauucguguacgacgcuuaucagaaccuuguagguuacuauagcgaugacgggaacuacuacuguuugagggccugcgugucaguuccggucagugugauuuaugauaaggagacuaagacacaugcaacgcuguuuggcuccguggccugugaacacaucucuagcaccaugucccaguacucacggagcacucgaaguaugcucaaacgcagagacucuacauauggaccccugcagaccccugucggcugcguucuugggcugguaaauuccagcuuguucguggaggauuguaagcucccacugggacaaucguuaugcgcucugcccgacacaccuucaacucuaaccccaaggucugugcggaguguccccggugaaaugcgccucgccuccaucgcauuuaaccacccgauucagguggaucagcugaauagcucuuacuucaaacuuagcauaccuacgaacuuuuccuucggcguuacccaagaguauauccagacaacuauucagaaggugaccgucgacuguaaacaguacgugugcaauggguuccaaaagugcgaacaguugcugagagaguauggacaguuuuguucaaagaucaaccaggcgcuccauggcgcuaaucugaggcaagaugacaguguucguaacuuauucgccagcgugaaaucuucccagucaaguccaauuauccccgguuuugggggcgacuucaaucugacacuuuuggagccuguaagcauauccacuggaucucggucggcacgaagcgccaucgaagaucuccuguuugacaaggucaccauugcugaucccggcuacaugcagggguacgacgauugcaugcagcaaggaccagccucagcaagagaccuaaucugugcucaguauguggccggcuacaaagugcugccuccccucauggaugucaacauggaggcggccuauacguccagucugcuugguucuauugcugggguuggauggacagcaggcuugagcuccuucgccgcuaucccauuugcccagucaauauucuacaggcugaauggugugggcauuacccaacagguauuaucugaaaaccagaagcucaucgcaaauaaauuuaaccaggcgcugggggccaugcaaacuggauucacaaccacuaaugaggcuuuucagaaggugcaggacgccgucaacaacaaugcacaggcucuuagcaagcuggccagugaauuguccaacaccuucggcgcaauuagcgccucuaucggggauauaauccaacgccucgacgugcuggagcaggaugcucagauugaccggcuaaucaauggaagacugacaacgcucaacgcguucguugcccagcaacuggugaggucagaguccgcagcucuuagugcccaguuggccaaagauaaggucaaugaaugcgugaaagcucagagcaagcgcucgggcuuuuguggucaggggacccacauuguuucuuucguggucaacgcaccgaauggacuguauuuuaugcauguaggcuacuauccuuccaaccacaucgaggugguuagcgccuacgguuuaugcgacgcggcuaaucccacuaacuguauagccccagugaauggcuacuucauuaaaacaaacaauacccgaaucgucgacgaauggucauauacagggaguucuuuuuacgcacccgagccuaucacuucccucaacaccaaguauguggccccacaaguaacguaccagaauauuagcacaaaccugcccccuccgcuucugggaaacucaaccggcaucgauuuccaggacgagcuagaugaauuuuucaagaaugugaguacuagcauuccaaacuuugggucccucacccaaauaaauacaacucuguuggaccugaccuaugagauguuaucucuccagcaggucguuaaagcucugaacgaaagcuacaucgaucuuaaggagcugggaaauuauacauacuacaacaaauggcccugguauauuugguugggcuucaucgcaggucucguggcccuggcgcuaugcguguuuuucauucuguguugcacgggguguggaaccaauugcaugggcaaacuuaagugcaaccgguguugcgaccguuacgaagaguaugaucucgagccucauaagguccacgugcacugaggacuagucccuguucccagagcccacuuuuuuuucuuuuuuugaaauaaaauagccugucuuucagaucucaaaggcucuuuucagagccaccaaaaaaaaaaaaaaaaaaaaaaaaaaaaaaaaaaaaaaaaaaaaaaaaaaaaaaaaaaaaaaaaaaaaaaaaaaaaaaaaaaaaaaaaaaaaaaaaaaaaa

SEQ ID NO: 14865 - RNA, 2039 nt, Artificial Sequence
  MERS-CoV/Riyadh_14_2013__AHI48572.1 spike protein mRNA human (1-17_726-1296)(R1020Q)
aggagagucccgcagucggcguccagcggcucugcuuguucgugugugugucguugcaggccuuauucaagcuuaccaugauccacagcguguuccugcucauguuucuucugacccccacagaguccgacugcaaguugccuuuaggccagucucugugugcccuaccagauacuccgucaacgcucacccccagaagugucaggagcguuccuggggaaaugcggcuggcuuccauugcauucaaccauccaauacaaguggaccagcuuaauucuucguacuuuaaacugucaauccccacaaacuucagcuuuggaguaacucaggaguauauucagaccacaauccaaaaggugaccgucgauugcaaacaguacguguguaaugguuuccagaagugcgaacaguugcuccgcgaguauggccaauuuuguaguaaaauuaaccaggcccugcacggggcgaaucugcgacaggacgauuccguucguaaccucuucgcuucugugaagucaucccagucaaguccuaucauaccaggauuuggcggugacuucaauuuaacucugcuugaacccgucagcaucucuacaggguccagaucagccaggagcgcaauugaggauuugcuguuugacaaggugaccaucgccgauccuggauacaugcaaggcuaugacgauugcaugcagcagggcccagcuagugcacgggaccuaauuugugcccaauacguagcuggguauaaaguucucccgccccugauggaugugaacauggaggccgcguacacgucuucccuucugggaagcaucgccggugucggcuggacugcaggguugucgucuuucgcugccauaccuuuugcacaguccauuuucuaccgccucaauggagugggcaucacccaacaggugcugucagaaaaccagaaguuaauugcuaauaaauucaaccaggcccugggugcgaugcagacaggguuuacuaccacaaaugaggccuuccagaagguccaagacgcaguuaacaauaacgcucaggcccucaguaaacuugcuagcgaacuguccaacaccuuuggagccaucucugcaagcaucggcgacauuauacagagauuggaugugcuagagcaggacgcccaaaucgauaggcugauuaauggccggcucacgacucugaacgcuuucguagcgcagcagcuugugcgcucagagagugcagcccuguccgcucaguuggccaaggacaaggucaaugaaugcgugaaagcacaaagcaagcgaucuggguuuuguggacaggguacacauaucguuucauucguggucaacgccccaaauggccucuauuuuaugcacgugggguacuaucccaguaaccauauagagguaguuagcgcuuacggacugugcgaugccgcaaauccuaccaacuguauugcgccagugaauggcuauuucaucaaaacuaacaauacaagaaucgucgacgaaugguccuacaccgguucuucguuuuaugcucccgagccgauuacgagcuuaaacaccaaguacguggccccucaggucacauaccaaaauaucuccacuaaccugcccccaccucuacucgggaauagcaccggcauugauuuccaggacgaacuggaugaguuuuucaaaaacgugaguacaucuauacccaacuuuggaagccuuacucagaucaauaccacauugcuggaccucaccuaugagaugcugucccuucagcaaguugugaaggcacugaacgaaucauacauugauuugaaagagcucggcaauuauacuuacuauaacaaguggccaugaggacuagucccuguucccagagcccacuuuuuuuucuuuuuuugaaauaaaauagccugucuuucagaucucaaaggcucuuuucagagccaccaaaaaaaaaaaaaaaaaaaaaaaaaaaaaaaaaaaaaaaaaaaaaaaaaaaaaaaaaaaaaaaaaaaaaaaaaaaaaaaaaaaaaaaaaaaaaaaaaaaaa

SEQ ID NO: 14866 - RNA, 2120 nt, Artificial Sequence
  MERS-CoV/Riyadh_14_2013__AHI48572.1 spike protein mRNA human (1-17_726-1296)(R1020Q)_LeucineZipper
aggagagucccgcagucggcguccagcggcucugcuuguucgugugugugucguugcaggccuuauucaagcuuaccaugauccacagcguguuccugcucauguuucuucugacccccacagaguccgacugcaaguugccuuuaggccagucucugugugcccuaccagauacuccgucaacgcucacccccagaagugucaggagcguuccuggggaaaugcggcuggcuuccauugcauucaaccauccaauacaaguggaccagcuuaauucuucguacuuuaaacugucaauccccacaaacuucagcuuuggaguaacucaggaguauauucagaccacaauccaaaaggugaccgucgauugcaaacaguacguguguaaugguuuccagaagugcgaacaguugcuccgcgaguauggccaauuuuguaguaaaauuaaccaggcccugcacggggcgaaucugcgacaggacgauuccguucguaaccucuucgcuucugugaagucaucccagucaaguccuaucauaccaggauuuggcggugacuucaauuuaacucugcuugaacccgucagcaucucuacaggguccagaucagccaggagcgcaauugaggauuugcuguuugacaaggugaccaucgccgauccuggauacaugcaaggcuaugacgauugcaugcagcagggcccagcuagugcacgggaccuaauuugugcccaauacguagcuggguauaaaguucucccgccccugauggaugugaacauggaggccgcguacacgucuucccuucugggaagcaucgccggugucggcuggacugcaggguugucgucuuucgcugccauaccuuuugcacaguccauuuucuaccgccucaauggagugggcaucacccaacaggugcugucagaaaaccagaaguuaauugcuaauaaauucaaccaggcccugggugcgaugcagacaggguuuacuaccacaaaugaggccuuccagaagguccaagacgcaguuaacaauaacgcucaggcccucaguaaacuugcuagcgaacuguccaacaccuuuggagccaucucugcaagcaucggcgacauuauacagagauuggaugugcuagagcaggacgcccaaaucgauaggcugauuaauggccggcucacgacucugaacgcuuucguagcgcagcagcuugugcgcucagagagugcagcccuguccgcucaguuggccaaggacaaggucaaugaaugcgugaaagcacaaagcaagcgaucuggguuuuguggacaggguacacauaucguuucauucguggucaacgccccaaauggccucuauuuuaugcacgugggguacuaucccaguaaccauauagagguaguuagcgcuuacggacugugcgaugccgcaaauccuaccaacuguauugcgccagugaauggcuauuucaucaaaacuaacaauacaagaaucgucgacgaaugguccuacaccgguucuucguuuuaugcucccgagccgauuacgagcuuaaacaccaaguacguggccccucaggucacauaccaaaauaucuccacuaaccugcccccaccucuacucgggaauagcaccggcauugauuuccaggacgaacuggaugaguuuuucaaaaacgugaguacaucuauacccaacuuuggaagccuuacucagaucaauaccacauugcuggaccucaccuaugagaugcugucccuucagcaaguugugaaggcacugaacgaaucauacauugauuugaaagagcucggcaauuauacuuacuauaacaaguggccagacaagaucgaagagauccugagcaaaauuuaccacauagaaaaugagaucgccaggauuaagaaauuaaucggggaggcuugaggacuagucccuguucccagagcccacuuuuuuuucuuuuuuugaaauaaaauagccugucuuucagaucucaaaggcucuuuucagagccaccaaaaaaaaaaaaaaaaaaaaaaaaaaaaaaaaaaaaaaaaaaaaaaaaaaaaaaaaaaaaaaaaaaaaaaaaaaaaaaaaaaaaaaaaaaaaaaaaaaaaa

SEQ ID NO: 14867 - RNA, 4334 nt, Artificial Sequence
  MERS-CoV/England 1__YP_007188579.1 spike protein mRNA human (1-1353)
aggagagucccgcagucggcguccagcggcucugcuuguucgugugugugucguugcaggccuuauucaagcuuaccaugauccacagcguguuccugcucauguuucuucugacccccacagaguccuacgucgacguuggcccugauucugugaagucagccugcauugaaguagacauacagcaaacuuucuuugauaaaacguggccaagaccgaucgacgugaguaaggcugaugggauuaucuauccccagggaaggaccuacagcaacauuacaaucacuuaucaggguuuguucccuuaccagggcgaccauggggauauguaugucuacuccgcaggacacgccaccggcacaaccccacaaaaauuauuuguggcgaauuauucucaggacguuaagcaguucgcuaacgguuuugugguccggauaggggccgcagccaauucgacuggaacagugaucauuucacccagcaccagugcuacgauccgcaaaauuuacccugcauucaugcugggcuccucuguaggcaacuuuagcgaugggaagaugggacgauucuuuaaucauacucuaguucuccugccagacgguuguggcacccuucugcgugccuucuacugcaucuuggagcccagauccgggaaccacuguccugcuggaaauucauauacaaguuuugccacuuaccauaccccagcgacagauugcagcgacggcaacuauaauaggaacgcaucucucaauuccuucaaggaauacuucaaccugcggaauuguaccuuuauguauacguacaacauaacugaggaugaaauucuggagugguucgguaucacacagaccgcccaaggggugcaccucuuuucaagccgcuaugucgacuuauacggaggcaauauguuccaguuugcuacucugccgguguacgacacaauuaaauauuacaguaucaucccccacucuauuagauccauacagagcgauaggaaggccugggcagcuuucuauguguacaaacuucagccuuugaccuuucugcuagacuucucggucgauggcuauauccggcgcgccauugacugcggguuuaacgaucucucucaacugcauuguuccuacgagucauucgacguugaaaguggaguguauagcguauccucuuuugaggcgaagccaagcgguucaguggucgaacaggccgagggcguggagugcgauuucaguccccuucuguccgggacgccuccacagguuuacaacuuuaaacgauugguguucaccaauuguaacuacaaucucacaaagcuguuaagccuguucucugucaacgacuuuacuugcucacaaaucagucccgcagcuauagccagcaauuguuauuccucucucauucuugauuacuucucguauccgcugagcaugaaguccgacuugucagugaguucugcuggaccuaucagccaguuuaacuacaaacaguccuucucaaauccaaccugccuaauccuggccacaguaccccacaaccucacuaccauuacaaagccucugaaauauagcuacaucaauaagugcucuagauuucuuuccgaugacaggaccgaaguuccccagcuggugaacgcaaaucaauauaguccaugugucagcauugugcccucuacugucugggaggacggcgauuacuaccggaaacaguuguccccucucgaaggugggggcuggcugguggccucaggaaguacgguugcuaugacagagcaguuacagaugggcuucgggauaaccgugcaauauggaacugacaccaacagcguaugcccaaagcuggaauuugcgaaugauacaaaaaucgcaucgcagcuagguaacugugucgaguacucccucuauggcgugucugggcguggaguuuuccagaauugcaccgccgugggcguccgccagcaaagauuuguguacgacgcuuaucagaaccugguagguuacuauagcgaugacgggaacuacuacugucuuagggccugcgugucaguuccggucagugugauuuaugauaaggagacuaagacacaugcaacguuguucggcuccguggccugugaacacaucucuagcaccaugucccaguacucacggagcacucgaaguaugcugaaacgcagagacucuacauauggaccccuccagaccccugucggcugcguucuggggcuuguaaauuccagccuguuuguggaggauuguaaguugccacucggacaaucgcugugcgcuuuacccgacacaccuucaacucugaccccaaggucugugcggaguguccccggugaaaugcgccuagccuccaucgcauucaaccacccgauucagguggaucagcucaauagcucuuacuuuaaacugagcauaccuacgaacuucuccuucggcguuacccaagaguauauccagacaacuauucagaaggugaccgucgacuguaaacaguacgugugcaauggguuucaaaagugcgaacagcuuuugagagaguauggacaguucuguucaaagaucaaccaggcgcugcauggcgcuaaucucaggcaagaugacaguguucguaaccuguuugccagcgugaaaucuucccagucaaguccaauuauccccgguuucgggggcgacuuuaauuuaacacugcuugagccuguaagcauauccacuggaucucggucggcacgaagcgccaucgaagaucuccucuucgacaaggucaccauugcugaucccggcuacaugcagggguacgacgauugcaugcagcaaggaccagccucagcaagagaccugaucugugcucaguauguggccggcuacaaagugcuaccuccccugauggaugucaacauggaggcggccuauacguccagucuccuggguucuauugcugggguuggauggacagcaggccuuagcuccuuugccgcuaucccauucgcccagucaauauuuuacagguugaauggugugggcauuacccaacagguacugucugaaaaccagaaguuaaucgcaaauaaauucaaccaggcgcucggggccaugcaaacuggauuuacaaccacuaaugaggcuuuccacaaggugcaggacgccgucaacaacaaugcacaggcucugagcaaacuugccagugaacuguccaacaccuucggcgcaauuagcgccucuaucggggauauaauccagcgcuuggacgugcucgagcaagaugcucagauugaccggcugaucaauggaagacuaacaacgcugaacgcguuuguugcccagcagcucgugaggucagaguccgcagcucugagugcccaacuugccaaggauaaggucaaugaaugcgugaaagcucagagcaagcgcucgggcuucuguggucaggggacccauauuguuucuuuuguggucaacgcaccgaauggauuguauuucaugcacguaggcuacuauccuuccaaccauaucgaggugguuagcgccuacggucugugcgacgcggcuaaucccacuaacuguauagccccagugaauggcuacuuuauuaaaacaaacaauacccgaaucgucgacgaauggucauauacagggaguucuuucuacgcacccgagccuaucacuuccuuaaacaccaaguauguggccccacagguaacguaccaaaauauuagcacaaacuugcccccuccgcugcuuggaaacucaaccggcaucgauuuucaggacgagcuggaugaguucuuuaagaaugugaguacuagcauuccaaacuucgggucccuaacccagauaaauacaacucuccuggacuugaccuaugaaaugcugucuuuacaacaggucguuaaagcucucaacgaaagcuacaucgaucugaaggagcuuggaaauuauacauacuacaacaaauggcccugguauauuuggcugggcuuuaucgcagguuugguggcccucgcgcugugcguguucuuuauucuauguugcacgggguguggaaccaauugcaugggcaagcugaaaugcaaccgguguugcgaccguuacgaagaguaugaucuugagccucacaagguccacgugcauugaggacuagucccuguucccagagcccacuuuuuuuucuuuuuuugaaauaaaauagccugucuuucagaucucaaaggcucuuuucagagccaccaaaaaaaaaaaaaaaaaaaaaaaaaaaaaaaaaaaaaaaaaaaaaaaaaaaaaaaaaaaaaaaaaaaaaaaaaaaaaaaaaaaaaaaaaaaaaaaaaaaaa

SEQ ID NO: 14868 - RNA, 4334 nt, Artificial Sequence
  MERS-CoV/England 1__YP_007188579.1 spike protein mRNA human (1-1353)(V1060P_L1061P)
aggagagucccgcagucggcguccagcggcucugcuuguucgugugugugucguugcaggccuuauucaagcuuaccaugauccacagcguguuccugcucauguuucuucugacccccacagaguccuacgucgacguuggcccugauucugugaagucagccugcauugaaguagacauacagcaaacuuucuuugauaaaacguggccaagaccgaucgacgugaguaaggcugaugggauuaucuauccccagggaaggaccuacagcaacauuacaaucacuuaucaggguuuguucccuuaccagggcgaccauggggauauguaugucuacuccgcaggacacgccaccggcacaaccccacaaaaauuauuuguggcgaauuauucucaggacguuaagcaguucgcuaacgguuuugugguccggauaggggccgcagccaauucgacuggaacagugaucauuucacccagcaccagugcuacgauccgcaaaauuuacccugcauucaugcugggcuccucuguaggcaacuuuagcgaugggaagaugggacgauucuuuaaucauacucuaguucuccugccagacgguuguggcacccuucugcgugccuucuacugcaucuuggagcccagauccgggaaccacuguccugcuggaaauucauauacaaguuuugccacuuaccauaccccagcgacagauugcagcgacggcaacuauaauaggaacgcaucucucaauuccuucaaggaauacuucaaccugcggaauuguaccuuuauguauacguacaacauaacugaggaugaaauucuggagugguucgguaucacacagaccgcccaaggggugcaccucuuuucaagccgcuaugucgacuuauacggaggcaauauguuccaguuugcuacucugccgguguacgacacaauuaaauauuacaguaucaucccccacucuauuagauccauacagagcgauaggaaggccugggcagcuuucuauguguacaaacuucagccuuugaccuuucugcuagacuucucggucgauggcuauauccggcgcgccauugacugcggguuuaacgaucucucucaacugcauuguuccuacgagucauucgacguugaaaguggaguguauagcguauccucuuuugaggcgaagccaagcgguucaguggucgaacaggccgagggcguggagugcgauuucaguccccuucuguccgggacgccuccacagguuuacaacuuuaaacgauugguguucaccaauuguaacuacaaucucacaaagcuguuaagccuguucucugucaacgacuuuacuugcucacaaaucagucccgcagcuauagccagcaauuguuauuccucucucauucuugauuacuucucguauccgcugagcaugaaguccgacuugucagugaguucugcuggaccuaucagccaguuuaacuacaaacaguccuucucaaauccaaccugccuaauccuggccacaguaccccacaaccucacuaccauuacaaagccucugaaauauagcuacaucaauaagugcucuagauuucuuuccgaugacaggaccgaaguuccccagcuggugaacgcaaaucaauauaguccaugugucagcauugugcccucuacugucugggaggacggcgauuacuaccggaaacaguuguccccucucgaaggugggggcuggcugguggccucaggaaguacgguugcuaugacagagcaguuacagaugggcuucgggauaaccgugcaauauggaacugacaccaacagcguaugcccaaagcuggaauuugcgaaugauacaaaaaucgcaucgcagcuagguaacugugucgaguacucccucuauggcgugucugggcguggaguuuuccagaauugcaccgccgugggcguccgccagcaaagauuuguguacgacgcuuaucagaaccugguagguuacuauagcgaugacgggaacuacuacugucuuagggccugcgugucaguuccggucagugugauuuaugauaaggagacuaagacacaugcaacguuguucggcuccguggccugugaacacaucucuagcaccaugucccaguacucacggagcacucgaaguaugcugaaacgcagagacucuacauauggaccccuccagaccccugucggcugcguucuggggcuuguaaauuccagccuguuuguggaggauuguaaguugccacucggacaaucgcugugcgcuuuacccgacacaccuucaacucugaccccaaggucugugcggaguguccccggugaaaugcgccuagccuccaucgcauucaaccacccgauucagguggaucagcucaauagcucuuacuuuaaacugagcauaccuacgaacuucuccuucggcguuacccaagaguauauccagacaacuauucagaaggugaccgucgacuguaaacaguacgugugcaauggguuucaaaagugcgaacagcuuuugagagaguauggacaguucuguucaaagaucaaccaggcgcugcauggcgcuaaucucaggcaagaugacaguguucguaaccuguuugccagcgugaaaucuucccagucaaguccaauuauccccgguuucgggggcgacuuuaauuuaacacugcuugagccuguaagcauauccacuggaucucggucggcacgaagcgccaucgaagaucucuuguucgacaaggucaccauugcugaucccggcuacaugcagggguacgacgauugcaugcagcaaggaccagccucagcaagagaccugaucugugcucaguauguggccggcuacaaagugcuaccuccccugauggaugucaacauggaggcggccuauacguccagucuccuggguucuauugcugggguuggauggacagcaggccuuagcuccuuugccgcuaucccauucgcccagucaauauuuuacagguugaauggugugggcauuacccaacagguacugucugaaaaccagaaguuaaucgcaaauaaauucaaccaggcgcucggggccaugcaaacuggauuuacaaccacuaaugaggcuuuccacaaggugcaggacgccgucaacaacaaugcacaggcucugagcaaacuugccagugaacuguccaacaccuucggcgcaauuagcgccucuaucggggauauaauccagcgcuuggacccgccugagcaagaugcucagauugaccggcucaucaauggaagacugacaacgcuaaacgcguuuguggcccagcagcugguuaggucagaguccgcagcucucagugcccaacuggccaaagauaaggugaaugaaugcgucaaagcucagagcaagcgcucgggcuucuguggucaggggacccauauugugucuuuuguugugaacgcacccaauggacuuuauuucaugcacgucggcuacuauccauccaaccauaucgagguagugagcgccuacgguuugugcgacgcggcuaaucccacuaacuguauagccccuguuaauggcuacuuuauuaaaacaaacaauacccgaaucguggacgaauggucauauacagggaguucuuucuacgcaccagagcccaucacuucccugaacaccaaguaugucgccccucaggugacguaccaaaauauuagcacaaacuuaccgccaccccuccugggaaacucaaccggcaucgauuuucaggacgagcuugaugaguucuuuaagaauguaaguacuagcauuccuaacuucgggucccugacccagauaaauacaacucuacucgaccugaccuaugaaauguugucucugcaacagguggucaaggcuuuaaacgaaagcuacaucgaucucaaggagcugggaaauuauacauacuacaacaaauggccaugguauauuuggcuuggcuuuaucgcaggucugguugccuuggcgcucugcguguucuuuauucuguguugcacgggguguggaaccaauugcaugggcaagcuaaaaugcaaccgguguugcgaccguuacgaagaguaugaucuggagccccacaaggugcacguccauugaggacuagucccuguucccagagcccacuuuuuuuucuuuuuuugaaauaaaauagccugucuuucagaucucaaaggcucuuuucagagccaccaaaaaaaaaaaaaaaaaaaaaaaaaaaaaaaaaaaaaaaaaaaaaaaaaaaaaaaaaaaaaaaaaaaaaaaaaaaaaaaaaaaaaaaaaaaaaaaaaaaaa

SEQ ID NO: 14869 - RNA, 4148 nt, Artificial Sequence
  MERS-CoV/England 1__YP_007188579.1 spike protein mRNA human (variant)
aggagagucccgcagucggcguccagcggcucugcuuguucgugugugugucguugcaggccuuauucaagcuuaccaugauccacagcguguuccugcucauguuucuucugacccccacagaguccuacgucgacguuggcccugauucugugaagucagccugcauugaaguagacauacagcaaacuuucuuugauaaaacguggccaagaccgaucgacgugaguaaggcugaugggauuaucuauccccagggaaggaccuacagcaacauuacaaucacuuaucaggguuuguucccuuaccagggcgaccauggggauauguaugucuacuccgcaggacacgccaccggcacaaccccacaaaaauuauuuguggcgaauuauucucaggacguuaagcaguucgcuaacgguuuugugguccggauaggggccgcagccaauucgacuggaacagugaucauuucacccagcaccagugcuacgauccgcaaaauuuacccugcauucaugcugggcuccucuguaggcaacuuuagcgaugggaagaugggacgauucuuuaaucauacucuaguucuccugccagacgguuguggcacccuucugcgugccuucuacugcaucuuggagcccagauccgggaaccacuguccugcuggaaauucauauacaaguuuugccacuuaccauaccccagcgacagauugcagcgacggcaacuauaauaggaacgcaucucucaauuccuucaaggaauacuucaaccugcggaauuguaccuuuauguauacguacaacauaacugaggaugaaauucuggagugguucgguaucacacagaccgcccaaggggugcaccucuuuucaagccgcuaugucgacuuauacggaggcaauauguuccaguuugcuacucugccgguguacgacacaauuaaauauuacaguaucaucccccacucuauuagauccauacagagcgauaggaaggccugggcagcuuucuauguguacaaacuucagccuuugaccuuucugcuagacuucucggucgauggcuauauccggcgcgccauugacugcggguuuaacgaucucucucaacugcauuguuccuacgagucauucgacguugaaaguggaguguauagcguauccucuuuugaggcgaagccaagcgguucaguggucgaacaggccgagggcguggagugcgauuucaguccccuucuguccgggacgccuccacagguuuacaacuuuaaacgauugguguucaccaauuguaacuacaaucucacaaagcuguuaagccuguucucugucaacgacuuuacuugcucacaaaucagucccgcagcuauagccagcaauuguuauuccucucucauucuugauuacuucucguauccgcugagcaugaaguccgacuugucagugaguucugcuggaccuaucagccaguuuaacuacaaacaguccuucucaaauccaaccugccuaauccuggccacaguaccccacaaccucacuaccauuacaaagccucugaaauauagcuacaucaauaagugcucuagauuucuuuccgaugacaggaccgaaguuccccagcuggugaacgcaaaucaauauaguccaugugucagcauugugcccucuacugucugggaggacggcgauuacuaccggaaacaguuguccccucucgaaggugggggcuggcugguggccucaggaaguacgguugcuaugacagagcaguuacagaugggcuucgggauaaccgugcaauauggaacugacaccaacagcguaugcccaaagcuggaauuugcgaaugauacaaaaaucgcaucgcagcuagguaacugugucgaguacucccucuauggcgugucugggcguggaguuuuccagaauugcaccgccgugggcguccgccagcaaagauuuguguacgacgcuuaucagaaccugguagguuacuauagcgaugacgggaacuacuacugucuuagggccugcgugucaguuccggucagugugauuuaugauaaggagacuaagacacaugcaacguuguucggcuccguggccugugaacacaucucuagcaccaugucccaguacucacggagcacucgaaguaugcugaaacgcagagacucuacauauggaccccuccagaccccugucggcugcguucuggggcuuguaaauuccagccuguuuguggaggauuguaaguugccacucggacaaucgcugugcgcuuuacccgacacaccuucaacucugaccccaaggucugugcggaguguccccggugaaaugcgccuagccuccaucgcauucaaccacccgauucagguggaucagcucaauagcucuuacuuuaaacugagcauaccuacgaacuucuccuucggcguuacccaagaguauauccagacaacuauucagaaggugaccgucgacuguaaacaguacgugugcaauggguuucaaaagugcgaacagcuuuugagagaguauggacaguucuguucaaagaucaaccaggcgcugcauggcgcuaaucucaggcaagaugacaguguucguaaccuguuugccagcgugaaaucuucccagucaaguccaauuauccccgguuucgggggcgacuuuaauuuaacacugcuugagccuguaagcauauccacuggaucucggucggcacgaagcgccaucgaagaucucuuguucgacaaggucaccauugcugaucccggcuacaugcagggguacgacgauugcaugcagcaaggaccagccucagcaagagaccugaucugugcucaguauguggccggcuacaaagugcuaccuccccugauggaugucaacauggaggcggccuauacguccagucuccuggguucuauugcugggguuggauggacagcaggccuuagcuccuuugccgcuaucccauucgcccagucaauauuuuacagguugaauggugugggcauuacccaacagguacugucugaaaaccagaaguuaaucgcaaauaaauucaaccaggcgcucggggccaugcaaacuggauuuacaaccacuaaugaggcuuuccacaaggugcaggacgccgucaacaacaaugcacaggcucugagcaaacuugccagugaacuguccaacaccuucggcgcaauuagcgccucuaucggggauauaauccagcgcuuggacccgccugagcaagaugcucagauugaccggcucaucaauggaagacugacaacgcuaaacgcguuuguggcccagcagcugguuaggucagaguccgcagcucucagugcccaacuggccaaagauaaggugaaugaaugcgucaaagcucagagcaagcgcucgggcuucuguggucaggggacccauauugugucuuuuguugugaacgcacccaauggacuuuauuucaugcacgucggcuacuauccauccaaccauaucgagguagugagcgccuacgguuugugcgacgcggcuaaucccacuaacuguauagccccuguuaauggcuacuuuauuaaaacaaacaauacccgaaucguggacgaauggucauauacagggaguucuuucuacgcaccagagcccaucacuucccugaacaccaaguaugucgccccucaggugacguaccaaaauauuagcacaaacuuaccgccaccccuccugggaaacucaaccggcaucgauuuucaggacgagcuugaugaguucuuuaagaauguaaguacuagcauuccuaacuucgggucccugacccagauaaauacaacucuacucgaccugaccuaugaaauguugucucugcaacagguggucaaggcuuuaaacgaaagcuacaucgaucucaaggagcugggaaauuauacauacugaggacuagucccuguucccagagcccacuuuuuuuucuuuuuuugaaauaaaauagccugucuuucagaucucaaaggcucuuuucagagccaccaaaaaaaaaaaaaaaaaaaaaaaaaaaaaaaaaaaaaaaaaaaaaaaaaaaaaaaaaaaaaaaaaaaaaaaaaaaaaaaaaaaaaaaaaaaaaaaaaaaaa

SEQ ID NO: 14870 - RNA, 4148 nt, Artificial Sequence
  MERS-CoV/England 1__YP_007188579.1 spike protein mRNA human (variant)
aggagagucccgcagucggcguccagcggcucugcuuguucgugugugugucguugcaggccuuauucaagcuuaccaugauccacagcguguuccugcucauguuucuucugacccccacagaguccuacgucgacguuggcccugauucugugaagucagccugcauugaaguagacauacagcaaacuuucuuugauaaaacguggccaagaccgaucgacgugaguaaggcugaugggauuaucuauccccagggaaggaccuacagcaacauuacaaucacuuaucaggguuuguucccuuaccagggcgaccauggggauauguaugucuacuccgcaggacacgccaccggcacaaccccacaaaaauuauuuguggcgaauuauucucaggacguuaagcaguucgcuaacgguuuugugguccggauaggggccgcagccaauucgacuggaacagugaucauuucacccagcaccagugcuacgauccgcaaaauuuacccugcauucaugcugggcuccucuguaggcaacuuuagcgaugggaagaugggacgauucuuuaaucauacucuaguucuccugccagacgguuguggcacccuucugcgugccuucuacugcaucuuggagcccagauccgggaaccacuguccugcuggaaauucauauacaaguuuugccacuuaccauaccccagcgacagauugcagcgacggcaacuauaauaggaacgcaucucucaauuccuucaaggaauacuucaaccugcggaauuguaccuuuauguauacguacaacauaacugaggaugaaauucuggagugguucgguaucacacagaccgcccaaggggugcaccucuuuucaagccgcuaugucgacuuauacggaggcaauauguuccaguuugcuacucugccgguguacgacacaauuaaauauuacaguaucaucccccacucuauuagauccauacagagcgauaggaaggccugggcagcuuucuauguguacaaacuucagccuuugaccuuucugcuagacuucucggucgauggcuauauccggcgcgccauugacugcggguuuaacgaucucucucaacugcauuguuccuacgagucauucgacguugaaaguggaguguauagcguauccucuuuugaggcgaagccaagcgguucaguggucgaacaggccgagggcguggagugcgauuucaguccccuucuguccgggacgccuccacagguuuacaacuuuaaacgauugguguucaccaauuguaacuacaaucucacaaagcuguuaagccuguucucugucaacgacuuuacuugcucacaaaucagucccgcagcuauagccagcaauuguuauuccucucucauucuugauuacuucucguauccgcugagcaugaaguccgacuugucagugaguucugcuggaccuaucagccaguuuaacuacaaacaguccuucucaaauccaaccugccuaauccuggccacaguaccccacaaccucacuaccauuacaaagccucugaaauauagcuacaucaauaagugcucuagauuucuuuccgaugacaggaccgaaguuccccagcuggugaacgcaaaucaauauaguccaugugucagcauugugcccucuacugucugggaggacggcgauuacuaccggaaacaguuguccccucucgaaggugggggcuggcugguggccucaggaaguacgguugcuaugacagagcaguuacagaugggcuucgggauaaccgugcaauauggaacugacaccaacagcguaugcccaaagcuggaauuugcgaaugauacaaaaaucgcaucgcagcuagguaacugugucgaguacucccucuauggcgugucugggcguggaguuuuccagaauugcaccgccgugggcguccgccagcaaagauuuguguacgacgcuuaucagaaccugguagguuacuauagcgaugacgggaacuacuacugucuuagggccugcgugucaguuccggucagugugauuuaugauaaggagacuaagacacaugcaacguuguucggcuccguggccugugaacacaucucuagcaccaugucccaguacucacggagcacucgaaguaugcugaaacgcagagacucuacauauggaccccuccagaccccugucggcugcguucuggggcuuguaaauuccagccuguuuguggaggauuguaaguugccacucggacaaucgcugugcgcuuuacccgacacaccuucaacucugaccccagccucuguggguaguguccccggcgaaaugaggcuagcauccaucgcguucaaccacccgauucagguggaucagcucaauagcucuuacuuuaaacugagcauaccuacgaacuucuccuucgggguuacccaagaguauauccagacaacuauucagaaggugaccgucgacuguaaacaguacgugugcaauggauuucaaaagugcgaacagcuuuugcgggaguauggccaguucuguucaaagaucaaccaggcucugcauggugccaaucuccgccaagaugacaguguuagaaaccuguuugcaagcgugaaaucuucccagucaaguccaauuauccccggguucggcggagacuuuaauuuaacacugcuugagccuguaagcauauccacuggcucuaggucggcccguagcgcuaucgaagaucuucucuucgacaaggucaccauugccgaucccggguacaugcagggauacgacgauugcaugcagcaaggcccagcaucagcucgggaccugaucugugcccaguauguggcggguuacaaagugcuaccuccccugauggaugucaacauggaggccgcuuauacguccagucuccuggggucuauugcaggaguuggcuggacagccggucuuagcuccuuugcugccaucccauucgcacagucaauauuuuaccgauugaauggcguggggauuacccaacagguacugucugaaaaccagaaguuaaucgcgaauaaauucaaccaggcccucggagcuaugcaaacuggcuuuacaaccacuaaugaggccuuccacaaggugcaggacgcagucaacaacaaugcucaggcccugagcaaguuggcaagugaacuguccaacaccuucggggccauuagcgcuucuaucggagauauaauccagagauuggacccgccugagcaagaugcgcagauugacaggcucaucaauggccgccugacaacgcuaaacgccuuuguggcacagcagcugguucggucagaguccgcugcccucagugcccaacuggcuaaagauaaggugaaugaaugcgucaaagcacagagcaagagaucggguuucugugggcagggaacccauauugugucuuuuguugugaacgcccccaauggccuuuauuucaugcacgucgguuacuauccauccaaccauaucgagguagugagcgcguacggcuugugcgacgcugccaaucccacuaacuguauagcaccuguuaauggguacuuuauuaaaacaaacaauaccaggaucguggacgaauggucauauacaggaaguucuuucuacgccccagagcccaucacuucccugaacaccaaguaugucgcuccucaggugacguaccaaaauauuagcacaaacuuaccgccaccccuccugggcaacucaaccgggaucgauuuucaggacgagcuugaugaguucuuuaagaauguaaguacuagcauuccuaacuucggaucccugacccagauaaauacaacucuacucgaccugaccuaugaaauguugucucugcaacagguggucaaagcauuaaacgaaagcuacaucgaucucaaggagcugggcaauuauacauacugaggacuagucccuguucccagagcccacuuuuuuuucuuuuuuugaaauaaaauagccugucuuucagaucucaaaggcucuuuucagagccaccaaaaaaaaaaaaaaaaaaaaaaaaaaaaaaaaaaaaaaaaaaaaaaaaaaaaaaaaaaaaaaaaaaaaaaaaaaaaaaaaaaaaaaaaaaaaaaaaaaaaa

SEQ ID NO: 14871 - RNA, 4148 nt, Artificial Sequence
  MERS-CoV/England 1__YP_007188579.1 spike protein mRNA human (variant)
aggagagucccgcagucggcguccagcggcucugcuuguucgugugugugucguugcaggccuuauucaagcuuaccaugauccacagcguguuccugcucauguuucuucugacccccacagaguccuacgucgacguuggcccugauucugugaagucagccugcauugaaguagacauacagcaaacuuucuuugauaaaacguggccaagaccgaucgacgugaguaaggcugaugggauuaucuauccccagggaaggaccuacagcaacauuacaaucacuuaucaggguuuguucccuuaccagggcgaccauggggauauguaugucuacuccgcaggacacgccaccggcacaaccccacaaaaauuauuuguggcgaauuauucucaggacguuaagcaguucgcuaacgguuuugugguccggauaggggccgcagccaauucgacuggaacagugaucauuucacccagcaccagugcuacgauccgcaaaauuuacccugcauucaugcugggcuccucuguaggcaacuuuagcgaugggaagaugggacgauucuuuaaucauacucuaguucuccugccagacgguuguggcacccuucugcgugccuucuacugcaucuuggagcccagauccgggaaccacuguccugcuggaaauucauauacaaguuuugccacuuaccauaccccagcgacagauugcagcgacggcaacuauaauaggaacgcaucucucaauuccuucaaggaauacuucaaccugcggaauuguaccuuuauguauacguacaacauaacugaggaugaaauucuggagugguucgguaucacacagaccgcccaaggggugcaccucuuuucaagccgcuaugucgacuuauacggaggcaauauguuccaguuugcuacucugccgguguacgacacaauuaaauauuacaguaucaucccccacucuauuagauccauacagagcgauaggaaggccugggcagcuuucuauguguacaaacuucagccuuugaccuuucugcuagacuucucggucgauggcuauauccggcgcgccauugacugcggguuuaacgaucucucucaacugcauuguuccuacgagucauucgacguugaaaguggaguguauagcguauccucuuuugaggcgaagccaagcgguucaguggucgaacaggccgagggcguggagugcgauuucaguccccuucuguccgggacgccuccacagguuuacaacuuuaaacgauugguguucaccaauuguaacuacaaucucacaaagcuguuaagccuguucucugucaacgacuuuacuugcucacaaaucagucccgcagcuauagccagcaauuguuauuccucucucauucuugauuacuucucguauccgcugagcaugaaguccgacuugucagugaguucugcuggaccuaucagccaguuuaacuacaaacaguccuucucaaauccaaccugccuaauccuggccacaguaccccacaaccucacuaccauuacaaagccucugaaauauagcuacaucaauaagugcucuagauuucuuuccgaugacaggaccgaaguuccccagcuggugaacgcaaaucaauauaguccaugugucagcauugugcccucuacugucugggaggacggcgauuacuaccggaaacaguuguccccucucgaaggugggggcuggcugguggccucaggaaguacgguugcuaugacagagcaguuacagaugggcuucgggauaaccgugcaauauggaacugacaccaacagcguaugcccaaagcuggaauuugcgaaugauacaaaaaucgcaucgcagcuagguaacugugucgaguacucccucuauggcgugucugggcguggaguuuuccagaauugcaccgccgugggcguccgccagcaaagauuuguguacgacgcuuaucagaaccugguagguuacuauagcgaugacgggaacuacuacugucuuagggccugcgugucaguuccggucagugugauuuaugauaaggagacuaagacacaugcaacguuguucggcuccguggccugugaacacaucucuagcaccaugucccaguacucacggagcacucgaaguaugcugaaacgcagagacucuacauauggaccccuccagaccccugucggcugcguucuggggcuuguaaauuccagccuguuuguggaggauuguaaguugccacucggacaaucgcugugcgcuuuacccgacacaccuucaacucugaccccagccucuguggguaguguccccggcgaaaugaggcuagcauccaucgcguucaaccacccgauucagguggaucagcucaauagcucuuacuuuaaacugagcauaccuacgaacuucuccuucgggguuacccaagaguauauccagacaacuauucagaaggugaccgucgacuguaaacaguacgugugcaauggauuucaaaagugcgaacagcuuuugcgggaguauggccaguucuguucaaagaucaaccaggcucugcauggugccaaucuccgccaagaugacaguguuagaaaccuguuugcaagcgugaaaucuucccagucaaguccaauuauccccggguucggcggagacuuuaauuuaacacugcuugagccuguaagcauauccacuggcucugggucggccggaagcgcuaucgaagaucuucucuucgacaaggucaccauugccgaucccggcuacaugcaggguuacgacgauugcaugcagcaagggccagcaucagcuagggaccugaucugugcccaguauguggcgggauacaaagugcuaccuccccugauggaugucaacauggaggccgcuuauacguccagucuccugggcucuauugccgguguuggcuggacagcagggcuuagcuccuuugcugccaucccauucgcacagucaauauuuuaccguuugaauggagugggcauuacccaacagguacugucugaaaaccagaaguuaaucgcgaauaaauucaaccaggcccucggggcuaugcaaacuggauuuacaaccacuaaugaggccuuccacaaggugcaggacgcagucaacaacaaugcucaggcccugagcaaguuggcaagugaacuguccaacaccuucggcgccauuagcgcuucuaucggugauauaauccagcgguuggacccgccugagcaagaugcgcagauugaccgacucaucaaugggagacugacaacgcuaaacgccuuuguggcacagcagcugguuaggucagaguccgcugcccucagugcccaacuggcuaaagauaaggugaaugaaugcgucaaagcacagagcaagcgcucgggauucuguggccaggguacccauauugugucuuuuguugugaacgcccccaauggccuuuauuucaugcacgucggguacuauccauccaaccauaucgagguagugagcgcguacggauugugcgacgcugccaaucccacuaacuguauagcaccuguuaauggcuacuuuauuaaaacaaacaauacccggaucguggacgaauggucauauacagggaguucuuucuacgccccagagcccaucacuucccugaacaccaaguaugucgcuccucaggugacguaccaaaauauuagcacaaacuuaccgccaccccuccugggaaacucaaccggcaucgauuuucaggacgagcuugaugaguucuuuaagaauguaaguacuagcauuccuaacuucgguucccugacccagauaaauacaacucuacucgaccugaccuaugaaauguugucucugcaacagguggucaaagcauuaaacgaaagcuacaucgaucucaaggagcuggggaauuauacauacugaggacuagucccuguucccagagcccacuuuuuuuucuuuuuuugaaauaaaauagccugucuuucagaucucaaaggcucuuuucagagccaccaaaaaaaaaaaaaaaaaaaaaaaaaaaaaaaaaaaaaaaaaaaaaaaaaaaaaaaaaaaaaaaaaaaaaaaaaaaaaaaaaaaaaaaaaaaaaaaaaaaaa

SEQ ID NO: 14872 - RNA, 4229 nt, Artificial Sequence
  MERS-CoV/England 1__YP_007188579.1 spike protein mRNA human (variant)
aggagagucccgcagucggcguccagcggcucugcuuguucgugugugugucguugcaggccuuauucaagcuuaccaugauccacagcguguuccugcucauguuucuucugacccccacagaguccuacgucgacguuggcccugauucugugaagucagccugcauugaaguagacauacagcaaacuuucuuugauaaaacguggccaagaccgaucgacgugaguaaggcugaugggauuaucuauccccagggaaggaccuacagcaacauuacaaucacuuaucaggguuuguucccuuaccagggcgaccauggggauauguaugucuacuccgcaggacacgccaccggcacaaccccacaaaaauuauuuguggcgaauuauucucaggacguuaagcaguucgcuaacgguuuugugguccggauaggggccgcagccaauucgacuggaacagugaucauuucacccagcaccagugcuacgauccgcaaaauuuacccugcauucaugcugggcuccucuguaggcaacuuuagcgaugggaagaugggacgauucuuuaaucauacucuaguucuccugccagacgguuguggcacccuucugcgugccuucuacugcaucuuggagcccagauccgggaaccacuguccugcuggaaauucauauacaaguuuugccacuuaccauaccccagcgacagauugcagcgacggcaacuauaauaggaacgcaucucucaauuccuucaaggaauacuucaaccugcggaauuguaccuuuauguauacguacaacauaacugaggaugaaauucuggagugguucgguaucacacagaccgcccaaggggugcaccucuuuucaagccgcuaugucgacuuauacggaggcaauauguuccaguuugcuacucugccgguguacgacacaauuaaauauuacaguaucaucccccacucuauuagauccauacagagcgauaggaaggccugggcagcuuucuauguguacaaacuucagccuuugaccuuucugcuagacuucucggucgauggcuauauccggcgcgccauugacugcggguuuaacgaucucucucaacugcauuguuccuacgagucauucgacguugaaaguggaguguauagcguauccucuuuugaggcgaagccaagcgguucaguggucgaacaggccgagggcguggagugcgauuucaguccccuucuguccgggacgccuccacagguuuacaacuuuaaacgauugguguucaccaauuguaacuacaaucucacaaagcuguuaagccuguucucugucaacgacuuuacuugcucacaaaucagucccgcagcuauagccagcaauuguuauuccucucucauucuugauuacuucucguauccgcugagcaugaaguccgacuugucagugaguucugcuggaccuaucagccaguuuaacuacaaacaguccuucucaaauccaaccugccuaauccuggccacaguaccccacaaccucacuaccauuacaaagccucugaaauauagcuacaucaauaagugcucuagauuucuuuccgaugacaggaccgaaguuccccagcuggugaacgcaaaucaauauaguccaugugucagcauugugcccucuacugucugggaggacggcgauuacuaccggaaacaguuguccccucucgaaggugggggcuggcugguggccucaggaaguacgguugcuaugacagagcaguuacagaugggcuucgggauaaccgugcaauauggaacugacaccaacagcguaugcccaaagcuggaauuugcgaaugauacaaaaaucgcaucgcagcuagguaacugugucgaguacucccucuauggcgugucugggcguggaguuuuccagaauugcaccgccgugggcguccgccagcaaagauuuguguacgacgcuuaucagaaccugguagguuacuauagcgaugacgggaacuacuacugucuuagggccugcgugucaguuccggucagugugauuuaugauaaggagacuaagacacaugcaacguuguucggcuccguggccugugaacacaucucuagcaccaugucccaguacucacggagcacucgaaguaugcugaaacgcagagacucuacauauggaccccuccagaccccugucggcugcguucuggggcuuguaaauuccagccuguuuguggaggauuguaaguugccacucggacaaucgcugugcgcuuuacccgacacaccuucaacucugaccccagccucuguggguaguguccccggcgaaaugaggcuagcauccaucgcguucaaccacccgauucagguggaucagcucaauagcucuuacuuuaaacugagcauaccuacgaacuucuccuucgggguuacccaagaguauauccagacaacuauucagaaggugaccgucgacuguaaacaguacgugugcaauggauuucaaaagugcgaacagcuuuugcgggaguauggccaguucuguucaaagaucaaccaggcucugcauggugccaaucuccgccaagaugacaguguuagaaaccuguuugcaagcgugaaaucuucccagucaaguccaauuauccccggguucggcggagacuuuaauuuaacacugcuugagccuguaagcauauccacuggcucuaggucggcccguagcgcuaucgaagaucuucucuucgacaaggucaccauugccgaucccggguacaugcagggauacgacgauugcaugcagcaaggcccagcaucagcucgggaccugaucugugcccaguauguggcggguuacaaagugcuaccuccccugauggaugucaacauggaggccgcuuauacguccagucuccuggggucuauugcaggaguuggcuggacagccggucuuagcuccuuugcugccaucccauucgcacagucaauauuuuaccgauugaauggcguggggauuacccaacagguacugucugaaaaccagaaguuaaucgcgaauaaauucaaccaggcccucggagcuaugcaaacuggcuuuacaaccacuaaugaggccuuccacaaggugcaggacgcagucaacaacaaugcucaggcccugagcaaguuggcaagugaacuguccaacaccuucggggccauuagcgcuucuaucggagauauaauccagagauuggacccgccugagcaagaugcgcagauugacaggcucaucaauggccgccugacaacgcuaaacgccuuuguggcacagcagcugguucggucagaguccgcugcccucagugcccaacuggcuaaagauaaggugaaugaaugcgucaaagcacagagcaagagaucggguuucugugggcagggaacccauauugugucuuuuguugugaacgcccccaauggccuuuauuucaugcacgucgguuacuauccauccaaccauaucgagguagugagcgcguacggcuugugcgacgcugccaaucccacuaacuguauagcaccuguuaauggguacuuuauuaaaacaaacaauaccaggaucguggacgaauggucauauacaggaaguucuuucuacgccccagagcccaucacuucccugaacaccaaguaugucgcuccucaggugacguaccaaaauauuagcacaaacuuaccgccaccccuccugggcaacucaaccgggaucgauuuucaggacgagcuugaugaguucuuuaagaauguaaguacuagcauuccuaacuucggaucccugacccagauaaauacaacucuacucgaccugaccuaugaaauguugucucugcaacagguggucaaagcauuaaacgaaagcuacaucgaucucaaggagcugggcaauuauacauacgguggguacauuccagaagcgccccgcgacggacaggccuauguucgaaaagauggcgagugggugcuucuguccacguuuugaggacuagucccuguucccagagcccacuuuuuuuucuuuuuuugaaauaaaauagccugucuuucagaucucaaaggcucuuuucagagccaccaaaaaaaaaaaaaaaaaaaaaaaaaaaaaaaaaaaaaaaaaaaaaaaaaaaaaaaaaaaaaaaaaaaaaaaaaaaaaaaaaaaaaaaaaaaaaaaaaaaaa

SEQ ID NO: 14873 - RNA, 4229 nt, Artificial Sequence
  MERS-CoV/England 1__YP_007188579.1 spike protein mRNA human (variant)
aggagagucccgcagucggcguccagcggcucugcuuguucgugugugugucguugcaggccuuauucaagcuuaccaugauccacagcguguuccugcucauguuucuucugacccccacagaguccuacgucgacguuggcccugauucugugaagucagccugcauugaaguagacauacagcaaacuuucuuugauaaaacguggccaagaccgaucgacgugaguaaggcugaugggauuaucuauccccagggaaggaccuacagcaacauuacaaucacuuaucaggguuuguucccuuaccagggcgaccauggggauauguaugucuacuccgcaggacacgccaccggcacaaccccacaaaaauuauuuguggcgaauuauucucaggacguuaagcaguucgcuaacgguuuugugguccggauaggggccgcagccaauucgacuggaacagugaucauuucacccagcaccagugcuacgauccgcaaaauuuacccugcauucaugcugggcuccucuguaggcaacuuuagcgaugggaagaugggacgauucuuuaaucauacucuaguucuccugccagacgguuguggcacccuucugcgugccuucuacugcaucuuggagcccagauccgggaaccacuguccugcuggaaauucauauacaaguuuugccacuuaccauaccccagcgacagauugcagcgacggcaacuauaauaggaacgcaucucucaauuccuucaaggaauacuucaaccugcggaauuguaccuuuauguauacguacaacauaacugaggaugaaauucuggagugguucgguaucacacagaccgcccaaggggugcaccucuuuucaagccgcuaugucgacuuauacggaggcaauauguuccaguuugcuacucugccgguguacgacacaauuaaauauuacaguaucaucccccacucuauuagauccauacagagcgauaggaaggccugggcagcuuucuauguguacaaacuucagccuuugaccuuucugcuagacuucucggucgauggcuauauccggcgcgccauugacugcggguuuaacgaucucucucaacugcauuguuccuacgagucauucgacguugaaaguggaguguauagcguauccucuuuugaggcgaagccaagcgguucaguggucgaacaggccgagggcguggagugcgauuucaguccccuucuguccgggacgccuccacagguuuacaacuuuaaacgauugguguucaccaauuguaacuacaaucucacaaagcuguuaagccuguucucugucaacgacuuuacuugcucacaaaucagucccgcagcuauagccagcaauuguuauuccucucucauucuugauuacuucucguauccgcugagcaugaaguccgacuugucagugaguucugcuggaccuaucagccaguuuaacuacaaacaguccuucucaaauccaaccugccuaauccuggccacaguaccccacaaccucacuaccauuacaaagccucugaaauauagcuacaucaauaagugcucuagauuucuuuccgaugacaggaccgaaguuccccagcuggugaacgcaaaucaauauaguccaugugucagcauugugcccucuacugucugggaggacggcgauuacuaccggaaacaguuguccccucucgaaggugggggcuggcugguggccucaggaaguacgguugcuaugacagagcaguuacagaugggcuucgggauaaccgugcaauauggaacugacaccaacagcguaugcccaaagcuggaauuugcgaaugauacaaaaaucgcaucgcagcuagguaacugugucgaguacucccucuauggcgugucugggcguggaguuuuccagaauugcaccgccgugggcguccgccagcaaagauuuguguacgacgcuuaucagaaccugguagguuacuauagcgaugacgggaacuacuacugucuuagggccugcgugucaguuccggucagugugauuuaugauaaggagacuaagacacaugcaacguuguucggcuccguggccugugaacacaucucuagcaccaugucccaguacucacggagcacucgaaguaugcugaaacgcagagacucuacauauggaccccuccagaccccugucggcugcguucuggggcuuguaaauuccagccuguuuguggaggauuguaaguugccacucggacaaucgcugugcgcuuuacccgacacaccuucaacucugaccccagccucuguggguaguguccccggcgaaaugaggcuagcauccaucgcguucaaccacccgauucagguggaucagcucaauagcucuuacuuuaaacugagcauaccuacgaacuucuccuucgggguuacccaagaguauauccagacaacuauucagaaggugaccgucgacuguaaacaguacgugugcaauggauuucaaaagugcgaacagcuuuugcgggaguauggccaguucuguucaaagaucaaccaggcucugcauggugccaaucuccgccaagaugacaguguuagaaaccuguuugcaagcgugaaaucuucccagucaaguccaauuauccccggguucggcggagacuuuaauuuaacacugcuugagccuguaagcauauccacuggcucugggucggccggaagcgcuaucgaagaucuucucuucgacaaggucaccauugccgaucccggcuacaugcaggguuacgacgauugcaugcagcaagggccagcaucagcuagggaccugaucugugcccaguauguggcgggauacaaagugcuaccuccccugauggaugucaacauggaggccgcuuauacguccagucuccugggcucuauugccgguguuggcuggacagcagggcuuagcuccuuugcugccaucccauucgcacagucaauauuuuaccguuugaauggagugggcauuacccaacagguacugucugaaaaccagaaguuaaucgcgaauaaauucaaccaggcccucggggcuaugcaaacuggauuuacaaccacuaaugaggccuuccacaaggugcaggacgcagucaacaacaaugcucaggcccugagcaaguuggcaagugaacuguccaacaccuucggcgccauuagcgcuucuaucggugauauaauccagcgguuggacccgccugagcaagaugcgcagauugaccgacucaucaaugggagacugacaacgcuaaacgccuuuguggcacagcagcugguuaggucagaguccgcugcccucagugcccaacuggcuaaagauaaggugaaugaaugcgucaaagcacagagcaagcgcucgggauucuguggccaggguacccauauugugucuuuuguugugaacgcccccaauggccuuuauuucaugcacgucggguacuauccauccaaccauaucgagguagugagcgcguacggauugugcgacgcugccaaucccacuaacuguauagcaccuguuaauggcuacuuuauuaaaacaaacaauacccggaucguggacgaauggucauauacagggaguucuuucuacgccccagagcccaucacuucccugaacaccaaguaugucgcuccucaggugacguaccaaaauauuagcacaaacuuaccgccaccccuccugggaaacucaaccggcaucgauuuucaggacgagcuugaugaguucuuuaagaauguaaguacuagcauuccuaacuucgguucccugacccagauaaauacaacucuacucgaccugaccuaugaaauguugucucugcaacagguggucaaagcauuaaacgaaagcuacaucgaucucaaggagcuggggaauuauacauacggaggcuacauuccagaagcccccagagacggucaggcguauguuaggaaagauggcgagugggugcuucuguccacguuuugaggacuagucccuguucccagagcccacuuuuuuuucuuuuuuugaaauaaaauagccugucuuucagaucucaaaggcucuuuucagagccaccaaaaaaaaaaaaaaaaaaaaaaaaaaaaaaaaaaaaaaaaaaaaaaaaaaaaaaaaaaaaaaaaaaaaaaaaaaaaaaaaaaaaaaaaaaaaaaaaaaaaa

SEQ ID NO: 14874 - RNA, 4279 nt, Artificial Sequence
  MERS-CoV/MERS-CoV-Jeddah-human-1__AHE78108.1 spike protein mRNA gc (1-1353)
aggagaaagcuuaccaugauccacagcguguuccugcucauguuccugcugacccccaccgaguccuacgucgacgugggcccggacagcgugaaguccgccugcaucgaggucgacauccagcagacguucuucgacaagaccuggccccgccccaucgacgugagcaaggccgacgggaucaucuacccccagggccggaccuacuccaacaucaccaucacguaccagggccucuucccguaccagggggaccacggggacauguacguguacagcgcgggccacgccaccggcaccacgccccagaagcuguucgucgccaacuacucccaggacgugaagcaguucgccaacggguucgugguccgcaucggcgccgcggccaacagcaccgggaccgugaucaucucccccagcaccuccgccaccauccggaagaucuaccccgccuucaugcugggcagcuccguggggaacuucagcgacggcaagaugggccgcuucuucaaccacacgcucguccugcugccggacgggugcggcacccuccugcgggcguucuacugcauccuggagccccgcuccgggaaccacugccccgccggcaacagcuacaccuccuucgccaccuaccacacgcccgccaccgacugcagcgacggcaacuacaaccggaacgccucccucaacagcuucaaggaguacuucaaccugcgcaacugcaccuucauguacaccuacaacaucacggaggacgagauccuggagugguucgggaucacccagaccgcgcagggcgugcaccucuucagcucccgguacguggaccuguacgggggcaacauguuccaguucgccacccugccggucuacgacacgaucaaguacuacagcaucaucccccacuccauccgcagcauccaguccgaccggaaggccugggccgccuucuacguguacaagcuccagccccugaccuuccugcucgacuucagcguggacggguacauccgccgggcgaucgacugcggcuucaacgaccugucccagcugcacugcagcuacgaguccuucgacgucgagagcggcguguacuccgugagcuccuucgaggccaagcccagcggguccgucguggagcaggccgagggcguggagugcgacuucagcccgcuccuguccgggaccccgccccaggucuacaacuucaagcgccugguguucaccaacugcaacuacaaccucacgaagcugcugagccucuucuccgucaacgacuucacgugcagccagaucagccccgccgccaucgcguccaacugcuacagcucccugauccuggacuacuucagcuacccccucuccaugaaguccgaccugagcgugagcuccgccggccccaucagccaguucaacuacaagcaguccuucagcaacccgaccugccugauccucgccaccgugccccacaaccugaccaccaucaccaagccccugaaguacuccuacaucaacaagugcagccggcuccuguccgacgaccgcaccgaggucccccagcuggugaacgccaaccaguacagccccugcguguccaucguccccagcacggugugggaggacggggacuacuaccggaagcagcucagcccgcuggagggcggcggguggcugguggccuccggcagcaccgucgcgaugaccgagcagcuccagaugggguucggcaucaccgugcaguacgggaccgacacgaacuccgugugccccaagcuggaguucgccaacgacaccaagaucgccagccagcugggcaacugcgucgaguacucccucuacggcgugagcgggcgcggcguguuccagaacugcaccgccgucggggugcggcagcagcgcuucguguacgacgcguaccagaaccuggucggcuacuacuccgacgacggcaacuacuacugccugcgggccugcgugagcgugcccgucuccgugaucuacgacaaggagaccaagacgcacgccacccuguucgggagcguggccugcgagcacaucuccagcaccaugucccaguacagccgcuccacccgcagcaugcucaagcggcgcgacuccacguacggcccgcugcagacccccgucgggugcgugcugggccucgugaacagcucccuguucgucgaggacugcaagcugccccucgggcagagccugugcgcccugcccgacaccccgagcacccucacgccccgguccgugcgcagcgugcccggcgagaugcggcuggcguccaucgccuucaaccaccccauccaggucgaccagcugaacagcuccuacuucaagcucagcaucccgaccaacuucuccuucggcgugacccaggaguacauccagaccacgauccagaaggugaccgucgacugcaagcaguacgugugcaacggguuccagaagugcgagcagcugcugcgcgaguacggccaguucugcagcaagaucaaccaggcccuccacggggccaaccugcggcaggacgacuccgugcgcaaccuguucgccagcgucaaguccagccaguccagccccaucauccccggcuucgggggcgacuucaaccucacccugcuggagcccguguccaucagcaccggcucccggagcgcgcgcuccgccaucgaggaccuccuguucgacaaggugacgaucgccgacccgggguacaugcagggcuacgacgacugcaugcagcaggggcccgccagcgcccgggaccugaucugcgcgcaguacgucgccggcuacaaggugcucccgccccugauggacgugaacauggaggccgccuacaccagcucccugcucgggagcaucgcgggcgucggcuggaccgccgggcuguccagcuucgccgccauccccuucgcccaguccaucuucuaccgccugaacggcguggggaucacccagcagguccucagcgagaaccagaagcugaucgcgaacaaguucaaccaggcccugggcgccaugcagacgggguucaccaccaccaacgaggccuuccacaaggugcaggacgccgugaacaacaacgcgcaggcccucuccaagcuggccagcgagcuguccaacacguucggcgccaucagcgccuccaucggcgacaucauccagcggcucgacgugcuggagcaggacgcgcagaucgaccgccugaucaacgggcggcucaccacccugaacgccuucgucgcccagcagcuggugcgcagcgaguccgccgcgcucagcgcccagcuggccaaggacaaggugaacgagugcgucaaggcccaguccaagcggagcggcuucugcgggcagggcacccacaucguguccuucgucgugaacgcccccaacggccuguacuucaugcacgugggguacuaccccagcaaccacaucgaggucguguccgcguacggccucugcgacgccgccaaccccacgaacugcaucgccccggugaacggguacuucaucaagaccaacaacacccgcaucgucgacgaguggagcuacaccggcagcuccuucuacgcccccgagcccaucacgagccugaacaccaaguacguggcgccccaggugaccuaccagaacaucuccaccaaccugccgccgccccuccuggggaacagcaccggcaucgacuuccaggacgagcuggacgaguucuucaagaacgucuccacgagcauccccaacuucggcucccucacccagaucaacaccacccugcuggaccucacguacgagaugcugagccugcagcaggucgugaaggcccucaacgaguccuacaucgaccugaaggagcuggggaacuacaccuacuacaacaaguggcccugguacaucuggcucggcuucaucgccgggcugguggcccuggcccucugcguguucuucauccugugcugcaccggcugcgggaccaacugcaugggcaagcugaagugcaaccggugcugcgaccgcuacgaggaguacgaccucgagccccacaaggugcacguccacugaggacuaguuauaagacugacuagcccgaugggccucccaacgggcccuccuccccuccuugcaccgagauuaauaaaaaaaaaaaaaaaaaaaaaaaaaaaaaaaaaaaaaaaaaaaaaaaaaaaaaaaaaaaaaaaaugcaucccccccccccccccccccccccccccccccaaaggcucuuuucagagccaccagaauu

SEQ ID NO: 14875 - RNA, 4279 nt, Artificial Sequence
  MERS-CoV/MERS-CoV-Jeddah-human-1__AHE78108.1 spike protein mRNA gc (1-1353)(V1060P_L1061P)
aggagaaagcuuaccaugauccacagcguguuccugcucauguuccugcugacccccaccgaguccuacgucgacgugggcccggacagcgugaaguccgccugcaucgaggucgacauccagcagacguucuucgacaagaccuggccccgccccaucgacgugagcaaggccgacgggaucaucuacccccagggccggaccuacuccaacaucaccaucacguaccagggccucuucccguaccagggggaccacggggacauguacguguacagcgcgggccacgccaccggcaccacgccccagaagcuguucgucgccaacuacucccaggacgugaagcaguucgccaacggguucgugguccgcaucggcgccgcggccaacagcaccgggaccgugaucaucucccccagcaccuccgccaccauccggaagaucuaccccgccuucaugcugggcagcuccguggggaacuucagcgacggcaagaugggccgcuucuucaaccacacgcucguccugcugccggacgggugcggcacccuccugcgggcguucuacugcauccuggagccccgcuccgggaaccacugccccgccggcaacagcuacaccuccuucgccaccuaccacacgcccgccaccgacugcagcgacggcaacuacaaccggaacgccucccucaacagcuucaaggaguacuucaaccugcgcaacugcaccuucauguacaccuacaacaucacggaggacgagauccuggagugguucgggaucacccagaccgcgcagggcgugcaccucuucagcucccgguacguggaccuguacgggggcaacauguuccaguucgccacccugccggucuacgacacgaucaaguacuacagcaucaucccccacuccauccgcagcauccaguccgaccggaaggccugggccgccuucuacguguacaagcuccagccccugaccuuccugcucgacuucagcguggacggguacauccgccgggcgaucgacugcggcuucaacgaccugucccagcugcacugcagcuacgaguccuucgacgucgagagcggcguguacuccgugagcuccuucgaggccaagcccagcggguccgucguggagcaggccgagggcguggagugcgacuucagcccgcuccuguccgggaccccgccccaggucuacaacuucaagcgccugguguucaccaacugcaacuacaaccucacgaagcugcugagccucuucuccgucaacgacuucacgugcagccagaucagccccgccgccaucgcguccaacugcuacagcucccugauccuggacuacuucagcuacccccucuccaugaaguccgaccugagcgugagcuccgccggccccaucagccaguucaacuacaagcaguccuucagcaacccgaccugccugauccucgccaccgugccccacaaccugaccaccaucaccaagccccugaaguacuccuacaucaacaagugcagccggcuccuguccgacgaccgcaccgaggucccccagcuggugaacgccaaccaguacagccccugcguguccaucguccccagcacggugugggaggacggggacuacuaccggaagcagcucagcccgcuggagggcggcggguggcugguggccuccggcagcaccgucgcgaugaccgagcagcuccagaugggguucggcaucaccgugcaguacgggaccgacacgaacuccgugugccccaagcuggaguucgccaacgacaccaagaucgccagccagcugggcaacugcgucgaguacucccucuacggcgugagcgggcgcggcguguuccagaacugcaccgccgucggggugcggcagcagcgcuucguguacgacgcguaccagaaccuggucggcuacuacuccgacgacggcaacuacuacugccugcgggccugcgugagcgugcccgucuccgugaucuacgacaaggagaccaagacgcacgccacccuguucgggagcguggccugcgagcacaucuccagcaccaugucccaguacagccgcuccacccgcagcaugcucaagcggcgcgacuccacguacggcccgcugcagacccccgucgggugcgugcugggccucgugaacagcucccuguucgucgaggacugcaagcugccccucgggcagagccugugcgcccugcccgacaccccgagcacccucacgccccgguccgugcgcagcgugcccggcgagaugcggcuggcguccaucgccuucaaccaccccauccaggucgaccagcugaacagcuccuacuucaagcucagcaucccgaccaacuucuccuucggcgugacccaggaguacauccagaccacgauccagaaggugaccgucgacugcaagcaguacgugugcaacggguuccagaagugcgagcagcugcugcgcgaguacggccaguucugcagcaagaucaaccaggcccuccacggggccaaccugcggcaggacgacuccgugcgcaaccuguucgccagcgucaaguccagccaguccagccccaucauccccggcuucgggggcgacuucaaccucacccugcuggagcccguguccaucagcaccggcucccggagcgcgcgcuccgccaucgaggaccuccuguucgacaaggugacgaucgccgacccgggguacaugcagggcuacgacgacugcaugcagcaggggcccgccagcgcccgggaccugaucugcgcgcaguacgucgccggcuacaaggugcucccgccccugauggacgugaacauggaggccgccuacaccagcucccugcucgggagcaucgcgggcgucggcuggaccgccgggcuguccagcuucgccgccauccccuucgcccaguccaucuucuaccgccugaacggcguggggaucacccagcagguccucagcgagaaccagaagcugaucgcgaacaaguucaaccaggcccugggcgccaugcagacgggguucaccaccaccaacgaggccuuccacaaggugcaggacgccgugaacaacaacgcgcaggcccucuccaagcuggccagcgagcuguccaacacguucggcgccaucagcgccuccaucggcgacaucauccagcggcucgacccgcccgagcaggacgcgcagaucgaccgccugaucaacgggcggcucaccacccugaacgccuucgucgcccagcagcuggugcgcagcgaguccgccgcgcucagcgcccagcuggccaaggacaaggugaacgagugcgucaaggcccaguccaagcggagcggcuucugcgggcagggcacccacaucguguccuucgucgugaacgcccccaacggccuguacuucaugcacgugggguacuaccccagcaaccacaucgaggucguguccgcguacggccucugcgacgccgccaaccccacgaacugcaucgccccggugaacggguacuucaucaagaccaacaacacccgcaucgucgacgaguggagcuacaccggcagcuccuucuacgcccccgagcccaucacgagccugaacaccaaguacguggcgccccaggugaccuaccagaacaucuccaccaaccugccgccgccccuccuggggaacagcaccggcaucgacuuccaggacgagcuggacgaguucuucaagaacgucuccacgagcauccccaacuucggcucccucacccagaucaacaccacccugcuggaccucacguacgagaugcugagccugcagcaggucgugaaggcccucaacgaguccuacaucgaccugaaggagcuggggaacuacaccuacuacaacaaguggcccugguacaucuggcucggcuucaucgccgggcugguggcccuggcccucugcguguucuucauccugugcugcaccggcugcgggaccaacugcaugggcaagcugaagugcaaccggugcugcgaccgcuacgaggaguacgaccucgagccccacaaggugcacguccacugaggacuaguuauaagacugacuagcccgaugggccucccaacgggcccuccuccccuccuugcaccgagauuaauaaaaaaaaaaaaaaaaaaaaaaaaaaaaaaaaaaaaaaaaaaaaaaaaaaaaaaaaaaaaaaaaugcaucccccccccccccccccccccccccccccccaaaggcucuuuucagagccaccagaauu

SEQ ID NO: 14876 - RNA, 4279 nt, Artificial Sequence
  MERS-CoV/Al-Hasa_4_2013__AGN70929.1 spike protein mRNA gc (1-1353)
aggagaaagcuuaccaugauccacagcguguuccugcucauguuccugcugacccccaccgaguccuacgucgacgugggcccggacagcgugaaguccgccugcaucgaggucgacauccagcagacguucuucgacaagaccuggccccgccccaucgacgugagcaaggccgacgggaucaucuacccccagggccggaccuacuccaacaucaccaucacguaccagggccucuucccguaccagggcgaccacggggacauguacguguacagcgcgggccacgccaccggcaccacgccccagaagcuguucgucgccaacuacucccaggacgugaagcaguucgccaacggguucgugguccgcaucggcgccgcggccaacagcaccgggaccgugaucaucucccccagcaccuccgccaccauccggaagaucuaccccgccuucaugcugggcagcuccguggggaacuucagcgacggcaagaugggccgcuucuucaaccacacgcucguccugcugccggacgggugcggcacccuccugcgggcguucuacugcauccuggagccccgcuccgggaaccacugccccgccggcaacagcuacaccuccuucgccaccuaccacacgcccgccaccgacugcagcgacggcaacuacaaccggaacgccucccucaacagcuucaaggaguacuucaaccugcgcaacugcaccuucauguacaccuacaacaucacggaggacgagauccuggagugguucgggaucacccagaccgcgcagggcgugcaccucuucagcucccgguacguggaccuguacgggggcaacauguuccaguucgccacccugccggucuacgacacgaucaaguacuacagcaucaucccccacuccauccgcagcauccaguccgaccggaaggccugggccgccuucuacguguacaagcuccagccccugaccuuccugcucgacuucagcguggacggguacauccgccgggcgaucgacugcggcuucaacgaccugucccagcugcacugcagcuacgaguccuucgacgucgagagcggcguguacuccgugagcuccuucgaggccaagcccagcggguccgucguggagcaggccgagggcguggagugcgacuucagcccgcuccuguccgggaccccgccccaggucuacaacuucaagcgccugguguucaccaacugcaacuacaaccucacgaagcugcugagccucuucuccgucaacgacuucacgugcagccagaucagccccgccgccaucgcguccaacugcuacagcucccugauccuggacuacuucagcuacccccucuccaugaaguccgaccugagcgugagcuccgccgggcccaucagccaguucaacuacaagcaguccuucagcaacccgaccugccugauccucgccaccgugccccacaaccugaccaccaucaccaagccccugaaguacuccuacaucaacaagugcagccggcuccuguccgacgaccgcaccgaggucccccagcuggugaacgccaaccaguacagccccugcguguccaucguccccagcacggugugggaggacggggacuacuaccggaagcagcucagcccgcuggagggcggcggguggcugguggccuccggcagcaccgucgcgaugaccgagcagcuccagaugggguucggcaucaccgugcaguacgggaccgacacgaacuccgugugccccaagcuggaguucgccaacgacaccaagaucgccagccagcugggcaacugcgucgaguacucccuguacggcgugagcgggcgcggcguguuccagaacugcaccgccgucggggugcggcagcagcgcuucguguacgacgcguaccagaaccucgucggcuacuacuccgacgacggcaacuacuacugccugcgggccugcgugagcgugcccgucuccgugaucuacgacaaggagaccaagacgcacgccacccuguucgggagcguggccugcgagcacaucuccagcaccaugucccaguacagccgcuccacccgcagcaugcucaagcggcgcgacuccacguacggcccgcugcagacccccgucgggugcgugcugggccucgugaacagcucccuguucgucgaggacugcaagcugccccucgggcagagccugugcgcccugcccgacaccccgagcacccucacgccccgguccgugcgcagcgugcccggcgagaugcggcuggcguccaucgccuucaaccaccccauccaggucgaccagcugaacagcuccuacuucaagcucagcaucccgaccaacuucuccuucggcgugacccaggaguacauccagaccacgauccagaaggugaccgucgacugcaagcaguacgugugcaacggguuccagaagugcgagcagcugcugcgcgaguacggccaguucugcagcaagaucaaccaggcccuccacggggccaaccugcggcaggacgacuccgugcgcaaccuguucgccagcgucaaguccagccaguccagccccaucauccccggcuucgggggcgacuucaaccucacccugcuggagcccguguccaucagcaccggcucccggagcgcgcgcuccgccaucgaggaccuccuguucgacaaggugacgaucgccgacccgggguacaugcagggcuacgacgacugcaugcagcaggggcccgccagcgcccgggaccugaucugcgcgcaguacgucgccggcuacaaggugcucccgccccugauggacgugaacauggaggccgccuacaccagcucccugcucgggagcaucgcgggcgucggcuggaccgccgggcuguccagcuucgccgccauccccuucgcccaguccaucuucuaccgccugaacggcguggggaucacccagcagguccucagcgagaaccagaagcugaucgcgaacaaguucaaccaggcccugggcgccaugcagacgggguucaccaccaccaacgaggccuuccggaaggugcaggacgccgugaacaacaacgcgcaggcccucuccaagcuggccagcgagcuguccaacacguucggcgccaucagcgccuccaucggcgacaucauccagcgccucgacgugcuggagcaggacgcgcagaucgaccggcugaucaacgggcgccucaccacccugaacgccuucgucgcccagcagcuggugcggagcgaguccgccgcgcucagcgcccagcuggccaaggacaaggugaacgagugcgucaaggcccaguccaagcgcagcggcuucugcgggcagggcacccacaucguguccuucgucgugaacgcccccaacggccuguacuucaugcacgugggguacuaccccagcaaccacaucgaggucguguccgcguacggccucugcgacgccgccaaccccacgaacugcaucgccccggugaacggguacuucaucaagaccaacaacacccggaucgucgacgaguggagcuacaccggcagcuccuucuacgcccccgagcccaucacgagccugaacaccaaguacguggcgccccacgugaccuaccagaacaucuccaccaaccugccgccgccccuccuggggaacagcaccggcaucgacuuccaggacgagcuggacgaguucuucaagaacgucuccacgagcauccccaacuucggcucccucacccagaucaacaccacccugcuggaccucacguacgagaugcugagccugcagcaggucgugaaggcccucaacgaguccuacaucgaccugaaggagcuggggaacuacaccuacuacaacaaguggcccugguacaucuggcucggcuucaucgccgggcugguggcccuggcccucugcguguucuucauccugugcugcaccggcugcgggaccaacugcaugggcaagcugaagugcaaccgcugcugcgaccgcuacgaggaguacgaccucgagccccacaaggugcacguccacugaggacuaguuauaagacugacuagcccgaugggccucccaacgggcccuccuccccuccuugcaccgagauuaauaaaaaaaaaaaaaaaaaaaaaaaaaaaaaaaaaaaaaaaaaaaaaaaaaaaaaaaaaaaaaaaaugcaucccccccccccccccccccccccccccccccaaaggcucuuuucagagccaccagaauu

SEQ ID NO: 14877 - RNA, 4279 nt, Artificial Sequence
  MERS-CoV/Al-Hasa_4_2013__AGN70929.1 spike protein mRNA gc (1-1353)(V1060P_L1061P)
aggagaaagcuuaccaugauccacagcguguuccugcucauguuccugcugacccccaccgaguccuacgucgacgugggcccggacagcgugaaguccgccugcaucgaggucgacauccagcagacguucuucgacaagaccuggccccgccccaucgacgugagcaaggccgacgggaucaucuacccccagggccggaccuacuccaacaucaccaucacguaccagggccucuucccguaccagggcgaccacggggacauguacguguacagcgcgggccacgccaccggcaccacgccccagaagcuguucgucgccaacuacucccaggacgugaagcaguucgccaacggguucgugguccgcaucggcgccgcggccaacagcaccgggaccgugaucaucucccccagcaccuccgccaccauccggaagaucuaccccgccuucaugcugggcagcuccguggggaacuucagcgacggcaagaugggccgcuucuucaaccacacgcucguccugcugccggacgggugcggcacccuccugcgggcguucuacugcauccuggagccccgcuccgggaaccacugccccgccggcaacagcuacaccuccuucgccaccuaccacacgcccgccaccgacugcagcgacggcaacuacaaccggaacgccucccucaacagcuucaaggaguacuucaaccugcgcaacugcaccuucauguacaccuacaacaucacggaggacgagauccuggagugguucgggaucacccagaccgcgcagggcgugcaccucuucagcucccgguacguggaccuguacgggggcaacauguuccaguucgccacccugccggucuacgacacgaucaaguacuacagcaucaucccccacuccauccgcagcauccaguccgaccggaaggccugggccgccuucuacguguacaagcuccagccccugaccuuccugcucgacuucagcguggacggguacauccgccgggcgaucgacugcggcuucaacgaccugucccagcugcacugcagcuacgaguccuucgacgucgagagcggcguguacuccgugagcuccuucgaggccaagcccagcggguccgucguggagcaggccgagggcguggagugcgacuucagcccgcuccuguccgggaccccgccccaggucuacaacuucaagcgccugguguucaccaacugcaacuacaaccucacgaagcugcugagccucuucuccgucaacgacuucacgugcagccagaucagccccgccgccaucgcguccaacugcuacagcucccugauccuggacuacuucagcuacccccucuccaugaaguccgaccugagcgugagcuccgccgggcccaucagccaguucaacuacaagcaguccuucagcaacccgaccugccugauccucgccaccgugccccacaaccugaccaccaucaccaagccccugaaguacuccuacaucaacaagugcagccggcuccuguccgacgaccgcaccgaggucccccagcuggugaacgccaaccaguacagccccugcguguccaucguccccagcacggugugggaggacggggacuacuaccggaagcagcucagcccgcuggagggcggcggguggcugguggccuccggcagcaccgucgcgaugaccgagcagcuccagaugggguucggcaucaccgugcaguacgggaccgacacgaacuccgugugccccaagcuggaguucgccaacgacaccaagaucgccagccagcugggcaacugcgucgaguacucccuguacggcgugagcgggcgcggcguguuccagaacugcaccgccgucggggugcggcagcagcgcuucguguacgacgcguaccagaaccucgucggcuacuacuccgacgacggcaacuacuacugccugcgggccugcgugagcgugcccgucuccgugaucuacgacaaggagaccaagacgcacgccacccuguucgggagcguggccugcgagcacaucuccagcaccaugucccaguacagccgcuccacccgcagcaugcucaagcggcgcgacuccacguacggcccgcugcagacccccgucgggugcgugcugggccucgugaacagcucccuguucgucgaggacugcaagcugccccucgggcagagccugugcgcccugcccgacaccccgagcacccucacgccccgguccgugcgcagcgugcccggcgagaugcggcuggcguccaucgccuucaaccaccccauccaggucgaccagcugaacagcuccuacuucaagcucagcaucccgaccaacuucuccuucggcgugacccaggaguacauccagaccacgauccagaaggugaccgucgacugcaagcaguacgugugcaacggguuccagaagugcgagcagcugcugcgcgaguacggccaguucugcagcaagaucaaccaggcccuccacggggccaaccugcggcaggacgacuccgugcgcaaccuguucgccagcgucaaguccagccaguccagccccaucauccccggcuucgggggcgacuucaaccucacccugcuggagcccguguccaucagcaccggcucccggagcgcgcgcuccgccaucgaggaccuccuguucgacaaggugacgaucgccgacccgggguacaugcagggcuacgacgacugcaugcagcaggggcccgccagcgcccgggaccugaucugcgcgcaguacgucgccggcuacaaggugcucccgccccugauggacgugaacauggaggccgccuacaccagcucccugcucgggagcaucgcgggcgucggcuggaccgccgggcuguccagcuucgccgccauccccuucgcccaguccaucuucuaccgccugaacggcguggggaucacccagcagguccucagcgagaaccagaagcugaucgcgaacaaguucaaccaggcccugggcgccaugcagacgggguucaccaccaccaacgaggccuuccggaaggugcaggacgccgugaacaacaacgcgcaggcccucuccaagcuggccagcgagcuguccaacacguucggcgccaucagcgccuccaucggcgacaucauccagcgccucgacccgcccgagcaggacgcgcagaucgaccggcugaucaacgggcgccugaccacccucaacgccuucguggcccagcagcugguccggagcgaguccgccgcgcugagcgcccagcucgccaaggacaaggugaacgagugcgugaaggcccaguccaagcgcagcggcuucugcgggcagggcacccacaucgucuccuucguggucaacgcccccaacggccuguacuucaugcacgugggguacuaccccagcaaccacaucgagguggucuccgcguacggccugugcgacgccgccaaccccacgaacugcaucgcccccgugaacggguacuucaucaagaccaacaacacccggaucguggacgaguggagcuacaccggcagcuccuucuacgcccccgagccgaucacgagccucaacaccaaguacgucgcgccccacgugaccuaccagaacaucuccaccaaccugcccccgccccugcucgggaacagcaccggcaucgacuuccaggacgagcuggacgaguucuucaagaacguguccacgagcauccccaacuucggcucccugacccagaucaacaccacccuccuggaccugacguacgagaugcucagccugcagcaggucgugaaggcccugaacgaguccuacaucgaccucaaggagcuggggaacuacaccuacuacaacaaguggcccugguacaucuggcugggcuucaucgccgggcucguggcccuggcccugugcgucuucuucauccucugcugcaccggcugcgggaccaacugcaugggcaagcugaagugcaaccgcugcugcgaccgcuacgaggaguacgaccuggagccgcacaaggugcacgugcacugaggacuaguuauaagacugacuagcccgaugggccucccaacgggcccuccuccccuccuugcaccgagauuaauaaaaaaaaaaaaaaaaaaaaaaaaaaaaaaaaaaaaaaaaaaaaaaaaaaaaaaaaaaaaaaaaugcaucccccccccccccccccccccccccccccccaaaggcucuuuucagagccaccagaauu

SEQ ID NO: 14878 - RNA, 4279 nt, Artificial Sequence
  MERS-CoV/Riyadh_14_2013__AHI48572.1 spike protein mRNA gc (1-1353)
aggagaaagcuuaccaugauccacagcguguuccugcucauguuccugcugacccccaccgaguccuacgucgacgugggcccggacagcgugaaguccgccugcaucgaggucgacauccagcagacguucuucgacaagaccuggccccgccccaucgacgugagcaaggccgacgggaucaucuacccccagggccggaccuacuccaacaucaccaucacguaccagggccucuucccguaccagggcgaccacggggacauguacguguacagcgcgggccacgccaccggcaccacgccccagaagcuguucgucgccaacuacucccaggacgugaagcaguucgccaacggguucgugguccgcaucggcgccgcggccaacagcaccgggaccgugaucaucucccccagcaccuccgccaccauccggaagaucuaccccgccuucaugcugggcagcuccguggggaacuucagcgacggcaagaugggccgcuucuucaaccacacgcucguccugcugccggacgggugcggcacccuccugcgggcguucuacugcauccuggagccccgcuccgggaaccacugccccgccggcaacagcuacaccuccuucgccaccuaccacacgcccgccaccgacugcagcgacggcaacuacaaccggaacgccucccucaacagcuucaaggaguacuucaaccugcgcaacugcaccuucauguacaccuacaacaucacggaggacgagauccuggagugguucgggaucacccagaccgcgcagggcgugcaccucuucagcucccgguacguggaccuguacgggggcaacauguuccaguucgccacccugccggucuacgacacgaucaaguacuacagcaucaucccccacuccauccgcagcauccaguccgaccggaaggccugggccgccuucuacguguacaagcuccagccccugaccuuccugcucgacuucagcguggacggguacauccgccgggcgaucgacugcggcuucaacgaccugucccagcugcacugcagcuacgaguccuucgacgucgagagcggcguguacuccgugagcuccuucgaggccaagcccagcggguccgucguggagcaggccgagggcguggagugcgacuucagcccgcuccuguccgggaccccgccccaggucuacaacuucaagcgccugguguucaccaacugcaacuacaaccucacgaagcugcugagccucuucuccgucaacgacuucacgugcagccagaucagccccgccgccaucgcguccaacugcuacagcucccugauccuggacuacuucagcuacccccucuccaugaaguccgaccugagcgugagcuccgccgggcccaucagccaguucaacuacaagcaguccuucagcaacccgaccugccugauccucgccaccgugccccacaaccugaccaccaucaccaagccccugaaguacuccuacaucaacaagugcagccggcuccuguccgacgaccgcaccgaggucccccagcuggugaacgccaaccaguacagccccugcguguccaucguccccagcacggugugggaggacggggacuacuaccggaagcagcucagcccgcuggagggcggcggguggcugguggccuccggcagcaccgucgcgaugaccgagcagcuccagaugggguucggcaucaccgugcaguacgggaccgacacgaacuccgugugccccaagcuggaguucgccaacgacaccaagaucgccagccagcugggcaacugcgucgaguacucccuguacggcgugagcgggcgcggcguguuccagaacugcaccgccgucggggugcggcagcagcgcuucguguacgacgcguaccagaaccucgucggcuacuacuccgacgacggcaacuacuacugccugcgggccugcgugagcgugcccgucuccgugaucuacgacaaggagaccaagacgcacgccacccuguucgggagcguggccugcgagcacaucuccagcaccaugucccaguacagccgcuccacccgcagcaugcucaagcggcgcgacuccacguacggcccgcugcagacccccgucgggugcgugcugggccucgugaacagcucccuguucgucgaggacugcaagcugccccucgggcagagccugugcgcccugcccgacaccccgagcacccucacgccccgguccgugcgcagcgugcccggcgagaugcggcuggcguccaucgccuucaaccaccccauccaggucgaccagcugaacagcuccuacuucaagcucagcaucccgaccaacuucuccuucggcgugacccaggaguacauccagaccacgauccagaaggugaccgucgacugcaagcaguacgugugcaacggguuccagaagugcgagcagcugcugcgcgaguacggccaguucugcagcaagaucaaccaggcccuccacggggccaaccugcggcaggacgacuccgugcgcaaccuguucgccagcgucaaguccagccaguccagccccaucauccccggcuucgggggcgacuucaaccucacccugcuggagcccguguccaucagcaccggcucccggagcgcgcgcuccgccaucgaggaccuccuguucgacaaggugacgaucgccgacccgggguacaugcagggcuacgacgacugcaugcagcaggggcccgccagcgcccgggaccugaucugcgcgcaguacgucgccggcuacaaggugcucccgccccugauggacgugaacauggaggccgccuacaccagcucccugcucgggagcaucgcgggcgucggcuggaccgccgggcuguccagcuucgccgccauccccuucgcccaguccaucuucuaccgccugaacggcguggggaucacccagcagguccucagcgagaaccagaagcugaucgcgaacaaguucaaccaggcccugggcgccaugcagacgggguucaccaccaccaacgaggccuuccggaaggugcaggacgccgugaacaacaacgcgcaggcccucuccaagcuggccagcgagcuguccaacacguucggcgccaucagcgccuccaucggcgacaucauccagcgccucgacgugcuggagcaggacgcgcagaucgaccggcugaucaacgggcgccucaccacccugaacgccuucgucgcccagcagcuggugcggagcgaguccgccgcgcucagcgcccagcuggccaaggacaaggugaacgagugcgucaaggcccaguccaagcgcagcggcuucugcgggcagggcacccacaucguguccuucgucgugaacgcccccaacggccuguacuucaugcacgugggguacuaccccagcaaccacaucgaggucguguccgcguacggccucugcgacgccgccaaccccacgaacugcaucgccccggugaacggguacuucaucaagaccaacaacacccggaucgucgacgaguggagcuacaccggcagcuccuucuacgcccccgagcccaucacgagccugaacaccaaguacguggcgccccaggugaccuaccagaacaucuccaccaaccugccgccgccccuccuggggaacagcaccggcaucgacuuccaggacgagcuggacgaguucuucaagaacgucuccacgagcauccccaacuucggcucccucacccagaucaacaccacccugcuggaccucacguacgagaugcugagccugcagcaggucgugaaggcccucaacgaguccuacaucgaccugaaggagcuggggaacuacaccuacuacaacaaguggcccugguacaucuggcucggcuucaucgccgggcugguggcccuggcccucugcguguucuucauccugugcugcaccggcugcgggaccaacugcaugggcaagcugaagugcaaccgcugcugcgaccgcuacgaggaguacgaccucgagccccacaaggugcacguccacugaggacuaguuauaagacugacuagcccgaugggccucccaacgggcccuccuccccuccuugcaccgagauuaauaaaaaaaaaaaaaaaaaaaaaaaaaaaaaaaaaaaaaaaaaaaaaaaaaaaaaaaaaaaaaaaaugcaucccccccccccccccccccccccccccccccaaaggcucuuuucagagccaccagaauu

SEQ ID NO: 14879 - RNA, 4279 nt, Artificial Sequence
  MERS-CoV/Riyadh_14_2013__AHI48572.1 spike protein mRNA gc (1-1353)(V1060P_L1061P)
aggagaaagcuuaccaugauccacagcguguuccugcucauguuccugcugacccccaccgaguccuacgucgacgugggcccggacagcgugaaguccgccugcaucgaggucgacauccagcagacguucuucgacaagaccuggccccgccccaucgacgugagcaaggccgacgggaucaucuacccccagggccggaccuacuccaacaucaccaucacguaccagggccucuucccguaccagggcgaccacggggacauguacguguacagcgcgggccacgccaccggcaccacgccccagaagcuguucgucgccaacuacucccaggacgugaagcaguucgccaacggguucgugguccgcaucggcgccgcggccaacagcaccgggaccgugaucaucucccccagcaccuccgccaccauccggaagaucuaccccgccuucaugcugggcagcuccguggggaacuucagcgacggcaagaugggccgcuucuucaaccacacgcucguccugcugccggacgggugcggcacccuccugcgggcguucuacugcauccuggagccccgcuccgggaaccacugccccgccggcaacagcuacaccuccuucgccaccuaccacacgcccgccaccgacugcagcgacggcaacuacaaccggaacgccucccucaacagcuucaaggaguacuucaaccugcgcaacugcaccuucauguacaccuacaacaucacggaggacgagauccuggagugguucgggaucacccagaccgcgcagggcgugcaccucuucagcucccgguacguggaccuguacgggggcaacauguuccaguucgccacccugccggucuacgacacgaucaaguacuacagcaucaucccccacuccauccgcagcauccaguccgaccggaaggccugggccgccuucuacguguacaagcuccagccccugaccuuccugcucgacuucagcguggacggguacauccgccgggcgaucgacugcggcuucaacgaccugucccagcugcacugcagcuacgaguccuucgacgucgagagcggcguguacuccgugagcuccuucgaggccaagcccagcggguccgucguggagcaggccgagggcguggagugcgacuucagcccgcuccuguccgggaccccgccccaggucuacaacuucaagcgccugguguucaccaacugcaacuacaaccucacgaagcugcugagccucuucuccgucaacgacuucacgugcagccagaucagccccgccgccaucgcguccaacugcuacagcucccugauccuggacuacuucagcuacccccucuccaugaaguccgaccugagcgugagcuccgccgggcccaucagccaguucaacuacaagcaguccuucagcaacccgaccugccugauccucgccaccgugccccacaaccugaccaccaucaccaagccccugaaguacuccuacaucaacaagugcagccggcuccuguccgacgaccgcaccgaggucccccagcuggugaacgccaaccaguacagccccugcguguccaucguccccagcacggugugggaggacggggacuacuaccggaagcagcucagcccgcuggagggcggcggguggcugguggccuccggcagcaccgucgcgaugaccgagcagcuccagaugggguucggcaucaccgugcaguacgggaccgacacgaacuccgugugccccaagcuggaguucgccaacgacaccaagaucgccagccagcugggcaacugcgucgaguacucccuguacggcgugagcgggcgcggcguguuccagaacugcaccgccgucggggugcggcagcagcgcuucguguacgacgcguaccagaaccucgucggcuacuacuccgacgacggcaacuacuacugccugcgggccugcgugagcgugcccgucuccgugaucuacgacaaggagaccaagacgcacgccacccuguucgggagcguggccugcgagcacaucuccagcaccaugucccaguacagccgcuccacccgcagcaugcucaagcggcgcgacuccacguacggcccgcugcagacccccgucgggugcgugcugggccucgugaacagcucccuguucgucgaggacugcaagcugccccucgggcagagccugugcgcccugcccgacaccccgagcacccucacgccccgguccgugcgcagcgugcccggcgagaugcggcuggcguccaucgccuucaaccaccccauccaggucgaccagcugaacagcuccuacuucaagcucagcaucccgaccaacuucuccuucggcgugacccaggaguacauccagaccacgauccagaaggugaccgucgacugcaagcaguacgugugcaacggguuccagaagugcgagcagcugcugcgcgaguacggccaguucugcagcaagaucaaccaggcccuccacggggccaaccugcggcaggacgacuccgugcgcaaccuguucgccagcgucaaguccagccaguccagccccaucauccccggcuucgggggcgacuucaaccucacccugcuggagcccguguccaucagcaccggcucccggagcgcgcgcuccgccaucgaggaccuccuguucgacaaggugacgaucgccgacccgggguacaugcagggcuacgacgacugcaugcagcaggggcccgccagcgcccgggaccugaucugcgcgcaguacgucgccggcuacaaggugcucccgccccugauggacgugaacauggaggccgccuacaccagcucccugcucgggagcaucgcgggcgucggcuggaccgccgggcuguccagcuucgccgccauccccuucgcccaguccaucuucuaccgccugaacggcguggggaucacccagcagguccucagcgagaaccagaagcugaucgcgaacaaguucaaccaggcccugggcgccaugcagacgggguucaccaccaccaacgaggccuuccggaaggugcaggacgccgugaacaacaacgcgcaggcccucuccaagcuggccagcgagcuguccaacacguucggcgccaucagcgccuccaucggcgacaucauccagcgccucgacccgcccgagcaggacgcgcagaucgaccggcugaucaacgggcgccugaccacccucaacgccuucguggcccagcagcugguccggagcgaguccgccgcgcugagcgcccagcucgccaaggacaaggugaacgagugcgugaaggcccaguccaagcgcagcggcuucugcgggcagggcacccacaucgucuccuucguggucaacgcccccaacggccuguacuucaugcacgugggguacuaccccagcaaccacaucgagguggucuccgcguacggccugugcgacgccgccaaccccacgaacugcaucgcccccgugaacggguacuucaucaagaccaacaacacccggaucguggacgaguggagcuacaccggcagcuccuucuacgcccccgagccgaucacgagccucaacaccaaguacgucgcgccccaggugaccuaccagaacaucuccaccaaccugcccccgccccugcucgggaacagcaccggcaucgacuuccaggacgagcuggacgaguucuucaagaacguguccacgagcauccccaacuucggcucccugacccagaucaacaccacccuccuggaccugacguacgagaugcucagccugcagcaggucgugaaggcccugaacgaguccuacaucgaccucaaggagcuggggaacuacaccuacuacaacaaguggcccugguacaucuggcugggcuucaucgccgggcucguggcccuggcccugugcgucuucuucauccucugcugcaccggcugcgggaccaacugcaugggcaagcugaagugcaaccgcugcugcgaccgcuacgaggaguacgaccuggagccgcacaaggugcacgugcacugaggacuaguuauaagacugacuagcccgaugggccucccaacgggcccuccuccccuccuugcaccgagauuaauaaaaaaaaaaaaaaaaaaaaaaaaaaaaaaaaaaaaaaaaaaaaaaaaaaaaaaaaaaaaaaaaugcaucccccccccccccccccccccccccccccccaaaggcucuuuucagagccaccagaauu

SEQ ID NO: 14880 - RNA, 4279 nt, Artificial Sequence
  MERS-CoV/Riyadh_14_2013__AHI48572.1 spike protein mRNA gc (1-1353)(R1020Q)
aggagaaagcuuaccaugauccacagcguguuccugcucauguuccugcugacccccaccgaguccuacgucgacgugggcccggacagcgugaaguccgccugcaucgaggucgacauccagcagacguucuucgacaagaccuggccccgccccaucgacgugagcaaggccgacgggaucaucuacccccagggccggaccuacuccaacaucaccaucacguaccagggccucuucccguaccagggcgaccacggggacauguacguguacagcgcgggccacgccaccggcaccacgccccagaagcuguucgucgccaacuacucccaggacgugaagcaguucgccaacggguucgugguccgcaucggcgccgcggccaacagcaccgggaccgugaucaucucccccagcaccuccgccaccauccggaagaucuaccccgccuucaugcugggcagcuccguggggaacuucagcgacggcaagaugggccgcuucuucaaccacacgcucguccugcugccggacgggugcggcacccuccugcgggcguucuacugcauccuggagccccgcuccgggaaccacugccccgccggcaacagcuacaccuccuucgccaccuaccacacgcccgccaccgacugcagcgacggcaacuacaaccggaacgccucccucaacagcuucaaggaguacuucaaccugcgcaacugcaccuucauguacaccuacaacaucacggaggacgagauccuggagugguucgggaucacccagaccgcgcagggcgugcaccucuucagcucccgguacguggaccuguacgggggcaacauguuccaguucgccacccugccggucuacgacacgaucaaguacuacagcaucaucccccacuccauccgcagcauccaguccgaccggaaggccugggccgccuucuacguguacaagcuccagccccugaccuuccugcucgacuucagcguggacggguacauccgccgggcgaucgacugcggcuucaacgaccugucccagcugcacugcagcuacgaguccuucgacgucgagagcggcguguacuccgugagcuccuucgaggccaagcccagcggguccgucguggagcaggccgagggcguggagugcgacuucagcccgcuccuguccgggaccccgccccaggucuacaacuucaagcgccugguguucaccaacugcaacuacaaccucacgaagcugcugagccucuucuccgucaacgacuucacgugcagccagaucagccccgccgccaucgcguccaacugcuacagcucccugauccuggacuacuucagcuacccccucuccaugaaguccgaccugagcgugagcuccgccgggcccaucagccaguucaacuacaagcaguccuucagcaacccgaccugccugauccucgccaccgugccccacaaccugaccaccaucaccaagccccugaaguacuccuacaucaacaagugcagccggcuccuguccgacgaccgcaccgaggucccccagcuggugaacgccaaccaguacagccccugcguguccaucguccccagcacggugugggaggacggggacuacuaccggaagcagcucagcccgcuggagggcggcggguggcugguggccuccggcagcaccgucgcgaugaccgagcagcuccagaugggguucggcaucaccgugcaguacgggaccgacacgaacuccgugugccccaagcuggaguucgccaacgacaccaagaucgccagccagcugggcaacugcgucgaguacucccuguacggcgugagcgggcgcggcguguuccagaacugcaccgccgucggggugcggcagcagcgcuucguguacgacgcguaccagaaccucgucggcuacuacuccgacgacggcaacuacuacugccugcgggccugcgugagcgugcccgucuccgugaucuacgacaaggagaccaagacgcacgccacccuguucgggagcguggccugcgagcacaucuccagcaccaugucccaguacagccgcuccacccgcagcaugcucaagcggcgcgacuccacguacggcccgcugcagacccccgucgggugcgugcugggccucgugaacagcucccuguucgucgaggacugcaagcugccccucgggcagagccugugcgcccugcccgacaccccgagcacccucacgccccgguccgugcgcagcgugcccggcgagaugcggcuggcguccaucgccuucaaccaccccauccaggucgaccagcugaacagcuccuacuucaagcucagcaucccgaccaacuucuccuucggcgugacccaggaguacauccagaccacgauccagaaggugaccgucgacugcaagcaguacgugugcaacggguuccagaagugcgagcagcugcugcgcgaguacggccaguucugcagcaagaucaaccaggcccuccacggggccaaccugcggcaggacgacuccgugcgcaaccuguucgccagcgucaaguccagccaguccagccccaucauccccggcuucgggggcgacuucaaccucacccugcuggagcccguguccaucagcaccggcucccggagcgcgcgcuccgccaucgaggaccuccuguucgacaaggugacgaucgccgacccgggguacaugcagggcuacgacgacugcaugcagcaggggcccgccagcgcccgggaccugaucugcgcgcaguacgucgccggcuacaaggugcucccgccccugauggacgugaacauggaggccgccuacaccagcucccugcucgggagcaucgcgggcgucggcuggaccgccgggcuguccagcuucgccgccauccccuucgcccaguccaucuucuaccgccugaacggcguggggaucacccagcagguccucagcgagaaccagaagcugaucgcgaacaaguucaaccaggcccugggcgccaugcagacgggguucaccaccaccaacgaggccuuccagaaggugcaggacgccgugaacaacaacgcgcaggcccucuccaagcuggccagcgagcuguccaacacguucggcgccaucagcgccuccaucggcgacaucauccagcggcucgacgugcuggagcaggacgcgcagaucgaccgccugaucaacgggcggcucaccacccugaacgccuucgucgcccagcagcuggugcgcagcgaguccgccgcgcucagcgcccagcuggccaaggacaaggugaacgagugcgucaaggcccaguccaagcggagcggcuucugcgggcagggcacccacaucguguccuucgucgugaacgcccccaacggccuguacuucaugcacgugggguacuaccccagcaaccacaucgaggucguguccgcguacggccucugcgacgccgccaaccccacgaacugcaucgccccggugaacggguacuucaucaagaccaacaacacccgcaucgucgacgaguggagcuacaccggcagcuccuucuacgcccccgagcccaucacgagccugaacaccaaguacguggcgccccaggugaccuaccagaacaucuccaccaaccugccgccgccccuccuggggaacagcaccggcaucgacuuccaggacgagcuggacgaguucuucaagaacgucuccacgagcauccccaacuucggcucccucacccagaucaacaccacccugcuggaccucacguacgagaugcugagccugcagcaggucgugaaggcccucaacgaguccuacaucgaccugaaggagcuggggaacuacaccuacuacaacaaguggcccugguacaucuggcucggcuucaucgccgggcugguggcccuggcccucugcguguucuucauccugugcugcaccggcugcgggaccaacugcaugggcaagcugaagugcaaccggugcugcgaccgcuacgaggaguacgaccucgagccccacaaggugcacguccacugaggacuaguuauaagacugacuagcccgaugggccucccaacgggcccuccuccccuccuugcaccgagauuaauaaaaaaaaaaaaaaaaaaaaaaaaaaaaaaaaaaaaaaaaaaaaaaaaaaaaaaaaaaaaaaaaugcaucccccccccccccccccccccccccccccccaaaggcucuuuucagagccaccagaauu

SEQ ID NO: 14881 - RNA, 1984 nt, Artificial Sequence
  MERS-CoV/Riyadh_14_2013__AHI48572.1 spike protein mRNA gc (1-17_726-1296)(R1020Q)
aggagaaagcuuaccaugauccacagcguguuccugcucauguuccugcugacccccaccgaguccgacugcaagcucccccugggccagagccugugcgcccuccccgacacgcccuccacccugacgccccgcagcguccgguccgugccgggggagaugcgccuggccagcaucgcguucaaccaccccauccagguggaccagcucaacuccagcuacuucaagcuguccauccccaccaacuucagcuucggcgucacccaggaguacauccagaccaccauccagaaggugaccguggacugcaagcaguacgucugcaacggguuccagaagugcgagcagcugcuccgggaguacggccaguucugcuccaagaucaaccaggcccugcacggggccaaccugcgccaggacgacagcgugcggaaccucuucgccuccgucaagagcucccagagcucccccaucaucccgggcuucggcggggacuucaaccugacgcugcucgagcccgugagcaucuccaccggcagccgcagcgcccgguccgcgaucgaggaccugcuguucgacaaggugaccaucgccgaccccggguacaugcagggcuacgacgacugcaugcagcaggggcccgccagcgcccgcgaccucaucugcgcgcaguacguggccggcuacaagguccugccgccccugauggacgugaacauggaggccgccuacaccuccagccuccugggcuccaucgccggggugggcuggacggcggggcugagcuccuucgccgccauccccuucgcccagagcaucuucuaccggcucaacggcgucggcaucacccagcagguccuguccgagaaccagaagcugaucgccaacaaguucaaccaggcgcucggggccaugcagaccggcuucaccacgaccaacgaggccuuccagaaggugcaggacgccgugaacaacaacgcccaggcgcugagcaagcuggccuccgagcucagcaacaccuucggggccaucuccgccagcaucggcgacaucauccagcgccuggacgugcuggagcaggacgcccagaucgaccggcucaucaacgggcgccugaccacgcugaacgcguucguggcccagcagcucguccgguccgagagcgccgcccuguccgcgcagcuggccaaggacaaggugaacgagugcgugaaggcccagagcaagcgcuccggcuucugcggccaggggacccacaucgucagcuucguggucaacgcccccaacggccucuacuucaugcacgugggguacuacccgagcaaccacaucgagguggucuccgccuacggccugugcgacgcggccaaccccaccaacugcaucgcccccgugaacggguacuucaucaagaccaacaacacgcggaucguggacgaguggagcuacaccggcuccagcuucuacgcccccgagccgaucaccucccugaacaccaaguacgucgcgccccaggugacguaccagaacaucagcaccaaccucccgccgccccugcugggcaacuccaccgggaucgacuuccaggacgagcuggacgaguucuucaagaacgugagcaccuccauccccaacuucggcagccucacgcagaucaacaccacccugcuggaccucaccuacgagaugcugucccugcagcaggucgugaaggcccucaacgagagcuacaucgaccugaaggagcuggggaacuacacguacuacaacaaguggcccugaggacuaguuauaagacugacuagcccgaugggccucccaacgggcccuccuccccuccuugcaccgagauuaauaaaaaaaaaaaaaaaaaaaaaaaaaaaaaaaaaaaaaaaaaaaaaaaaaaaaaaaaaaaaaaaaugcaucccccccccccccccccccccccccccccccaaaggcucuuuucagagccaccagaauu

SEQ ID NO: 14882 - RNA, 2065 nt, Artificial Sequence
  MERS-CoV/Riyadh_14_2013__AHI48572.1 spike protein mRNA gc (1-17_726-1296)(R1020Q)_LeucineZipper
aggagaaagcuuaccaugauccacagcguguuccugcucauguuccugcugacccccaccgaguccgacugcaagcucccccugggccagagccugugcgcccuccccgacacgcccuccacccugacgccccgcagcguccgguccgugccgggggagaugcgccuggccagcaucgcguucaaccaccccauccagguggaccagcucaacuccagcuacuucaagcuguccauccccaccaacuucagcuucggcgucacccaggaguacauccagaccaccauccagaaggugaccguggacugcaagcaguacgucugcaacggguuccagaagugcgagcagcugcuccgggaguacggccaguucugcuccaagaucaaccaggcccugcacggggccaaccugcgccaggacgacagcgugcggaaccucuucgccuccgucaagagcucccagagcucccccaucaucccgggcuucggcggggacuucaaccugacgcugcucgagcccgugagcaucuccaccggcagccgcagcgcccgguccgcgaucgaggaccugcuguucgacaaggugaccaucgccgaccccggguacaugcagggcuacgacgacugcaugcagcaggggcccgccagcgcccgcgaccucaucugcgcgcaguacguggccggcuacaagguccugccgccccugauggacgugaacauggaggccgccuacaccuccagccuccugggcuccaucgccggggugggcuggacggcggggcugagcuccuucgccgccauccccuucgcccagagcaucuucuaccggcucaacggcgucggcaucacccagcagguccuguccgagaaccagaagcugaucgccaacaaguucaaccaggcgcucggggccaugcagaccggcuucaccacgaccaacgaggccuuccagaaggugcaggacgccgugaacaacaacgcccaggcgcugagcaagcuggccuccgagcucagcaacaccuucggggccaucuccgccagcaucggcgacaucauccagcgccuggacgugcuggagcaggacgcccagaucgaccggcucaucaacgggcgccugaccacgcugaacgcguucguggcccagcagcucguccgguccgagagcgccgcccuguccgcgcagcuggccaaggacaaggugaacgagugcgugaaggcccagagcaagcgcuccggcuucugcggccaggggacccacaucgucagcuucguggucaacgcccccaacggccucuacuucaugcacgugggguacuacccgagcaaccacaucgagguggucuccgccuacggccugugcgacgcggccaaccccaccaacugcaucgcccccgugaacggguacuucaucaagaccaacaacacgcggaucguggacgaguggagcuacaccggcuccagcuucuacgcccccgagccgaucaccucccugaacaccaaguacgucgcgccccaggugacguaccagaacaucagcaccaaccucccgccgccccugcugggcaacuccaccgggaucgacuuccaggacgagcuggacgaguucuucaagaacgugagcaccuccauccccaacuucggcagccucacgcagaucaacaccacccugcuggaccucaccuacgagaugcugucccugcagcaggucgugaaggcccucaacgagagcuacaucgaccugaaggagcuggggaacuacacguacuacaacaaguggcccgacaagaucgaggagauccucuccaagaucuaccacaucgagaacgagaucgcccgcaucaagaagcugaucggcgaggccugaggacuaguuauaagacugacuagcccgaugggccucccaacgggcccuccuccccuccuugcaccgagauuaauaaaaaaaaaaaaaaaaaaaaaaaaaaaaaaaaaaaaaaaaaaaaaaaaaaaaaaaaaaaaaaaaugcaucccccccccccccccccccccccccccccccaaaggcucuuuucagagccaccagaauu

SEQ ID NO: 14883 - RNA, 4279 nt, Artificial Sequence
  MERS-CoV/England 1__YP_007188579.1 spike protein mRNA gc (1-1353)
aggagaaagcuuaccaugauccacagcguguuccugcucauguuccugcugacccccaccgaguccuacgucgacgugggcccggacagcgugaaguccgccugcaucgaggucgacauccagcagacguucuucgacaagaccuggccccgccccaucgacgugagcaaggccgacgggaucaucuacccccagggccggaccuacuccaacaucaccaucacguaccagggccucuucccguaccagggcgaccacggggacauguacguguacagcgcgggccacgccaccggcaccacgccccagaagcuguucgucgccaacuacucccaggacgugaagcaguucgccaacggguucgugguccgcaucggcgccgcggccaacagcaccgggaccgugaucaucucccccagcaccuccgccaccauccggaagaucuaccccgccuucaugcugggcagcuccguggggaacuucagcgacggcaagaugggccgcuucuucaaccacacgcucguccugcugccggacgggugcggcacccuccugcgggcguucuacugcauccuggagccccgcuccgggaaccacugccccgccggcaacagcuacaccuccuucgccaccuaccacacgcccgccaccgacugcagcgacggcaacuacaaccggaacgccucccucaacagcuucaaggaguacuucaaccugcgcaacugcaccuucauguacaccuacaacaucacggaggacgagauccuggagugguucgggaucacccagaccgcgcagggcgugcaccucuucagcucccgguacguggaccuguacgggggcaacauguuccaguucgccacccugccggucuacgacacgaucaaguacuacagcaucaucccccacuccauccgcagcauccaguccgaccggaaggccugggccgccuucuacguguacaagcuccagccccugaccuuccugcucgacuucagcguggacggguacauccgccgggcgaucgacugcggcuucaacgaccugucccagcugcacugcagcuacgaguccuucgacgucgagagcggcguguacuccgugagcuccuucgaggccaagcccagcggguccgucguggagcaggccgagggcguggagugcgacuucagcccgcuccuguccgggaccccgccccaggucuacaacuucaagcgccugguguucaccaacugcaacuacaaccucacgaagcugcugagccucuucuccgucaacgacuucacgugcagccagaucagccccgccgccaucgcguccaacugcuacagcucccugauccuggacuacuucagcuacccccucuccaugaaguccgaccugagcgugagcuccgccgggcccaucagccaguucaacuacaagcaguccuucagcaacccgaccugccugauccucgccaccgugccccacaaccugaccaccaucaccaagccccugaaguacuccuacaucaacaagugcagccgguuccucuccgacgaccgcaccgaggucccccagcuggugaacgccaaccaguacagccccugcguguccaucguccccagcacggugugggaggacggggacuacuaccggaagcagcugagcccgcucgagggcggcggguggcugguggccuccggcagcaccgucgcgaugaccgagcagcugcagaugggguucggcaucaccgugcaguacgggaccgacacgaacuccgugugccccaagcucgaguucgccaacgacaccaagaucgccagccagcugggcaacugcgucgaguacucccuguacggcgugagcgggcgcggcguguuccagaacugcaccgccgucggggugcggcagcagcgcuucguguacgacgcguaccagaaccuggucggcuacuacuccgacgacggcaacuacuacugccuccgggccugcgugagcgugcccgucuccgugaucuacgacaaggagaccaagacgcacgccacccuguucgggagcguggccugcgagcacaucuccagcaccaugucccaguacagccgcuccacccgcagcaugcugaagcggcgcgacuccacguacggcccgcuccagacccccgucgggugcgugcugggccuggugaacagcucccucuucgucgaggacugcaagcugccccuggggcagagccucugcgcccugcccgacaccccgagcacccugacgccccgguccgugcgcagcgugcccggcgagaugcggcucgcguccaucgccuucaaccaccccauccaggucgaccagcugaacagcuccuacuucaagcugagcaucccgaccaacuucuccuucggcgugacccaggaguacauccagaccacgauccagaaggugaccgucgacugcaagcaguacgugugcaacggguuccagaagugcgagcagcuccugcgcgaguacggccaguucugcagcaagaucaaccaggcccugcacggggccaaccuccggcaggacgacuccgugcgcaaccuguucgccagcgucaaguccagccaguccagccccaucauccccggcuucgggggcgacuucaaccugacccuccuggagcccguguccaucagcaccggcucccggagcgcgcgcuccgccaucgaggaccuccuguucgacaaggugacgaucgccgacccgggguacaugcagggcuacgacgacugcaugcagcaggggcccgccagcgcccgggaccugaucugcgcgcaguacgucgccggcuacaaggugcugccgccccucauggacgugaacauggaggccgccuacaccagcucccugcuggggagcaucgcgggcgucggcuggaccgccgggcucuccagcuucgccgccauccccuucgcccaguccaucuucuaccgccugaacggcguggggaucacccagcagguccugagcgagaaccagaagcucaucgcgaacaaguucaaccaggcccugggcgccaugcagacgggguucaccaccaccaacgaggccuuccacaaggugcaggacgccgugaacaacaacgcgcaggcccuguccaagcucgccagcgagcuguccaacacguucggcgccaucagcgccuccaucggcgacaucauccagcggcuggacgugcucgagcaggacgcgcagaucgaccgccugaucaacgggcggcugaccacccucaacgccuucgucgcccagcagcuggugcgcagcgaguccgccgcgcugagcgcccagcucgccaaggacaaggugaacgagugcgucaaggcccaguccaagcggagcggcuucugcgggcagggcacccacaucguguccuucgucgugaacgcccccaacggccuguacuucaugcacgugggguacuaccccagcaaccacaucgaggucguguccgcguacggccugugcgacgccgccaaccccacgaacugcaucgccccggugaacggguacuucaucaagaccaacaacacccgcaucgucgacgaguggagcuacaccggcagcuccuucuacgcccccgagcccaucacgagccucaacaccaaguacguggcgccccaggugaccuaccagaacaucuccaccaaccugccgccgccccugcucgggaacagcaccggcaucgacuuccaggacgagcuggacgaguucuucaagaacgucuccacgagcauccccaacuucggcucccugacccagaucaacaccacccuccuggaccugacguacgagaugcucagccugcagcaggucgugaaggcccugaacgaguccuacaucgaccucaaggagcuggggaacuacaccuacuacaacaaguggcccugguacaucuggcugggcuucaucgccgggcucguggcccuggcccugugcguguucuucauccucugcugcaccggcugcgggaccaacugcaugggcaagcugaagugcaaccggugcugcgaccgcuacgaggaguacgaccuggagccccacaaggugcacguccacugaggacuaguuauaagacugacuagcccgaugggccucccaacgggcccuccuccccuccuugcaccgagauuaauaaaaaaaaaaaaaaaaaaaaaaaaaaaaaaaaaaaaaaaaaaaaaaaaaaaaaaaaaaaaaaaaugcaucccccccccccccccccccccccccccccccaaaggcucuuuucagagccaccagaauu

SEQ ID NO: 14884 - RNA, 4279 nt, Artificial Sequence
  MERS-CoV/England 1__YP_007188579.1 spike protein mRNA gc (1-1353)(V1060P_L1061P)
aggagaaagcuuaccaugauccacagcguguuccugcucauguuccugcugacccccaccgaguccuacgucgacgugggcccggacagcgugaaguccgccugcaucgaggucgacauccagcagacguucuucgacaagaccuggccccgccccaucgacgugagcaaggccgacgggaucaucuacccccagggccggaccuacuccaacaucaccaucacguaccagggccucuucccguaccagggcgaccacggggacauguacguguacagcgcgggccacgccaccggcaccacgccccagaagcuguucgucgccaacuacucccaggacgugaagcaguucgccaacggguucgugguccgcaucggcgccgcggccaacagcaccgggaccgugaucaucucccccagcaccuccgccaccauccggaagaucuaccccgccuucaugcugggcagcuccguggggaacuucagcgacggcaagaugggccgcuucuucaaccacacgcucguccugcugccggacgggugcggcacccuccugcgggcguucuacugcauccuggagccccgcuccgggaaccacugccccgccggcaacagcuacaccuccuucgccaccuaccacacgcccgccaccgacugcagcgacggcaacuacaaccggaacgccucccucaacagcuucaaggaguacuucaaccugcgcaacugcaccuucauguacaccuacaacaucacggaggacgagauccuggagugguucgggaucacccagaccgcgcagggcgugcaccucuucagcucccgguacguggaccuguacgggggcaacauguuccaguucgccacccugccggucuacgacacgaucaaguacuacagcaucaucccccacuccauccgcagcauccaguccgaccggaaggccugggccgccuucuacguguacaagcuccagccccugaccuuccugcucgacuucagcguggacggguacauccgccgggcgaucgacugcggcuucaacgaccugucccagcugcacugcagcuacgaguccuucgacgucgagagcggcguguacuccgugagcuccuucgaggccaagcccagcggguccgucguggagcaggccgagggcguggagugcgacuucagcccgcuccuguccgggaccccgccccaggucuacaacuucaagcgccugguguucaccaacugcaacuacaaccucacgaagcugcugagccucuucuccgucaacgacuucacgugcagccagaucagccccgccgccaucgcguccaacugcuacagcucccugauccuggacuacuucagcuacccccucuccaugaaguccgaccugagcgugagcuccgccgggcccaucagccaguucaacuacaagcaguccuucagcaacccgaccugccugauccucgccaccgugccccacaaccugaccaccaucaccaagccccugaaguacuccuacaucaacaagugcagccgguuccucuccgacgaccgcaccgaggucccccagcuggugaacgccaaccaguacagccccugcguguccaucguccccagcacggugugggaggacggggacuacuaccggaagcagcugagcccgcucgagggcggcggguggcugguggccuccggcagcaccgucgcgaugaccgagcagcugcagaugggguucggcaucaccgugcaguacgggaccgacacgaacuccgugugccccaagcucgaguucgccaacgacaccaagaucgccagccagcugggcaacugcgucgaguacucccuguacggcgugagcgggcgcggcguguuccagaacugcaccgccgucggggugcggcagcagcgcuucguguacgacgcguaccagaaccuggucggcuacuacuccgacgacggcaacuacuacugccuccgggccugcgugagcgugcccgucuccgugaucuacgacaaggagaccaagacgcacgccacccuguucgggagcguggccugcgagcacaucuccagcaccaugucccaguacagccgcuccacccgcagcaugcugaagcggcgcgacuccacguacggcccgcuccagacccccgucgggugcgugcugggccuggugaacagcucccucuucgucgaggacugcaagcugccccuggggcagagccucugcgcccugcccgacaccccgagcacccugacgccccgguccgugcgcagcgugcccggcgagaugcggcucgcguccaucgccuucaaccaccccauccaggucgaccagcugaacagcuccuacuucaagcugagcaucccgaccaacuucuccuucggcgugacccaggaguacauccagaccacgauccagaaggugaccgucgacugcaagcaguacgugugcaacggguuccagaagugcgagcagcuccugcgcgaguacggccaguucugcagcaagaucaaccaggcccugcacggggccaaccuccggcaggacgacuccgugcgcaaccuguucgccagcgucaaguccagccaguccagccccaucauccccggcuucgggggcgacuucaaccugacccuccuggagcccguguccaucagcaccggcucccggagcgcgcgcuccgccaucgaggaccuccuguucgacaaggugacgaucgccgacccgggguacaugcagggcuacgacgacugcaugcagcaggggcccgccagcgcccgggaccugaucugcgcgcaguacgucgccggcuacaaggugcugccgccccucauggacgugaacauggaggccgccuacaccagcucccugcuggggagcaucgcgggcgucggcuggaccgccgggcucuccagcuucgccgccauccccuucgcccaguccaucuucuaccgccugaacggcguggggaucacccagcagguccugagcgagaaccagaagcucaucgcgaacaaguucaaccaggcccugggcgccaugcagacgggguucaccaccaccaacgaggccuuccacaaggugcaggacgccgugaacaacaacgcgcaggcccuguccaagcucgccagcgagcuguccaacacguucggcgccaucagcgccuccaucggcgacaucauccagcggcuggacccgcccgagcaggacgcgcagaucgaccgccucaucaacgggcggcugaccacccugaacgccuucguggcccagcagcucguccgcagcgaguccgccgcgcugagcgcccagcuggccaaggacaaggugaacgagugcgugaaggcccaguccaagcggagcggcuucugcgggcagggcacccacaucgucuccuucguggucaacgcccccaacggccucuacuucaugcacgugggguacuaccccagcaaccacaucgagguggucuccgcguacggccugugcgacgccgccaaccccacgaacugcaucgcccccgugaacggguacuucaucaagaccaacaacacccgcaucguggacgaguggagcuacaccggcagcuccuucuacgcccccgagccgaucacgagccugaacaccaaguacgucgcgccccaggugaccuaccagaacaucuccaccaaccugcccccgccccuccuggggaacagcaccggcaucgacuuccaggacgagcucgacgaguucuucaagaacguguccacgagcauccccaacuucggcucccugacccagaucaacaccacccugcucgaccugacguacgagaugcugagccuccagcaggucgugaaggcccugaacgaguccuacaucgaccugaaggagcucgggaacuacaccuacuacaacaaguggcccugguacaucuggcugggcuucaucgccgggcugguggcccucgcccugugcgucuucuucauccugugcugcaccggcugcgggaccaacugcaugggcaagcucaagugcaaccggugcugcgaccgcuacgaggaguacgaccuggagccgcacaaggugcacgugcacugaggacuaguuauaagacugacuagcccgaugggccucccaacgggcccuccuccccuccuugcaccgagauuaauaaaaaaaaaaaaaaaaaaaaaaaaaaaaaaaaaaaaaaaaaaaaaaaaaaaaaaaaaaaaaaaaugcaucccccccccccccccccccccccccccccccaaaggcucuuuucagagccaccagaauu

SEQ ID NO: 14885 - RNA, 4093 nt, Artificial Sequence
  MERS-CoV/England 1__YP_007188579.1 spike protein mRNA gc (variant)
aggagaaagcuuaccaugauccacagcguguuccugcucauguuccugcugacccccaccgaguccuacgucgacgugggcccggacagcgugaaguccgccugcaucgaggucgacauccagcagacguucuucgacaagaccuggccccgccccaucgacgugagcaaggccgacgggaucaucuacccccagggccggaccuacuccaacaucaccaucacguaccagggccucuucccguaccagggcgaccacggggacauguacguguacagcgcgggccacgccaccggcaccacgccccagaagcuguucgucgccaacuacucccaggacgugaagcaguucgccaacggguucgugguccgcaucggcgccgcggccaacagcaccgggaccgugaucaucucccccagcaccuccgccaccauccggaagaucuaccccgccuucaugcugggcagcuccguggggaacuucagcgacggcaagaugggccgcuucuucaaccacacgcucguccugcugccggacgggugcggcacccuccugcgggcguucuacugcauccuggagccccgcuccgggaaccacugccccgccggcaacagcuacaccuccuucgccaccuaccacacgcccgccaccgacugcagcgacggcaacuacaaccggaacgccucccucaacagcuucaaggaguacuucaaccugcgcaacugcaccuucauguacaccuacaacaucacggaggacgagauccuggagugguucgggaucacccagaccgcgcagggcgugcaccucuucagcucccgguacguggaccuguacgggggcaacauguuccaguucgccacccugccggucuacgacacgaucaaguacuacagcaucaucccccacuccauccgcagcauccaguccgaccggaaggccugggccgccuucuacguguacaagcuccagccccugaccuuccugcucgacuucagcguggacggguacauccgccgggcgaucgacugcggcuucaacgaccugucccagcugcacugcagcuacgaguccuucgacgucgagagcggcguguacuccgugagcuccuucgaggccaagcccagcggguccgucguggagcaggccgagggcguggagugcgacuucagcccgcuccuguccgggaccccgccccaggucuacaacuucaagcgccugguguucaccaacugcaacuacaaccucacgaagcugcugagccucuucuccgucaacgacuucacgugcagccagaucagccccgccgccaucgcguccaacugcuacagcucccugauccuggacuacuucagcuacccccucuccaugaaguccgaccugagcgugagcuccgccgggcccaucagccaguucaacuacaagcaguccuucagcaacccgaccugccugauccucgccaccgugccccacaaccugaccaccaucaccaagccccugaaguacuccuacaucaacaagugcagccgguuccucuccgacgaccgcaccgaggucccccagcuggugaacgccaaccaguacagccccugcguguccaucguccccagcacggugugggaggacggggacuacuaccggaagcagcugagcccgcucgagggcggcggguggcugguggccuccggcagcaccgucgcgaugaccgagcagcugcagaugggguucggcaucaccgugcaguacgggaccgacacgaacuccgugugccccaagcucgaguucgccaacgacaccaagaucgccagccagcugggcaacugcgucgaguacucccuguacggcgugagcgggcgcggcguguuccagaacugcaccgccgucggggugcggcagcagcgcuucguguacgacgcguaccagaaccuggucggcuacuacuccgacgacggcaacuacuacugccuccgggccugcgugagcgugcccgucuccgugaucuacgacaaggagaccaagacgcacgccacccuguucgggagcguggccugcgagcacaucuccagcaccaugucccaguacagccgcuccacccgcagcaugcugaagcggcgcgacuccacguacggcccgcuccagacccccgucgggugcgugcugggccuggugaacagcucccucuucgucgaggacugcaagcugccccuggggcagagccucugcgcccugcccgacaccccgagcacccugacgccccgguccgugcgcagcgugcccggcgagaugcggcucgcguccaucgccuucaaccaccccauccaggucgaccagcugaacagcuccuacuucaagcugagcaucccgaccaacuucuccuucggcgugacccaggaguacauccagaccacgauccagaaggugaccgucgacugcaagcaguacgugugcaacggguuccagaagugcgagcagcuccugcgcgaguacggccaguucugcagcaagaucaaccaggcccugcacggggccaaccuccggcaggacgacuccgugcgcaaccuguucgccagcgucaaguccagccaguccagccccaucauccccggcuucgggggcgacuucaaccugacccuccuggagcccguguccaucagcaccggcucccggagcgcgcgcuccgccaucgaggaccuccuguucgacaaggugacgaucgccgacccgggguacaugcagggcuacgacgacugcaugcagcaggggcccgccagcgcccgggaccugaucugcgcgcaguacgucgccggcuacaaggugcugccgccccucauggacgugaacauggaggccgccuacaccagcucccugcuggggagcaucgcgggcgucggcuggaccgccgggcucuccagcuucgccgccauccccuucgcccaguccaucuucuaccgccugaacggcguggggaucacccagcagguccugagcgagaaccagaagcucaucgcgaacaaguucaaccaggcccugggcgccaugcagacgggguucaccaccaccaacgaggccuuccacaaggugcaggacgccgugaacaacaacgcgcaggcccuguccaagcucgccagcgagcuguccaacacguucggcgccaucagcgccuccaucggcgacaucauccagcggcuggacccgcccgagcaggacgcgcagaucgaccgccucaucaacgggcggcugaccacccugaacgccuucguggcccagcagcucguccgcagcgaguccgccgcgcugagcgcccagcuggccaaggacaaggugaacgagugcgugaaggcccaguccaagcggagcggcuucugcgggcagggcacccacaucgucuccuucguggucaacgcccccaacggccucuacuucaugcacgugggguacuaccccagcaaccacaucgagguggucuccgcguacggccugugcgacgccgccaaccccacgaacugcaucgcccccgugaacggguacuucaucaagaccaacaacacccgcaucguggacgaguggagcuacaccggcagcuccuucuacgcccccgagccgaucacgagccugaacaccaaguacgucgcgccccaggugaccuaccagaacaucuccaccaaccugcccccgccccuccuggggaacagcaccggcaucgacuuccaggacgagcucgacgaguucuucaagaacguguccacgagcauccccaacuucggcucccugacccagaucaacaccacccugcucgaccugacguacgagaugcugagccuccagcaggucgugaaggcccugaacgaguccuacaucgaccugaaggagcucgggaacuacaccuacugaggacuaguuauaagacugacuagcccgaugggccucccaacgggcccuccuccccuccuugcaccgagauuaauaaaaaaaaaaaaaaaaaaaaaaaaaaaaaaaaaaaaaaaaaaaaaaaaaaaaaaaaaaaaaaaaugcaucccccccccccccccccccccccccccccccaaaggcucuuuucagagccaccagaauu

SEQ ID NO: 14886 - RNA, 4093 nt, Artificial Sequence
  MERS-CoV/England 1__YP_007188579.1 spike protein mRNA gc (variant)
aggagaaagcuuaccaugauccacagcguguuccugcucauguuccugcugacccccaccgaguccuacgucgacgugggcccggacagcgugaaguccgccugcaucgaggucgacauccagcagacguucuucgacaagaccuggccccgccccaucgacgugagcaaggccgacgggaucaucuacccccagggccggaccuacuccaacaucaccaucacguaccagggccucuucccguaccagggcgaccacggggacauguacguguacagcgccggccacgccaccggcaccacgccccagaagcuguucgucgccaacuacucccaggacgugaagcaguucgccaacggguucgugguccgcaucggcgccgcggccaacagcaccgggaccgugaucaucucccccagcaccuccgccaccauccggaagaucuaccccgccuucaugcugggcagcuccguggggaacuucagcgacggcaagaugggccgcuucuucaaccacacgcucguccugcugccggacgggugcggcacccuccugcgggcguucuacugcauccuggagccccgcuccgggaaccacugccccgccggcaacagcuacaccuccuucgccaccuaccacacgcccgccaccgacugcagcgacggcaacuacaaccggaacgccucccucaacagcuucaaggaguacuucaaccugcgcaacugcaccuucauguacaccuacaacaucacggaggacgagauccuggagugguucgggaucacccagaccgcgcagggcgugcaccucuucagcucccgguacguggaccuguacgggggcaacauguuccaguucgccacccugccggucuacgacacgaucaaguacuacagcaucaucccccacuccauccgcagcauccaguccgaccggaaggccugggccgccuucuacguguacaagcuccagccccugaccuuccugcucgacuucagcguggacggguacauccgccgggcgaucgacugcggcuucaacgaccugucccagcugcacugcagcuacgaguccuucgacgucgagagcggcguguacuccgugagcuccuucgaggccaagcccagcggguccgucguggagcaggccgagggcguggagugcgacuucagcccgcuccuguccgggaccccgccccaggucuacaacuucaagcgccugguguucaccaacugcaacuacaaccucacgaagcugcugagccucuucuccgucaacgacuucacgugcagccagaucagccccgccgccaucgcguccaacugcuacagcucccugauccuggacuacuucagcuacccccucuccaugaaguccgaccugagcgugagcuccgccgggcccaucagccaguucaacuacaagcaguccuucagcaacccgaccugccugauccucgccaccgugccccacaaccugaccaccaucaccaagccccugaaguacuccuacaucaacaagugcagccgguuccucuccgacgaccgcaccgaggucccccagcuggugaacgccaaccaguacagccccugcguguccaucguccccagcacggugugggaggacggggacuacuaccggaagcagcugagcccgcucgagggcggcggguggcugguggccuccggcagcaccgucgcgaugaccgagcagcugcagaugggguucggcaucaccgugcaguacgggaccgacacgaacuccgugugccccaagcucgaguucgccaacgacaccaagaucgccagccagcugggcaacugcgucgaguacucccuguacggcgugagcgggcgcggcguguuccagaacugcaccgccgucggggugcggcagcagcgcuucguguacgacgcguaccagaaccuggucggcuacuacuccgacgacggcaacuacuacugccuccgggccugcgugagcgugcccgucuccgugaucuacgacaaggagaccaagacgcacgccacccuguucgggagcguggccugcgagcacaucuccagcaccaugucccaguacagccgcuccacccgcagcaugcugaagcggcgcgacuccacguacggcccgcuccagacccccgucgggugcgugcugggccuggugaacagcucccucuucgucgaggacugcaagcugccccuggggcagagccucugcgcccugcccgacaccccgagcacccugacgcccgcguccgugggcagcgugcccggcgagaugcggcucgccuccaucgccuucaaccaccccauccaggucgaccagcugaacagcuccuacuucaagcugagcaucccgaccaacuucuccuucggggugacccaggaguacauccagaccacgauccagaaggugaccgucgacugcaagcaguacgugugcaacggcuuccagaagugcgagcagcuccugcgcgaguacgggcaguucugcagcaagaucaaccaggcccugcacggcgccaaccuccggcaggacgacuccgugcgcaaccuguucgcgagcgucaaguccagccaguccagccccaucauccccggguucggcggcgacuucaaccugacccuccuggagcccguguccaucagcaccgggucccggagcgcccgcuccgccaucgaggaccuccuguucgacaaggugacgaucgccgacccgggcuacaugcagggguacgacgacugcaugcagcagggccccgccagcgcgcgggaccugaucugcgcccaguacgucgccggguacaaggugcugccgccccucauggacgugaacauggaggccgcguacaccagcucccugcugggcagcaucgccggcgucggguggaccgccggccucuccagcuucgccgccauccccuucgcgcaguccaucuucuaccgccugaacggggugggcaucacccagcagguccugagcgagaaccagaagcucaucgccaacaaguucaaccaggcccugggggccaugcagacgggcuucaccaccaccaacgaggccuuccacaaggugcaggacgcggugaacaacaacgcccaggcccuguccaagcucgccagcgagcuguccaacacguucggcgccaucagcgcguccaucggggacaucauccagcggcuggacccgcccgagcaggacgcccagaucgaccgccucaucaacggccggcugaccacccugaacgccuucguggcccagcagcucguccgcagcgaguccgcggcccugagcgcccagcuggccaaggacaaggugaacgagugcgugaaggcccaguccaagcggagcggguucugcggccagggcacccacaucgucuccuucguggucaacgcgcccaacgggcucuacuucaugcacgugggcuacuaccccagcaaccacaucgagguggucuccgccuacgggcugugcgacgccgccaaccccacgaacugcaucgcccccgugaacggcuacuucaucaagaccaacaacacccgcaucguggacgaguggagcuacaccgggagcuccuucuacgcgcccgagccgaucacgagccugaacaccaaguacgucgcgccccaggugaccuaccagaacaucuccaccaaccugcccccgccccuccugggcaacagcaccggcaucgacuuccaggacgagcucgacgaguucuucaagaacguguccacgagcauccccaacuucgggucccugacccagaucaacaccacccugcucgaccugacguacgagaugcugagccuccagcaggucgugaaggcccugaacgaguccuacaucgaccugaaggagcucggcaacuacaccuacugaggacuaguuauaagacugacuagcccgaugggccucccaacgggcccuccuccccuccuugcaccgagauuaauaaaaaaaaaaaaaaaaaaaaaaaaaaaaaaaaaaaaaaaaaaaaaaaaaaaaaaaaaaaaaaaaugcaucccccccccccccccccccccccccccccccaaaggcucuuuucagagccaccagaauu

SEQ ID NO: 14887 - RNA, 4093 nt, Artificial Sequence
  MERS-CoV/England 1__YP_007188579.1 spike protein mRNA gc (variant)
aggagaaagcuuaccaugauccacagcguguuccugcucauguuccugcugacccccaccgaguccuacgucgacgugggcccggacagcgugaaguccgccugcaucgaggucgacauccagcagacguucuucgacaagaccuggccccgccccaucgacgugagcaaggccgacgggaucaucuacccccagggccggaccuacuccaacaucaccaucacguaccagggccucuucccguaccagggcgaccacggggacauguacguguacagcgccggccacgccaccggcaccacgccccagaagcuguucgucgccaacuacucccaggacgugaagcaguucgccaacggguucgugguccgcaucggcgccgcggccaacagcaccgggaccgugaucaucucccccagcaccuccgccaccauccggaagaucuaccccgccuucaugcugggcagcuccguggggaacuucagcgacggcaagaugggccgcuucuucaaccacacgcucguccugcugccggacgggugcggcacccuccugcgggcguucuacugcauccuggagccccgcuccgggaaccacugccccgccggcaacagcuacaccuccuucgccaccuaccacacgcccgccaccgacugcagcgacggcaacuacaaccggaacgccucccucaacagcuucaaggaguacuucaaccugcgcaacugcaccuucauguacaccuacaacaucacggaggacgagauccuggagugguucgggaucacccagaccgcgcagggcgugcaccucuucagcucccgguacguggaccuguacgggggcaacauguuccaguucgccacccugccggucuacgacacgaucaaguacuacagcaucaucccccacuccauccgcagcauccaguccgaccggaaggccugggccgccuucuacguguacaagcuccagccccugaccuuccugcucgacuucagcguggacggguacauccgccgggcgaucgacugcggcuucaacgaccugucccagcugcacugcagcuacgaguccuucgacgucgagagcggcguguacuccgugagcuccuucgaggccaagcccagcggguccgucguggagcaggccgagggcguggagugcgacuucagcccgcuccuguccgggaccccgccccaggucuacaacuucaagcgccugguguucaccaacugcaacuacaaccucacgaagcugcugagccucuucuccgucaacgacuucacgugcagccagaucagccccgccgccaucgcguccaacugcuacagcucccugauccuggacuacuucagcuacccccucuccaugaaguccgaccugagcgugagcuccgccgggcccaucagccaguucaacuacaagcaguccuucagcaacccgaccugccugauccucgccaccgugccccacaaccugaccaccaucaccaagccccugaaguacuccuacaucaacaagugcagccgguuccucuccgacgaccgcaccgaggucccccagcuggugaacgccaaccaguacagccccugcguguccaucguccccagcacggugugggaggacggggacuacuaccggaagcagcugagcccgcucgagggcggcggguggcugguggccuccggcagcaccgucgcgaugaccgagcagcugcagaugggguucggcaucaccgugcaguacgggaccgacacgaacuccgugugccccaagcucgaguucgccaacgacaccaagaucgccagccagcugggcaacugcgucgaguacucccuguacggcgugagcgggcgcggcguguuccagaacugcaccgccgucggggugcggcagcagcgcuucguguacgacgcguaccagaaccuggucggcuacuacuccgacgacggcaacuacuacugccuccgggccugcgugagcgugcccgucuccgugaucuacgacaaggagaccaagacgcacgccacccuguucgggagcguggccugcgagcacaucuccagcaccaugucccaguacagccgcuccacccgcagcaugcugaagcggcgcgacuccacguacggcccgcuccagacccccgucgggugcgugcugggccuggugaacagcucccucuucgucgaggacugcaagcugccccuggggcagagccucugcgcccugcccgacaccccgagcacccugacgcccgcguccgugggcagcgugcccggcgagaugcggcucgccuccaucgccuucaaccaccccauccaggucgaccagcugaacagcuccuacuucaagcugagcaucccgaccaacuucuccuucggggugacccaggaguacauccagaccacgauccagaaggugaccgucgacugcaagcaguacgugugcaacggcuuccagaagugcgagcagcuccugcgcgaguacgggcaguucugcagcaagaucaaccaggcccugcacggcgccaaccuccggcaggacgacuccgugcgcaaccuguucgcgagcgucaaguccagccaguccagccccaucauccccggguucggcggcgacuucaaccugacccuccuggagcccguguccaucagcaccggguccggcagcgccggguccgccaucgaggaccuccuguucgacaaggugacgaucgccgacccgggcuacaugcagggguacgacgacugcaugcagcagggccccgccagcgcgcgggaccugaucugcgcccaguacgucgccggcuacaaggugcugccgccccucauggacgugaacauggaggccgcguacaccagcucccugcuggggagcaucgccggcgucggguggaccgccggccucuccagcuucgccgccauccccuucgcgcaguccaucuucuaccgccugaacggggugggcaucacccagcagguccugagcgagaaccagaagcucaucgccaacaaguucaaccaggcccugggcgccaugcagacgggguucaccaccaccaacgaggccuuccacaaggugcaggacgcggugaacaacaacgcccaggcccuguccaagcucgccagcgagcuguccaacacguucggcgccaucagcgcguccaucggggacaucauccagcggcuggacccgcccgagcaggacgcccagaucgaccgccucaucaacggccggcugaccacccugaacgccuucguggcccagcagcucguccgcagcgaguccgcggcccugagcgcccagcuggccaaggacaaggugaacgagugcgugaaggcccaguccaagcggagcggcuucugcgggcagggcacccacaucgucuccuucguggucaacgcgcccaacgggcucuacuucaugcacgugggcuacuaccccagcaaccacaucgagguggucuccgccuacgggcugugcgacgccgccaaccccacgaacugcaucgcccccgugaacggcuacuucaucaagaccaacaacacccgcaucguggacgaguggagcuacaccggcagcuccuucuacgcgcccgagccgaucacgagccugaacaccaaguacgucgcgccccaggugaccuaccagaacaucuccaccaaccugcccccgccccuccuggggaacagcaccggcaucgacuuccaggacgagcucgacgaguucuucaagaacguguccacgagcauccccaacuucgggucccugacccagaucaacaccacccugcucgaccugacguacgagaugcugagccuccagcaggucgugaaggcccugaacgaguccuacaucgaccugaaggagcucggcaacuacaccuacugaggacuaguuauaagacugacuagcccgaugggccucccaacgggcccuccuccccuccuugcaccgagauuaauaaaaaaaaaaaaaaaaaaaaaaaaaaaaaaaaaaaaaaaaaaaaaaaaaaaaaaaaaaaaaaaaugcaucccccccccccccccccccccccccccccccaaaggcucuuuucagagccaccagaauu

SEQ ID NO: 14888 - RNA, 4174 nt, Artificial Sequence
  MERS-CoV/England 1__YP_007188579.1 spike protein mRNA gc (variant)
aggagaaagcuuaccaugauccacagcguguuccugcucauguuccugcugacccccaccgaguccuacgucgacgugggcccggacagcgugaaguccgccugcaucgaggucgacauccagcagacguucuucgacaagaccuggccccgccccaucgacgugagcaaggccgacgggaucaucuacccccagggccggaccuacuccaacaucaccaucacguaccagggccucuucccguaccagggcgaccacggggacauguacguguacagcgccggccacgccaccggcaccacgccccagaagcuguucgucgccaacuacucccaggacgugaagcaguucgccaacggguucgugguccgcaucggcgccgcggccaacagcaccgggaccgugaucaucucccccagcaccuccgccaccauccggaagaucuaccccgccuucaugcugggcagcuccguggggaacuucagcgacggcaagaugggccgcuucuucaaccacacgcucguccugcugccggacgggugcggcacccuccugcgggcguucuacugcauccuggagccccgcuccgggaaccacugccccgccggcaacagcuacaccuccuucgccaccuaccacacgcccgccaccgacugcagcgacggcaacuacaaccggaacgccucccucaacagcuucaaggaguacuucaaccugcgcaacugcaccuucauguacaccuacaacaucacggaggacgagauccuggagugguucgggaucacccagaccgcgcagggcgugcaccucuucagcucccgguacguggaccuguacgggggcaacauguuccaguucgccacccugccggucuacgacacgaucaaguacuacagcaucaucccccacuccauccgcagcauccaguccgaccggaaggccugggccgccuucuacguguacaagcuccagccccugaccuuccugcucgacuucagcguggacggguacauccgccgggcgaucgacugcggcuucaacgaccugucccagcugcacugcagcuacgaguccuucgacgucgagagcggcguguacuccgugagcuccuucgaggccaagcccagcggguccgucguggagcaggccgagggcguggagugcgacuucagcccgcuccuguccgggaccccgccccaggucuacaacuucaagcgccugguguucaccaacugcaacuacaaccucacgaagcugcugagccucuucuccgucaacgacuucacgugcagccagaucagccccgccgccaucgcguccaacugcuacagcucccugauccuggacuacuucagcuacccccucuccaugaaguccgaccugagcgugagcuccgccgggcccaucagccaguucaacuacaagcaguccuucagcaacccgaccugccugauccucgccaccgugccccacaaccugaccaccaucaccaagccccugaaguacuccuacaucaacaagugcagccgguuccucuccgacgaccgcaccgaggucccccagcuggugaacgccaaccaguacagccccugcguguccaucguccccagcacggugugggaggacggggacuacuaccggaagcagcugagcccgcucgagggcggcggguggcugguggccuccggcagcaccgucgcgaugaccgagcagcugcagaugggguucggcaucaccgugcaguacgggaccgacacgaacuccgugugccccaagcucgaguucgccaacgacaccaagaucgccagccagcugggcaacugcgucgaguacucccuguacggcgugagcgggcgcggcguguuccagaacugcaccgccgucggggugcggcagcagcgcuucguguacgacgcguaccagaaccuggucggcuacuacuccgacgacggcaacuacuacugccuccgggccugcgugagcgugcccgucuccgugaucuacgacaaggagaccaagacgcacgccacccuguucgggagcguggccugcgagcacaucuccagcaccaugucccaguacagccgcuccacccgcagcaugcugaagcggcgcgacuccacguacggcccgcuccagacccccgucgggugcgugcugggccuggugaacagcucccucuucgucgaggacugcaagcugccccuggggcagagccucugcgcccugcccgacaccccgagcacccugacgcccgcguccgugggcagcgugcccggcgagaugcggcucgccuccaucgccuucaaccaccccauccaggucgaccagcugaacagcuccuacuucaagcugagcaucccgaccaacuucuccuucggggugacccaggaguacauccagaccacgauccagaaggugaccgucgacugcaagcaguacgugugcaacggcuuccagaagugcgagcagcuccugcgcgaguacgggcaguucugcagcaagaucaaccaggcccugcacggcgccaaccuccggcaggacgacuccgugcgcaaccuguucgcgagcgucaaguccagccaguccagccccaucauccccggguucggcggcgacuucaaccugacccuccuggagcccguguccaucagcaccgggucccggagcgcccgcuccgccaucgaggaccuccuguucgacaaggugacgaucgccgacccgggcuacaugcagggguacgacgacugcaugcagcagggccccgccagcgcgcgggaccugaucugcgcccaguacgucgccggguacaaggugcugccgccccucauggacgugaacauggaggccgcguacaccagcucccugcugggcagcaucgccggcgucggguggaccgccggccucuccagcuucgccgccauccccuucgcgcaguccaucuucuaccgccugaacggggugggcaucacccagcagguccugagcgagaaccagaagcucaucgccaacaaguucaaccaggcccugggggccaugcagacgggcuucaccaccaccaacgaggccuuccacaaggugcaggacgcggugaacaacaacgcccaggcccuguccaagcucgccagcgagcuguccaacacguucggcgccaucagcgcguccaucggggacaucauccagcggcuggacccgcccgagcaggacgcccagaucgaccgccucaucaacggccggcugaccacccugaacgccuucguggcccagcagcucguccgcagcgaguccgcggcccugagcgcccagcuggccaaggacaaggugaacgagugcgugaaggcccaguccaagcggagcggguucugcggccagggcacccacaucgucuccuucguggucaacgcgcccaacgggcucuacuucaugcacgugggcuacuaccccagcaaccacaucgagguggucuccgccuacgggcugugcgacgccgccaaccccacgaacugcaucgcccccgugaacggcuacuucaucaagaccaacaacacccgcaucguggacgaguggagcuacaccgggagcuccuucuacgcgcccgagccgaucacgagccugaacaccaaguacgucgcgccccaggugaccuaccagaacaucuccaccaaccugcccccgccccuccugggcaacagcaccggcaucgacuuccaggacgagcucgacgaguucuucaagaacguguccacgagcauccccaacuucgggucccugacccagaucaacaccacccugcucgaccugacguacgagaugcugagccuccagcaggucgugaaggcccugaacgaguccuacaucgaccugaaggagcucggcaacuacaccuacgggggcuacauccccgaggccccgcgggacgggcaggccuacgugcgcaaggacggcgaguggguccugcugagcaccuucugaggacuaguuauaagacugacuagcccgaugggccucccaacgggcccuccuccccuccuugcaccgagauuaauaaaaaaaaaaaaaaaaaaaaaaaaaaaaaaaaaaaaaaaaaaaaaaaaaaaaaaaaaaaaaaaaugcaucccccccccccccccccccccccccccccccaaaggcucuuuucagagccaccagaauu

SEQ ID NO: 14889 - RNA, 4174 nt, Artificial Sequence
  MERS-CoV/England 1__YP_007188579.1 spike protein mRNA gc (variant)
aggagaaagcuuaccaugauccacagcguguuccugcucauguuccugcugacccccaccgaguccuacgucgacgugggcccggacagcgugaaguccgccugcaucgaggucgacauccagcagacguucuucgacaagaccuggccccgccccaucgacgugagcaaggccgacgggaucaucuacccccagggccggaccuacuccaacaucaccaucacguaccagggccucuucccguaccagggcgaccacggggacauguacguguacagcgccggccacgccaccggcaccacgccccagaagcuguucgucgccaacuacucccaggacgugaagcaguucgccaacggguucgugguccgcaucggcgccgcggccaacagcaccgggaccgugaucaucucccccagcaccuccgccaccauccggaagaucuaccccgccuucaugcugggcagcuccguggggaacuucagcgacggcaagaugggccgcuucuucaaccacacgcucguccugcugccggacgggugcggcacccuccugcgggcguucuacugcauccuggagccccgcuccgggaaccacugccccgccggcaacagcuacaccuccuucgccaccuaccacacgcccgccaccgacugcagcgacggcaacuacaaccggaacgccucccucaacagcuucaaggaguacuucaaccugcgcaacugcaccuucauguacaccuacaacaucacggaggacgagauccuggagugguucgggaucacccagaccgcgcagggcgugcaccucuucagcucccgguacguggaccuguacgggggcaacauguuccaguucgccacccugccggucuacgacacgaucaaguacuacagcaucaucccccacuccauccgcagcauccaguccgaccggaaggccugggccgccuucuacguguacaagcuccagccccugaccuuccugcucgacuucagcguggacggguacauccgccgggcgaucgacugcggcuucaacgaccugucccagcugcacugcagcuacgaguccuucgacgucgagagcggcguguacuccgugagcuccuucgaggccaagcccagcggguccgucguggagcaggccgagggcguggagugcgacuucagcccgcuccuguccgggaccccgccccaggucuacaacuucaagcgccugguguucaccaacugcaacuacaaccucacgaagcugcugagccucuucuccgucaacgacuucacgugcagccagaucagccccgccgccaucgcguccaacugcuacagcucccugauccuggacuacuucagcuacccccucuccaugaaguccgaccugagcgugagcuccgccgggcccaucagccaguucaacuacaagcaguccuucagcaacccgaccugccugauccucgccaccgugccccacaaccugaccaccaucaccaagccccugaaguacuccuacaucaacaagugcagccgguuccucuccgacgaccgcaccgaggucccccagcuggugaacgccaaccaguacagccccugcguguccaucguccccagcacggugugggaggacggggacuacuaccggaagcagcugagcccgcucgagggcggcggguggcugguggccuccggcagcaccgucgcgaugaccgagcagcugcagaugggguucggcaucaccgugcaguacgggaccgacacgaacuccgugugccccaagcucgaguucgccaacgacaccaagaucgccagccagcugggcaacugcgucgaguacucccuguacggcgugagcgggcgcggcguguuccagaacugcaccgccgucggggugcggcagcagcgcuucguguacgacgcguaccagaaccuggucggcuacuacuccgacgacggcaacuacuacugccuccgggccugcgugagcgugcccgucuccgugaucuacgacaaggagaccaagacgcacgccacccuguucgggagcguggccugcgagcacaucuccagcaccaugucccaguacagccgcuccacccgcagcaugcugaagcggcgcgacuccacguacggcccgcuccagacccccgucgggugcgugcugggccuggugaacagcucccucuucgucgaggacugcaagcugccccuggggcagagccucugcgcccugcccgacaccccgagcacccugacgcccgcguccgugggcagcgugcccggcgagaugcggcucgccuccaucgccuucaaccaccccauccaggucgaccagcugaacagcuccuacuucaagcugagcaucccgaccaacuucuccuucggggugacccaggaguacauccagaccacgauccagaaggugaccgucgacugcaagcaguacgugugcaacggcuuccagaagugcgagcagcuccugcgcgaguacgggcaguucugcagcaagaucaaccaggcccugcacggcgccaaccuccggcaggacgacuccgugcgcaaccuguucgcgagcgucaaguccagccaguccagccccaucauccccggguucggcggcgacuucaaccugacccuccuggagcccguguccaucagcaccggguccggcagcgccggguccgccaucgaggaccuccuguucgacaaggugacgaucgccgacccgggcuacaugcagggguacgacgacugcaugcagcagggccccgccagcgcgcgggaccugaucugcgcccaguacgucgccggcuacaaggugcugccgccccucauggacgugaacauggaggccgcguacaccagcucccugcuggggagcaucgccggcgucggguggaccgccggccucuccagcuucgccgccauccccuucgcgcaguccaucuucuaccgccugaacggggugggcaucacccagcagguccugagcgagaaccagaagcucaucgccaacaaguucaaccaggcccugggcgccaugcagacgggguucaccaccaccaacgaggccuuccacaaggugcaggacgcggugaacaacaacgcccaggcccuguccaagcucgccagcgagcuguccaacacguucggcgccaucagcgcguccaucggggacaucauccagcggcuggacccgcccgagcaggacgcccagaucgaccgccucaucaacggccggcugaccacccugaacgccuucguggcccagcagcucguccgcagcgaguccgcggcccugagcgcccagcuggccaaggacaaggugaacgagugcgugaaggcccaguccaagcggagcggcuucugcgggcagggcacccacaucgucuccuucguggucaacgcgcccaacgggcucuacuucaugcacgugggcuacuaccccagcaaccacaucgagguggucuccgccuacgggcugugcgacgccgccaaccccacgaacugcaucgcccccgugaacggcuacuucaucaagaccaacaacacccgcaucguggacgaguggagcuacaccggcagcuccuucuacgcgcccgagccgaucacgagccugaacaccaaguacgucgcgccccaggugaccuaccagaacaucuccaccaaccugcccccgccccuccuggggaacagcaccggcaucgacuuccaggacgagcucgacgaguucuucaagaacguguccacgagcauccccaacuucgggucccugacccagaucaacaccacccugcucgaccugacguacgagaugcugagccuccagcaggucgugaaggcccugaacgaguccuacaucgaccugaaggagcucggcaacuacaccuacgggggcuacauccccgaggccccgcgggacggccaggccuacgugcgcaaggacggggaguggguccugcugagcaccuucugaggacuaguuauaagacugacuagcccgaugggccucccaacgggcccuccuccccuccuugcaccgagauuaauaaaaaaaaaaaaaaaaaaaaaaaaaaaaaaaaaaaaaaaaaaaaaaaaaaaaaaaaaaaaaaaaugcaucccccccccccccccccccccccccccccccaaaggcucuuuucagagccaccagaauu

SEQ ID NO: 14890 - RNA, 4279 nt, Artificial Sequence
  MERS-CoV/MERS-CoV-Jeddah-human-1__AHE78108.1 spike protein mRNA human (1-1353)
aggagaaagcuuaccaugauccacagcguguuccugcucauguuucuucugacccccacagaguccuacgucgacguuggcccugauucugugaagucagccugcauugaaguagacauacagcaaacuuucuuugauaaaacguggccaagaccgaucgacgugaguaaggcugaugggauuaucuauccccagggaaggaccuacagcaacauuacaaucacuuaucaggguuuguucccuuaccagggcgaccauggggauauguaugucuacuccgcaggacacgccaccggcacaaccccacaaaaauuauuuguggcgaauuauucucaggacguuaagcaguucgcuaacgguuuugugguccggauaggggccgcagccaauucgacuggaacagugaucauuucacccagcaccagugcuacgauccgcaaaauuuacccugcauucaugcugggcuccucuguaggcaacuuuagcgaugggaagaugggacgauucuuuaaucauacucuaguucuccugccagacgguuguggcacccuucugcgugccuucuacugcaucuuggagcccagauccgggaaccacuguccugcuggaaauucauauacaaguuuugccacuuaccauaccccagcgacagauugcagcgacggcaacuauaauaggaacgcaucucucaauuccuucaaggaauacuucaaccugcggaauuguaccuuuauguauacguacaacauaacugaggaugaaauucuggagugguucgguaucacacagaccgcccaaggggugcaccucuuuucaagccgcuaugucgacuuauacggaggcaauauguuccaguuugcuacucugccgguguacgacacaauuaaauauuacaguaucaucccccacucuauuagauccauacagagcgauaggaaggccugggcagcuuucuauguguacaaacuucagccuuugaccuuucugcuagacuucucggucgauggcuauauccggcgcgccauugacugcggguuuaacgaucucucucaacugcauuguuccuacgagucauucgacguugaaaguggaguguauagcguauccucuuuugaggcgaagccaagcgguucaguggucgaacaggccgagggcguggagugcgauuucaguccccuucuguccgggacgccuccacagguuuacaacuuuaaacgauugguguucaccaauuguaacuacaaucucacaaagcuguuaagccuguucucugucaacgacuuuacuugcucacaaaucagucccgcagcuauagccagcaauuguuauuccucucucauucuugauuacuucucguauccgcugagcaugaaguccgacuugucagugaguucugcuggaccuaucagccaguuuaacuacaaacaguccuucucaaauccaaccugccuaauccuggccacaguaccccacaaccucacuaccauuacaaagccucugaaauauagcuacaucaauaagugcucuagacuucuguccgaugacaggaccgaaguuccccaguuggugaacgcaaaucaauauaguccaugugucagcauugugcccucuacugucugggaggacggcgauuacuaccggaaacagcucuccccucuggaaggugggggcugguuaguggccucaggaaguacgguugcuaugacagagcagcugcagaugggcuuugggauaaccgugcaauauggaacugacaccaacagcguaugcccaaagcuagaguucgcgaaugauacaaaaaucgcaucgcagcucgguaacugugucgaauacucccuguauggcgugucugggcguggaguuuuucagaauugcaccgccgugggcguccgccagcaaagauucguguacgacgcuuaucagaaccuuguagguuacuauagcgaugacgggaacuacuacuguuugagggccugcgugucaguuccggucagugugauuuaugauaaggagacuaagacacaugcaacgcuguuuggcuccguggccugugaacacaucucuagcaccaugucccaguacucacggagcacucgaaguaugcucaaacgcagagacucuacauauggaccccugcagaccccugucggcugcguucuugggcugguaaauuccagcuuguucguggaggauuguaagcucccacugggacaaucguuaugcgcucugcccgacacaccuucaacucuaaccccaaggucugugcggaguguccccggugaaaugcgccucgccuccaucgcauuuaaccacccgauucagguggaucagcugaauagcucuuacuucaaacuuagcauaccuacgaacuuuuccuucggcguuacccaagaguauauccagacaacuauucagaaggugaccgucgacuguaaacaguacgugugcaauggguuccaaaagugcgaacaguugcugagagaguauggacaguuuuguucaaagaucaaccaggcgcuccauggcgcuaaucugaggcaagaugacaguguucguaacuuauucgccagcgugaaaucuucccagucaaguccaauuauccccgguuuugggggcgacuucaaucugacacuuuuggagccuguaagcauauccacuggaucucggucggcacgaagcgccaucgaagaucuccuguuugacaaggucaccauugcugaucccggcuacaugcagggguacgacgauugcaugcagcaaggaccagccucagcaagagaccuaaucugugcucaguauguggccggcuacaaagugcugccuccccucauggaugucaacauggaggcggccuauacguccagucugcuugguucuauugcugggguuggauggacagcaggcuugagcuccuucgccgcuaucccauuugcccagucaauauucuacaggcugaauggugugggcauuacccaacagguauuaucugaaaaccagaagcucaucgcaaauaaauuuaaccaggcgcugggggccaugcaaacuggauucacaaccacuaaugaggcuuuucacaaggugcaggacgccgucaacaacaaugcacaggcucuuagcaagcuggccagugaauuguccaacaccuucggcgcaauuagcgccucuaucggggauauaauccagcgccucgacgugcuggagcaagaugcucagauugaccggcuaaucaauggaagacugacaacgcucaacgcguucguugcccagcagcuggugaggucagaguccgcagcucuuagugcccaauuggccaaagauaaggucaaugaaugcgugaaagcucagagcaagcgcucgggcuuuuguggucaggggacccauauuguuucuuucguggucaacgcaccgaauggacuguauuuuaugcacguaggcuacuauccuuccaaccauaucgaggugguuagcgccuacgguuuaugcgacgcggcuaaucccacuaacuguauagccccagugaauggcuacuucauuaaaacaaacaauacccgaaucgucgacgaauggucauauacagggaguucuuuuuacgcacccgagccuaucacuucccucaacaccaaguauguggccccacagguaacguaccaaaauauuagcacaaaccugcccccuccgcuucugggaaacucaaccggcaucgauuuccaggacgagcuagaugaauuuuucaagaaugugaguacuagcauuccaaacuuugggucccucacccagauaaauacaacucuguuggaccugaccuaugagauguuaucucuccaacaggucguuaaagcucugaacgaaagcuacaucgaucuuaaggagcugggaaauuauacauacuacaacaaauggcccugguauauuugguugggcuucaucgcaggucucguggcccuggcgcuaugcguguuuuucauucuguguugcacgggguguggaaccaauugcaugggcaaacuuaagugcaaccgguguugcgaccguuacgaagaguaugaucucgagccucacaagguccacgugcauugaggacuaguuauaagacugacuagcccgaugggccucccaacgggcccuccuccccuccuugcaccgagauuaauaaaaaaaaaaaaaaaaaaaaaaaaaaaaaaaaaaaaaaaaaaaaaaaaaaaaaaaaaaaaaaaaugcaucccccccccccccccccccccccccccccccaaaggcucuuuucagagccaccagaauu

SEQ ID NO: 14891 - RNA, 4279 nt, Artificial Sequence
  MERS-CoV/MERS-CoV-Jeddah-human-1__AHE78108.1 spike protein mRNA human (1-1353)(V1060P_L1061P)
aggagaaagcuuaccaugauccacagcguguuccugcucauguuucuucugacccccacagaguccuacgucgacguuggcccugauucugugaagucagccugcauugaaguagacauacagcaaacuuucuuugauaaaacguggccaagaccgaucgacgugaguaaggcugaugggauuaucuauccccagggaaggaccuacagcaacauuacaaucacuuaucaggguuuguucccuuaccagggcgaccauggggauauguaugucuacuccgcaggacacgccaccggcacaaccccacaaaaauuauuuguggcgaauuauucucaggacguuaagcaguucgcuaacgguuuugugguccggauaggggccgcagccaauucgacuggaacagugaucauuucacccagcaccagugcuacgauccgcaaaauuuacccugcauucaugcugggcuccucuguaggcaacuuuagcgaugggaagaugggacgauucuuuaaucauacucuaguucuccugccagacgguuguggcacccuucugcgugccuucuacugcaucuuggagcccagauccgggaaccacuguccugcuggaaauucauauacaaguuuugccacuuaccauaccccagcgacagauugcagcgacggcaacuauaauaggaacgcaucucucaauuccuucaaggaauacuucaaccugcggaauuguaccuuuauguauacguacaacauaacugaggaugaaauucuggagugguucgguaucacacagaccgcccaaggggugcaccucuuuucaagccgcuaugucgacuuauacggaggcaauauguuccaguuugcuacucugccgguguacgacacaauuaaauauuacaguaucaucccccacucuauuagauccauacagagcgauaggaaggccugggcagcuuucuauguguacaaacuucagccuuugaccuuucugcuagacuucucggucgauggcuauauccggcgcgccauugacugcggguuuaacgaucucucucaacugcauuguuccuacgagucauucgacguugaaaguggaguguauagcguauccucuuuugaggcgaagccaagcgguucaguggucgaacaggccgagggcguggagugcgauuucaguccccuucuguccgggacgccuccacagguuuacaacuuuaaacgauugguguucaccaauuguaacuacaaucucacaaagcuguuaagccuguucucugucaacgacuuuacuugcucacaaaucagucccgcagcuauagccagcaauuguuauuccucucucauucuugauuacuucucguauccgcugagcaugaaguccgacuugucagugaguucugcuggaccuaucagccaguuuaacuacaaacaguccuucucaaauccaaccugccuaauccuggccacaguaccccacaaccucacuaccauuacaaagccucugaaauauagcuacaucaauaagugcucuagacuucuguccgaugacaggaccgaaguuccccaguuggugaacgcaaaucaauauaguccaugugucagcauugugcccucuacugucugggaggacggcgauuacuaccggaaacagcucuccccucuggaaggugggggcugguuaguggccucaggaaguacgguugcuaugacagagcagcugcagaugggcuuugggauaaccgugcaauauggaacugacaccaacagcguaugcccaaagcuagaguucgcgaaugauacaaaaaucgcaucgcagcucgguaacugugucgaauacucccuguauggcgugucugggcguggaguuuuucagaauugcaccgccgugggcguccgccagcaaagauucguguacgacgcuuaucagaaccuuguagguuacuauagcgaugacgggaacuacuacuguuugagggccugcgugucaguuccggucagugugauuuaugauaaggagacuaagacacaugcaacgcuguuuggcuccguggccugugaacacaucucuagcaccaugucccaguacucacggagcacucgaaguaugcucaaacgcagagacucuacauauggaccccugcagaccccugucggcugcguucuugggcugguaaauuccagcuuguucguggaggauuguaagcucccacugggacaaucguuaugcgcucugcccgacacaccuucaacucuaaccccaaggucugugcggaguguccccggugaaaugcgccucgccuccaucgcauuuaaccacccgauucagguggaucagcugaauagcucuuacuucaaacuuagcauaccuacgaacuuuuccuucggcguuacccaagaguauauccagacaacuauucagaaggugaccgucgacuguaaacaguacgugugcaauggguuccaaaagugcgaacaguugcugagagaguauggacaguuuuguucaaagaucaaccaggcgcuccauggcgcuaaucugaggcaagaugacaguguucguaacuuauucgccagcgugaaaucuucccagucaaguccaauuauccccgguuuugggggcgacuucaaucugacacuuuuggagccuguaagcauauccacuggaucucggucggcacgaagcgccaucgaagaucuccuguuugacaaggucaccauugcugaucccggcuacaugcagggguacgacgauugcaugcagcaaggaccagccucagcaagagaccuaaucugugcucaguauguggccggcuacaaagugcugccuccccucauggaugucaacauggaggcggccuauacguccagucugcuugguucuauugcugggguuggauggacagcaggcuugagcuccuucgccgcuaucccauuugcccagucaauauucuacaggcugaauggugugggcauuacccaacagguauuaucugaaaaccagaagcucaucgcaaauaaauuuaaccaggcgcugggggccaugcaaacuggauucacaaccacuaaugaggcuuuucacaaggugcaggacgccgucaacaacaaugcacaggcucuuagcaagcuggccagugaauuguccaacaccuucggcgcaauuagcgccucuaucggggauauaauccagcgccucgacccgccugagcaagaugcucagauugaccggcugaucaauggaagacuaacaacgcugaacgcguucguggcccagcagcucguuaggucagaguccgcagcucugagugcccaacuugccaaagauaaggugaaugaaugcgucaaagcucagagcaagcgcucgggcuuuuguggucaggggacccauauugugucuuucguugugaacgcacccaauggauuguauuuuaugcacgucggcuacuauccauccaaccauaucgagguagugagcgccuacggucugugcgacgcggcuaaucccacuaacuguauagccccuguuaauggcuacuucauuaaaacaaacaauacccgaaucguggacgaauggucauauacagggaguucuuuuuacgcaccagagcccaucacuuccuuaaacaccaaguaugucgccccucaggugacguaccaaaauauuagcacaaaccucccgccaccccugcuuggaaacucaaccggcaucgauuuccaggacgagcuggaugaauuuuucaagaauguaaguacuagcauuccuaacuuugggucccuaacccagauaaauacaacucuccuggacuugaccuaugagaugcugucuuuacaacagguggucaaagcucucaacgaaagcuacaucgaucugaaggagcuuggaaauuauacauacuacaacaaauggccaugguauauuuggcugggcuucaucgcagguuugguugcccucgcgcugugcguguuuuucauucuauguugcacgggguguggaaccaauugcaugggcaagcugaaaugcaaccgguguugcgaccguuacgaagaguaugaucuugagccccacaaggugcacguccauugaggacuaguuauaagacugacuagcccgaugggccucccaacgggcccuccuccccuccuugcaccgagauuaauaaaaaaaaaaaaaaaaaaaaaaaaaaaaaaaaaaaaaaaaaaaaaaaaaaaaaaaaaaaaaaaaugcaucccccccccccccccccccccccccccccccaaaggcucuuuucagagccaccagaauu

SEQ ID NO: 14892 - RNA, 4279 nt, Artificial Sequence
  MERS-CoV/Al-Hasa_4_2013__AGN70929.1 spike protein mRNA human (1-1353)
aggagaaagcuuaccaugauccacagcguguuccugcucauguuucuucugacccccacagaguccuacgucgacguuggcccugauucugugaagucagccugcauugaaguagacauacagcaaacuuucuuugauaaaacguggccaagaccgaucgacgugaguaaggcugaugggauuaucuauccccagggaaggaccuacagcaacauuacaaucacuuaucaggguuuguucccuuaccagggcgaccauggggauauguaugucuacuccgcaggacacgccaccggcacaaccccacaaaaauuauuuguggcgaauuauucucaggacguuaagcaguucgcuaacgguuuugugguccggauaggggccgcagccaauucgacuggaacagugaucauuucacccagcaccagugcuacgauccgcaaaauuuacccugcauucaugcugggcuccucuguaggcaacuuuagcgaugggaagaugggacgauucuuuaaucauacucuaguucuccugccagacgguuguggcacccuucugcgugccuucuacugcaucuuggagcccagauccgggaaccacuguccugcuggaaauucauauacaaguuuugccacuuaccauaccccagcgacagauugcagcgacggcaacuauaauaggaacgcaucucucaauuccuucaaggaauacuucaaccugcggaauuguaccuuuauguauacguacaacauaacugaggaugaaauucuggagugguucgguaucacacagaccgcccaaggggugcaccucuuuucaagccgcuaugucgacuuauacggaggcaauauguuccaguuugcuacucugccgguguacgacacaauuaaauauuacaguaucaucccccacucuauuagauccauacagagcgauaggaaggccugggcagcuuucuauguguacaaacuucagccuuugaccuuucugcuagacuucucggucgauggcuauauccggcgcgccauugacugcggguuuaacgaucucucucaacugcauuguuccuacgagucauucgacguugaaaguggaguguauagcguauccucuuuugaggcgaagccaagcgguucaguggucgaacaggccgagggcguggagugcgauuucaguccccuucuguccgggacgccuccacagguuuacaacuuuaaacgauugguguucaccaauuguaacuacaaucucacaaagcuguuaagccuguucucugucaacgacuuuacuugcucacaaaucagucccgcagcuauagccagcaauuguuauuccucucucauucuugauuacuucucguauccgcugagcaugaaguccgacuugucagugaguucugcuggaccuaucagccaguuuaacuacaaacaguccuucucaaauccaaccugccuaauccuggccacaguaccccacaaccucacuaccauuacaaagccucugaaauauagcuacaucaauaagugcucuagacuucuguccgaugacaggaccgaaguuccccaguuggugaacgcaaaucaauauaguccaugugucagcauugugcccucuacugucugggaggacggcgauuacuaccggaaacagcucuccccucuggaaggugggggcugguuaguggccucaggaaguacgguugcuaugacagagcagcugcagaugggcuuugggauaaccgugcaauauggaacugacaccaacagcguaugcccaaagcuagaguucgcgaaugauacaaaaaucgcaucgcagcucgguaacugugucgaauacucccuguauggcgugucugggcguggaguuuuucagaauugcaccgccgugggcguccgccagcaaagauucguguacgacgcuuaucagaaccuuguagguuacuauagcgaugacgggaacuacuacuguuugagggccugcgugucaguuccggucagugugauuuaugauaaggagacuaagacacaugcaacgcuguuuggcuccguggccugugaacacaucucuagcaccaugucccaguacucacggagcacucgaaguaugcucaaacgcagagacucuacauauggaccccugcagaccccugucggcugcguucuugggcugguaaauuccagcuuguucguggaggauuguaagcucccacugggacaaucguuaugcgcucugcccgacacaccuucaacucuaaccccaaggucugugcggaguguccccggugaaaugcgccucgccuccaucgcauuuaaccacccgauucagguggaucagcugaauagcucuuacuucaaacuuagcauaccuacgaacuuuuccuucggcguuacccaagaguauauccagacaacuauucagaaggugaccgucgacuguaaacaguacgugugcaauggguuccaaaagugcgaacaguugcugagagaguauggacaguuuuguucaaagaucaaccaggcgcuccauggcgcuaaucugaggcaagaugacaguguucguaacuuauucgccagcgugaaaucuucccagucaaguccaauuauccccgguuuugggggcgacuucaaucugacacuuuuggagccuguaagcauauccacuggaucucggucggcacgaagcgccaucgaagaucuccuguuugacaaggucaccauugcugaucccggcuacaugcagggguacgacgauugcaugcagcaaggaccagccucagcaagagaccuaaucugugcucaguauguggccggcuacaaagugcugccuccccucauggaugucaacauggaggcggccuauacguccagucugcuugguucuauugcugggguuggauggacagcaggcuugagcuccuucgccgcuaucccauuugcccagucaauauucuacaggcugaauggugugggcauuacccaacagguauuaucugaaaaccagaagcucaucgcaaauaaauuuaaccaggcgcugggggccaugcaaacuggauucacaaccacuaaugaggcuuuucgcaaggugcaggacgccgucaacaacaaugcacaggcucuuagcaagcuggccagugaauuguccaacaccuucggcgcaauuagcgccucuaucggggauauaauccagcggcucgacgugcuggagcaagaugcucagauugacagacuaaucaauggaaggcugacaacgcucaacgcguucguugcccagcagcuggugcgcucagaguccgcagcucuuagugcccaauuggccaaagauaaggucaaugaaugcgugaaagcucagagcaagcgaucgggcuuuuguggucaggggacccacauuguuucuuucguggucaacgcaccgaauggacuguauuuuaugcauguaggcuacuauccuuccaaccacaucgaggugguuagcgccuacgguuuaugcgacgcggcuaaucccacuaacuguauagccccagugaauggcuacuucauuaaaacaaacaauacccggaucgucgacgaauggucauauacagggaguucuuuuuacgcacccgagccuaucacuucccucaacaccaaguauguggccccacauguaacguaccagaauauuagcacaaaccugcccccuccgcuucugggaaacucaaccggcaucgauuuccaagacgagcuagaugaauuuuucaagaaugugaguacuagcauuccaaacuuugggucccucacccagauaaauacaacucuguuggaccugaccuaugagauguuaucucuccagcaagucguuaaagcucugaacgaaagcuacaucgaucuuaaggagcugggaaauuauacauacuacaacaaauggcccugguauauuugguugggcuucaucgcaggucucguggcccuggcgcuaugcguguuuuucauucuguguugcacgggguguggaaccaauugcaugggcaaacuuaagugcaaccguuguugcgacagauacgaagaguaugaucucgagccucacaagguccacgugcauugaggacuaguuauaagacugacuagcccgaugggccucccaacgggcccuccuccccuccuugcaccgagauuaauaaaaaaaaaaaaaaaaaaaaaaaaaaaaaaaaaaaaaaaaaaaaaaaaaaaaaaaaaaaaaaaaugcaucccccccccccccccccccccccccccccccaaaggcucuuuucagagccaccagaauu

SEQ ID NO: 14893 - RNA, 4279 nt, Artificial Sequence
  MERS-CoV/Al-Hasa_4_2013__AGN70929.1 spike protein mRNA human (1-1353)(V1060P_L1061P)
aggagaaagcuuaccaugauccacagcguguuccugcucauguuucuucugacccccacagaguccuacgucgacguuggcccugauucugugaagucagccugcauugaaguagacauacagcaaacuuucuuugauaaaacguggccaagaccgaucgacgugaguaaggcugaugggauuaucuauccccagggaaggaccuacagcaacauuacaaucacuuaucaggguuuguucccuuaccagggcgaccauggggauauguaugucuacuccgcaggacacgccaccggcacaaccccacaaaaauuauuuguggcgaauuauucucaggacguuaagcaguucgcuaacgguuuugugguccggauaggggccgcagccaauucgacuggaacagugaucauuucacccagcaccagugcuacgauccgcaaaauuuacccugcauucaugcugggcuccucuguaggcaacuuuagcgaugggaagaugggacgauucuuuaaucauacucuaguucuccugccagacgguuguggcacccuucugcgugccuucuacugcaucuuggagcccagauccgggaaccacuguccugcuggaaauucauauacaaguuuugccacuuaccauaccccagcgacagauugcagcgacggcaacuauaauaggaacgcaucucucaauuccuucaaggaauacuucaaccugcggaauuguaccuuuauguauacguacaacauaacugaggaugaaauucuggagugguucgguaucacacagaccgcccaaggggugcaccucuuuucaagccgcuaugucgacuuauacggaggcaauauguuccaguuugcuacucugccgguguacgacacaauuaaauauuacaguaucaucccccacucuauuagauccauacagagcgauaggaaggccugggcagcuuucuauguguacaaacuucagccuuugaccuuucugcuagacuucucggucgauggcuauauccggcgcgccauugacugcggguuuaacgaucucucucaacugcauuguuccuacgagucauucgacguugaaaguggaguguauagcguauccucuuuugaggcgaagccaagcgguucaguggucgaacaggccgagggcguggagugcgauuucaguccccuucuguccgggacgccuccacagguuuacaacuuuaaacgauugguguucaccaauuguaacuacaaucucacaaagcuguuaagccuguucucugucaacgacuuuacuugcucacaaaucagucccgcagcuauagccagcaauuguuauuccucucucauucuugauuacuucucguauccgcugagcaugaaguccgacuugucagugaguucugcuggaccuaucagccaguuuaacuacaaacaguccuucucaaauccaaccugccuaauccuggccacaguaccccacaaccucacuaccauuacaaagccucugaaauauagcuacaucaauaagugcucuagacuucuguccgaugacaggaccgaaguuccccaguuggugaacgcaaaucaauauaguccaugugucagcauugugcccucuacugucugggaggacggcgauuacuaccggaaacagcucuccccucuggaaggugggggcugguuaguggccucaggaaguacgguugcuaugacagagcagcugcagaugggcuuugggauaaccgugcaauauggaacugacaccaacagcguaugcccaaagcuagaguucgcgaaugauacaaaaaucgcaucgcagcucgguaacugugucgaauacucccuguauggcgugucugggcguggaguuuuucagaauugcaccgccgugggcguccgccagcaaagauucguguacgacgcuuaucagaaccuuguagguuacuauagcgaugacgggaacuacuacuguuugagggccugcgugucaguuccggucagugugauuuaugauaaggagacuaagacacaugcaacgcuguuuggcuccguggccugugaacacaucucuagcaccaugucccaguacucacggagcacucgaaguaugcucaaacgcagagacucuacauauggaccccugcagaccccugucggcugcguucuugggcugguaaauuccagcuuguucguggaggauuguaagcucccacugggacaaucguuaugcgcucugcccgacacaccuucaacucuaaccccaaggucugugcggaguguccccggugaaaugcgccucgccuccaucgcauuuaaccacccgauucagguggaucagcugaauagcucuuacuucaaacuuagcauaccuacgaacuuuuccuucggcguuacccaagaguauauccagacaacuauucagaaggugaccgucgacuguaaacaguacgugugcaauggguuccaaaagugcgaacaguugcugagagaguauggacaguuuuguucaaagaucaaccaggcgcuccauggcgcuaaucugaggcaagaugacaguguucguaacuuauucgccagcgugaaaucuucccagucaaguccaauuauccccgguuuugggggcgacuucaaucugacacuuuuggagccuguaagcauauccacuggaucucggucggcacgaagcgccaucgaagaucuccuguuugacaaggucaccauugcugaucccggcuacaugcagggguacgacgauugcaugcagcaaggaccagccucagcaagagaccuaaucugugcucaguauguggccggcuacaaagugcugccuccccucauggaugucaacauggaggcggccuauacguccagucugcuugguucuauugcugggguuggauggacagcaggcuugagcuccuucgccgcuaucccauuugcccagucaauauucuacaggcugaauggugugggcauuacccaacagguauuaucugaaaaccagaagcucaucgcaaauaaauuuaaccaggcgcugggggccaugcaaacuggauucacaaccacuaaugaggcuuuucgcaaggugcaggacgccgucaacaacaaugcacaggcucuuagcaagcuggccagugaauuguccaacaccuucggcgcaauuagcgccucuaucggggauauaauccagcggcucgacccgccugagcaagaugcucagauugacagacugaucaauggaaggcuaacaacgcugaacgcguucguggcccagcagcucguucgcucagaguccgcagcucugagugcccaacuugccaaagauaaggugaaugaaugcgucaaagcucagagcaagcgaucgggcuuuuguggucaggggacccacauugugucuuucguugugaacgcacccaauggauuguauuuuaugcaugucggcuacuauccauccaaccacaucgagguagugagcgccuacggucugugcgacgcggcuaaucccacuaacuguauagccccuguuaauggcuacuucauuaaaacaaacaauacccggaucguggacgaauggucauauacagggaguucuuuuuacgcaccagagcccaucacuuccuuaaacaccaaguaugucgccccucaugugacguaccagaauauuagcacaaaccucccgccaccccugcuuggaaacucaaccggcaucgauuuccaagacgagcuggaugaauuuuucaagaauguaaguacuagcauuccuaacuuugggucccuaacccagauaaauacaacucuccuggacuugaccuaugagaugcugucuuuacagcaaguggucaaagcucucaacgaaagcuacaucgaucugaaggagcuuggaaauuauacauacuacaacaaauggccaugguauauuuggcugggcuucaucgcagguuugguugcccucgcgcugugcguguuuuucauucuauguugcacgggguguggaaccaauugcaugggcaagcugaaaugcaaccguuguugcgacagauacgaagaguaugaucuugagccccacaaggugcacguccauugaggacuaguuauaagacugacuagcccgaugggccucccaacgggcccuccuccccuccuugcaccgagauuaauaaaaaaaaaaaaaaaaaaaaaaaaaaaaaaaaaaaaaaaaaaaaaaaaaaaaaaaaaaaaaaaaugcaucccccccccccccccccccccccccccccccaaaggcucuuuucagagccaccagaauu

SEQ ID NO: 14894 - RNA, 4279 nt, Artificial Sequence
  MERS-CoV/Riyadh_14_2013__AHI48572.1 spike protein mRNA human (1-1353)
aggagaaagcuuaccaugauccacagcguguuccugcucauguuucuucugacccccacagaguccuacgucgacguuggcccugauucugugaagucagccugcauugaaguagacauacagcaaacuuucuuugauaaaacguggccaagaccgaucgacgugaguaaggcugaugggauuaucuauccccagggaaggaccuacagcaacauuacaaucacuuaucaggguuuguucccuuaccagggcgaccauggggauauguaugucuacuccgcaggacacgccaccggcacaaccccacaaaaauuauuuguggcgaauuauucucaggacguuaagcaguucgcuaacgguuuugugguccggauaggggccgcagccaauucgacuggaacagugaucauuucacccagcaccagugcuacgauccgcaaaauuuacccugcauucaugcugggcuccucuguaggcaacuuuagcgaugggaagaugggacgauucuuuaaucauacucuaguucuccugccagacgguuguggcacccuucugcgugccuucuacugcaucuuggagcccagauccgggaaccacuguccugcuggaaauucauauacaaguuuugccacuuaccauaccccagcgacagauugcagcgacggcaacuauaauaggaacgcaucucucaauuccuucaaggaauacuucaaccugcggaauuguaccuuuauguauacguacaacauaacugaggaugaaauucuggagugguucgguaucacacagaccgcccaaggggugcaccucuuuucaagccgcuaugucgacuuauacggaggcaauauguuccaguuugcuacucugccgguguacgacacaauuaaauauuacaguaucaucccccacucuauuagauccauacagagcgauaggaaggccugggcagcuuucuauguguacaaacuucagccuuugaccuuucugcuagacuucucggucgauggcuauauccggcgcgccauugacugcggguuuaacgaucucucucaacugcauuguuccuacgagucauucgacguugaaaguggaguguauagcguauccucuuuugaggcgaagccaagcgguucaguggucgaacaggccgagggcguggagugcgauuucaguccccuucuguccgggacgccuccacagguuuacaacuuuaaacgauugguguucaccaauuguaacuacaaucucacaaagcuguuaagccuguucucugucaacgacuuuacuugcucacaaaucagucccgcagcuauagccagcaauuguuauuccucucucauucuugauuacuucucguauccgcugagcaugaaguccgacuugucagugaguucugcuggaccuaucagccaguuuaacuacaaacaguccuucucaaauccaaccugccuaauccuggccacaguaccccacaaccucacuaccauuacaaagccucugaaauauagcuacaucaauaagugcucuagacuucuguccgaugacaggaccgaaguuccccaguuggugaacgcaaaucaauauaguccaugugucagcauugugcccucuacugucugggaggacggcgauuacuaccggaaacagcucuccccucuggaaggugggggcugguuaguggccucaggaaguacgguugcuaugacagagcagcugcagaugggcuuugggauaaccgugcaauauggaacugacaccaacagcguaugcccaaagcuagaguucgcgaaugauacaaaaaucgcaucgcagcucgguaacugugucgaauacucccuguauggcgugucugggcguggaguuuuucagaauugcaccgccgugggcguccgccagcaaagauucguguacgacgcuuaucagaaccuuguagguuacuauagcgaugacgggaacuacuacuguuugagggccugcgugucaguuccggucagugugauuuaugauaaggagacuaagacacaugcaacgcuguuuggcuccguggccugugaacacaucucuagcaccaugucccaguacucacggagcacucgaaguaugcucaaacgcagagacucuacauauggaccccugcagaccccugucggcugcguucuugggcugguaaauuccagcuuguucguggaggauuguaagcucccacugggacaaucguuaugcgcucugcccgacacaccuucaacucuaaccccaaggucugugcggaguguccccggugaaaugcgccucgccuccaucgcauuuaaccacccgauucagguggaucagcugaauagcucuuacuucaaacuuagcauaccuacgaacuuuuccuucggcguuacccaagaguauauccagacaacuauucagaaggugaccgucgacuguaaacaguacgugugcaauggguuccaaaagugcgaacaguugcugagagaguauggacaguuuuguucaaagaucaaccaggcgcuccauggcgcuaaucugaggcaagaugacaguguucguaacuuauucgccagcgugaaaucuucccagucaaguccaauuauccccgguuuugggggcgacuucaaucugacacuuuuggagccuguaagcauauccacuggaucucggucggcacgaagcgccaucgaagaucuccuguuugacaaggucaccauugcugaucccggcuacaugcagggguacgacgauugcaugcagcaaggaccagccucagcaagagaccuaaucugugcucaguauguggccggcuacaaagugcugccuccccucauggaugucaacauggaggcggccuauacguccagucugcuugguucuauugcugggguuggauggacagcaggcuugagcuccuucgccgcuaucccauuugcccagucaauauucuacaggcugaauggugugggcauuacccaacagguauuaucugaaaaccagaagcucaucgcaaauaaauuuaaccaggcgcugggggccaugcaaacuggauucacaaccacuaaugaggcuuuucgcaaggugcaggacgccgucaacaacaaugcacaggcucuuagcaagcuggccagugaauuguccaacaccuucggcgcaauuagcgccucuaucggggauauaauccagcggcucgacgugcuggagcaagaugcucagauugacagacuaaucaauggaaggcugacaacgcucaacgcguucguugcccagcagcuggugcgcucagaguccgcagcucuuagugcccaauuggccaaagauaaggucaaugaaugcgugaaagcucagagcaagcgaucgggcuuuuguggucaggggacccacauuguuucuuucguggucaacgcaccgaauggacuguauuuuaugcauguaggcuacuauccuuccaaccacaucgaggugguuagcgccuacgguuuaugcgacgcggcuaaucccacuaacuguauagccccagugaauggcuacuucauuaaaacaaacaauacccggaucgucgacgaauggucauauacagggaguucuuuuuacgcacccgagccuaucacuucccucaacaccaaguauguggccccacagguaacguaccaaaauauuagcacaaaccugcccccuccgcuucugggaaacucaaccggcaucgauuuccaggacgagcuagaugaauuuuucaagaaugugaguacuagcauuccaaacuuugggucccucacccagauaaauacaacucuguuggaccugaccuaugagauguuaucucuccaacaggucguuaaagcucugaacgaaagcuacaucgaucuuaaggagcugggaaauuauacauacuacaacaaauggcccugguauauuugguugggcuucaucgcaggucucguggcccuggcgcuaugcguguuuuucauucuguguugcacgggguguggaaccaauugcaugggcaaacuuaagugcaaccguuguugcgacagauacgaagaguaugaucucgagccucauaagguccacgugcacugaggacuaguuauaagacugacuagcccgaugggccucccaacgggcccuccuccccuccuugcaccgagauuaauaaaaaaaaaaaaaaaaaaaaaaaaaaaaaaaaaaaaaaaaaaaaaaaaaaaaaaaaaaaaaaaaugcaucccccccccccccccccccccccccccccccaaaggcucuuuucagagccaccagaauu

SEQ ID NO: 14895 - RNA, 4279 nt, Artificial Sequence
  MERS-CoV/Riyadh_14_2013__AHI48572.1 spike protein mRNA human (1-1353)(V1060P_L1061P)
aggagaaagcuuaccaugauccacagcguguuccugcucauguuucuucugacccccacagaguccuacgucgacguuggcccugauucugugaagucagccugcauugaaguagacauacagcaaacuuucuuugauaaaacguggccaagaccgaucgacgugaguaaggcugaugggauuaucuauccccagggaaggaccuacagcaacauuacaaucacuuaucaggguuuguucccuuaccagggcgaccauggggauauguaugucuacuccgcaggacacgccaccggcacaaccccacaaaaauuauuuguggcgaauuauucucaggacguuaagcaguucgcuaacgguuuugugguccggauaggggccgcagccaauucgacuggaacagugaucauuucacccagcaccagugcuacgauccgcaaaauuuacccugcauucaugcugggcuccucuguaggcaacuuuagcgaugggaagaugggacgauucuuuaaucauacucuaguucuccugccagacgguuguggcacccuucugcgugccuucuacugcaucuuggagcccagauccgggaaccacuguccugcuggaaauucauauacaaguuuugccacuuaccauaccccagcgacagauugcagcgacggcaacuauaauaggaacgcaucucucaauuccuucaaggaauacuucaaccugcggaauuguaccuuuauguauacguacaacauaacugaggaugaaauucuggagugguucgguaucacacagaccgcccaaggggugcaccucuuuucaagccgcuaugucgacuuauacggaggcaauauguuccaguuugcuacucugccgguguacgacacaauuaaauauuacaguaucaucccccacucuauuagauccauacagagcgauaggaaggccugggcagcuuucuauguguacaaacuucagccuuugaccuuucugcuagacuucucggucgauggcuauauccggcgcgccauugacugcggguuuaacgaucucucucaacugcauuguuccuacgagucauucgacguugaaaguggaguguauagcguauccucuuuugaggcgaagccaagcgguucaguggucgaacaggccgagggcguggagugcgauuucaguccccuucuguccgggacgccuccacagguuuacaacuuuaaacgauugguguucaccaauuguaacuacaaucucacaaagcuguuaagccuguucucugucaacgacuuuacuugcucacaaaucagucccgcagcuauagccagcaauuguuauuccucucucauucuugauuacuucucguauccgcugagcaugaaguccgacuugucagugaguucugcuggaccuaucagccaguuuaacuacaaacaguccuucucaaauccaaccugccuaauccuggccacaguaccccacaaccucacuaccauuacaaagccucugaaauauagcuacaucaauaagugcucuagacuucuguccgaugacaggaccgaaguuccccaguuggugaacgcaaaucaauauaguccaugugucagcauugugcccucuacugucugggaggacggcgauuacuaccggaaacagcucuccccucuggaaggugggggcugguuaguggccucaggaaguacgguugcuaugacagagcagcugcagaugggcuuugggauaaccgugcaauauggaacugacaccaacagcguaugcccaaagcuagaguucgcgaaugauacaaaaaucgcaucgcagcucgguaacugugucgaauacucccuguauggcgugucugggcguggaguuuuucagaauugcaccgccgugggcguccgccagcaaagauucguguacgacgcuuaucagaaccuuguagguuacuauagcgaugacgggaacuacuacuguuugagggccugcgugucaguuccggucagugugauuuaugauaaggagacuaagacacaugcaacgcuguuuggcuccguggccugugaacacaucucuagcaccaugucccaguacucacggagcacucgaaguaugcucaaacgcagagacucuacauauggaccccugcagaccccugucggcugcguucuugggcugguaaauuccagcuuguucguggaggauuguaagcucccacugggacaaucguuaugcgcucugcccgacacaccuucaacucuaaccccaaggucugugcggaguguccccggugaaaugcgccucgccuccaucgcauuuaaccacccgauucagguggaucagcugaauagcucuuacuucaaacuuagcauaccuacgaacuuuuccuucggcguuacccaagaguauauccagacaacuauucagaaggugaccgucgacuguaaacaguacgugugcaauggguuccaaaagugcgaacaguugcugagagaguauggacaguuuuguucaaagaucaaccaggcgcuccauggcgcuaaucugaggcaagaugacaguguucguaacuuauucgccagcgugaaaucuucccagucaaguccaauuauccccgguuuugggggcgacuucaaucugacacuuuuggagccuguaagcauauccacuggaucucggucggcacgaagcgccaucgaagaucuccuguuugacaaggucaccauugcugaucccggcuacaugcagggguacgacgauugcaugcagcaaggaccagccucagcaagagaccuaaucugugcucaguauguggccggcuacaaagugcugccuccccucauggaugucaacauggaggcggccuauacguccagucugcuugguucuauugcugggguuggauggacagcaggcuugagcuccuucgccgcuaucccauuugcccagucaauauucuacaggcugaauggugugggcauuacccaacagguauuaucugaaaaccagaagcucaucgcaaauaaauuuaaccaggcgcugggggccaugcaaacuggauucacaaccacuaaugaggcuuuucgcaaggugcaggacgccgucaacaacaaugcacaggcucuuagcaagcuggccagugaauuguccaacaccuucggcgcaauuagcgccucuaucggggauauaauccagcggcucgacccgccugagcaagaugcucagauugacagacugaucaauggaaggcuaacaacgcugaacgcguucguggcccagcagcucguucgcucagaguccgcagcucugagugcccaacuugccaaagauaaggugaaugaaugcgucaaagcucagagcaagcgaucgggcuuuuguggucaggggacccacauugugucuuucguugugaacgcacccaauggauuguauuuuaugcaugucggcuacuauccauccaaccacaucgagguagugagcgccuacggucugugcgacgcggcuaaucccacuaacuguauagccccuguuaauggcuacuucauuaaaacaaacaauacccggaucguggacgaauggucauauacagggaguucuuuuuacgcaccagagcccaucacuuccuuaaacaccaaguaugucgccccucaggugacguaccaaaauauuagcacaaaccucccgccaccccugcuuggaaacucaaccggcaucgauuuccaggacgagcuggaugaauuuuucaagaauguaaguacuagcauuccuaacuuugggucccuaacccagauaaauacaacucuccuggacuugaccuaugagaugcugucuuuacaacagguggucaaagcucucaacgaaagcuacaucgaucugaaggagcuuggaaauuauacauacuacaacaaauggccaugguauauuuggcugggcuucaucgcagguuugguugcccucgcgcugugcguguuuuucauucuauguugcacgggguguggaaccaauugcaugggcaagcugaaaugcaaccguuguugcgacagauacgaagaguaugaucuugagccccauaaggugcacguccacugaggacuaguuauaagacugacuagcccgaugggccucccaacgggcccuccuccccuccuugcaccgagauuaauaaaaaaaaaaaaaaaaaaaaaaaaaaaaaaaaaaaaaaaaaaaaaaaaaaaaaaaaaaaaaaaaugcaucccccccccccccccccccccccccccccccaaaggcucuuuucagagccaccagaauu

SEQ ID NO: 14896 - RNA, 4279 nt, Artificial Sequence
  MERS-CoV/Riyadh_14_2013__AHI48572.1 spike protein mRNA human (1-1353)(R1020Q)
aggagaaagcuuaccaugauccacagcguguuccugcucauguuucuucugacccccacagaguccuacgucgacguuggcccugauucugugaagucagccugcauugaaguagacauacagcaaacuuucuuugauaaaacguggccaagaccgaucgacgugaguaaggcugaugggauuaucuauccccagggaaggaccuacagcaacauuacaaucacuuaucaggguuuguucccuuaccagggcgaccauggggauauguaugucuacuccgcaggacacgccaccggcacaaccccacaaaaauuauuuguggcgaauuauucucaggacguuaagcaguucgcuaacgguuuugugguccggauaggggccgcagccaauucgacuggaacagugaucauuucacccagcaccagugcuacgauccgcaaaauuuacccugcauucaugcugggcuccucuguaggcaacuuuagcgaugggaagaugggacgauucuuuaaucauacucuaguucuccugccagacgguuguggcacccuucugcgugccuucuacugcaucuuggagcccagauccgggaaccacuguccugcuggaaauucauauacaaguuuugccacuuaccauaccccagcgacagauugcagcgacggcaacuauaauaggaacgcaucucucaauuccuucaaggaauacuucaaccugcggaauuguaccuuuauguauacguacaacauaacugaggaugaaauucuggagugguucgguaucacacagaccgcccaaggggugcaccucuuuucaagccgcuaugucgacuuauacggaggcaauauguuccaguuugcuacucugccgguguacgacacaauuaaauauuacaguaucaucccccacucuauuagauccauacagagcgauaggaaggccugggcagcuuucuauguguacaaacuucagccuuugaccuuucugcuagacuucucggucgauggcuauauccggcgcgccauugacugcggguuuaacgaucucucucaacugcauuguuccuacgagucauucgacguugaaaguggaguguauagcguauccucuuuugaggcgaagccaagcgguucaguggucgaacaggccgagggcguggagugcgauuucaguccccuucuguccgggacgccuccacagguuuacaacuuuaaacgauugguguucaccaauuguaacuacaaucucacaaagcuguuaagccuguucucugucaacgacuuuacuugcucacaaaucagucccgcagcuauagccagcaauuguuauuccucucucauucuugauuacuucucguauccgcugagcaugaaguccgacuugucagugaguucugcuggaccuaucagccaguuuaacuacaaacaguccuucucaaauccaaccugccuaauccuggccacaguaccccacaaccucacuaccauuacaaagccucugaaauauagcuacaucaauaagugcucuagacuucuguccgaugacaggaccgaaguuccccaguuggugaacgcaaaucaauauaguccaugugucagcauugugcccucuacugucugggaggacggcgauuacuaccggaaacagcucuccccucuggaaggugggggcugguuaguggccucaggaaguacgguugcuaugacagagcagcugcagaugggcuuugggauaaccgugcaauauggaacugacaccaacagcguaugcccaaagcuagaguucgcgaaugauacaaaaaucgcaucgcagcucgguaacugugucgaauacucccuguauggcgugucugggcguggaguuuuucagaauugcaccgccgugggcguccgccagcaaagauucguguacgacgcuuaucagaaccuuguagguuacuauagcgaugacgggaacuacuacuguuugagggccugcgugucaguuccggucagugugauuuaugauaaggagacuaagacacaugcaacgcuguuuggcuccguggccugugaacacaucucuagcaccaugucccaguacucacggagcacucgaaguaugcucaaacgcagagacucuacauauggaccccugcagaccccugucggcugcguucuugggcugguaaauuccagcuuguucguggaggauuguaagcucccacugggacaaucguuaugcgcucugcccgacacaccuucaacucuaaccccaaggucugugcggaguguccccggugaaaugcgccucgccuccaucgcauuuaaccacccgauucagguggaucagcugaauagcucuuacuucaaacuuagcauaccuacgaacuuuuccuucggcguuacccaagaguauauccagacaacuauucagaaggugaccgucgacuguaaacaguacgugugcaauggguuccaaaagugcgaacaguugcugagagaguauggacaguuuuguucaaagaucaaccaggcgcuccauggcgcuaaucugaggcaagaugacaguguucguaacuuauucgccagcgugaaaucuucccagucaaguccaauuauccccgguuuugggggcgacuucaaucugacacuuuuggagccuguaagcauauccacuggaucucggucggcacgaagcgccaucgaagaucuccuguuugacaaggucaccauugcugaucccggcuacaugcagggguacgacgauugcaugcagcaaggaccagccucagcaagagaccuaaucugugcucaguauguggccggcuacaaagugcugccuccccucauggaugucaacauggaggcggccuauacguccagucugcuugguucuauugcugggguuggauggacagcaggcuugagcuccuucgccgcuaucccauuugcccagucaauauucuacaggcugaauggugugggcauuacccaacagguauuaucugaaaaccagaagcucaucgcaaauaaauuuaaccaggcgcugggggccaugcaaacuggauucacaaccacuaaugaggcuuuucagaaggugcaggacgccgucaacaacaaugcacaggcucuuagcaagcuggccagugaauuguccaacaccuucggcgcaauuagcgccucuaucggggauauaauccaacgccucgacgugcuggagcaggaugcucagauugaccggcuaaucaauggaagacugacaacgcucaacgcguucguugcccagcaacuggugaggucagaguccgcagcucuuagugcccaguuggccaaagauaaggucaaugaaugcgugaaagcucagagcaagcgcucgggcuuuuguggucaggggacccacauuguuucuuucguggucaacgcaccgaauggacuguauuuuaugcauguaggcuacuauccuuccaaccacaucgaggugguuagcgccuacgguuuaugcgacgcggcuaaucccacuaacuguauagccccagugaauggcuacuucauuaaaacaaacaauacccgaaucgucgacgaauggucauauacagggaguucuuuuuacgcacccgagccuaucacuucccucaacaccaaguauguggccccacaaguaacguaccagaauauuagcacaaaccugcccccuccgcuucugggaaacucaaccggcaucgauuuccaggacgagcuagaugaauuuuucaagaaugugaguacuagcauuccaaacuuugggucccucacccaaauaaauacaacucuguuggaccugaccuaugagauguuaucucuccagcaggucguuaaagcucugaacgaaagcuacaucgaucuuaaggagcugggaaauuauacauacuacaacaaauggcccugguauauuugguugggcuucaucgcaggucucguggcccuggcgcuaugcguguuuuucauucuguguugcacgggguguggaaccaauugcaugggcaaacuuaagugcaaccgguguugcgaccguuacgaagaguaugaucucgagccucauaagguccacgugcacugaggacuaguuauaagacugacuagcccgaugggccucccaacgggcccuccuccccuccuugcaccgagauuaauaaaaaaaaaaaaaaaaaaaaaaaaaaaaaaaaaaaaaaaaaaaaaaaaaaaaaaaaaaaaaaaaugcaucccccccccccccccccccccccccccccccaaaggcucuuuucagagccaccagaauu

SEQ ID NO: 14897 - RNA, 1984 nt, Artificial Sequence
  MERS-CoV/Riyadh_14_2013__AHI48572.1 spike protein mRNA human (1-17_726-1296)(R1020Q)
aggagaaagcuuaccaugauccacagcguguuccugcucauguuucuucugacccccacagaguccgacugcaaguugccuuuaggccagucucugugugcccuaccagauacuccgucaacgcucacccccagaagugucaggagcguuccuggggaaaugcggcuggcuuccauugcauucaaccauccaauacaaguggaccagcuuaauucuucguacuuuaaacugucaauccccacaaacuucagcuuuggaguaacucaggaguauauucagaccacaauccaaaaggugaccgucgauugcaaacaguacguguguaaugguuuccagaagugcgaacaguugcuccgcgaguauggccaauuuuguaguaaaauuaaccaggcccugcacggggcgaaucugcgacaggacgauuccguucguaaccucuucgcuucugugaagucaucccagucaaguccuaucauaccaggauuuggcggugacuucaauuuaacucugcuugaacccgucagcaucucuacaggguccagaucagccaggagcgcaauugaggauuugcuguuugacaaggugaccaucgccgauccuggauacaugcaaggcuaugacgauugcaugcagcagggcccagcuagugcacgggaccuaauuugugcccaauacguagcuggguauaaaguucucccgccccugauggaugugaacauggaggccgcguacacgucuucccuucugggaagcaucgccggugucggcuggacugcaggguugucgucuuucgcugccauaccuuuugcacaguccauuuucuaccgccucaauggagugggcaucacccaacaggugcugucagaaaaccagaaguuaauugcuaauaaauucaaccaggcccugggugcgaugcagacaggguuuacuaccacaaaugaggccuuccagaagguccaagacgcaguuaacaauaacgcucaggcccucaguaaacuugcuagcgaacuguccaacaccuuuggagccaucucugcaagcaucggcgacauuauacagagauuggaugugcuagagcaggacgcccaaaucgauaggcugauuaauggccggcucacgacucugaacgcuuucguagcgcagcagcuugugcgcucagagagugcagcccuguccgcucaguuggccaaggacaaggucaaugaaugcgugaaagcacaaagcaagcgaucuggguuuuguggacaggguacacauaucguuucauucguggucaacgccccaaauggccucuauuuuaugcacgugggguacuaucccaguaaccauauagagguaguuagcgcuuacggacugugcgaugccgcaaauccuaccaacuguauugcgccagugaauggcuauuucaucaaaacuaacaauacaagaaucgucgacgaaugguccuacaccgguucuucguuuuaugcucccgagccgauuacgagcuuaaacaccaaguacguggccccucaggucacauaccaaaauaucuccacuaaccugcccccaccucuacucgggaauagcaccggcauugauuuccaggacgaacuggaugaguuuuucaaaaacgugaguacaucuauacccaacuuuggaagccuuacucagaucaauaccacauugcuggaccucaccuaugagaugcugucccuucagcaaguugugaaggcacugaacgaaucauacauugauuugaaagagcucggcaauuauacuuacuauaacaaguggccaugaggacuaguuauaagacugacuagcccgaugggccucccaacgggcccuccuccccuccuugcaccgagauuaauaaaaaaaaaaaaaaaaaaaaaaaaaaaaaaaaaaaaaaaaaaaaaaaaaaaaaaaaaaaaaaaaugcaucccccccccccccccccccccccccccccccaaaggcucuuuucagagccaccagaauu

SEQ ID NO: 14898 - RNA, 2065 nt, Artificial Sequence
  MERS-CoV/Riyadh_14_2013__AHI48572.1 spike protein mRNA human (1-17_726-1296)(R1020Q)_LeucineZipper
aggagaaagcuuaccaugauccacagcguguuccugcucauguuucuucugacccccacagaguccgacugcaaguugccuuuaggccagucucugugugcccuaccagauacuccgucaacgcucacccccagaagugucaggagcguuccuggggaaaugcggcuggcuuccauugcauucaaccauccaauacaaguggaccagcuuaauucuucguacuuuaaacugucaauccccacaaacuucagcuuuggaguaacucaggaguauauucagaccacaauccaaaaggugaccgucgauugcaaacaguacguguguaaugguuuccagaagugcgaacaguugcuccgcgaguauggccaauuuuguaguaaaauuaaccaggcccugcacggggcgaaucugcgacaggacgauuccguucguaaccucuucgcuucugugaagucaucccagucaaguccuaucauaccaggauuuggcggugacuucaauuuaacucugcuugaacccgucagcaucucuacaggguccagaucagccaggagcgcaauugaggauuugcuguuugacaaggugaccaucgccgauccuggauacaugcaaggcuaugacgauugcaugcagcagggcccagcuagugcacgggaccuaauuugugcccaauacguagcuggguauaaaguucucccgccccugauggaugugaacauggaggccgcguacacgucuucccuucugggaagcaucgccggugucggcuggacugcaggguugucgucuuucgcugccauaccuuuugcacaguccauuuucuaccgccucaauggagugggcaucacccaacaggugcugucagaaaaccagaaguuaauugcuaauaaauucaaccaggcccugggugcgaugcagacaggguuuacuaccacaaaugaggccuuccagaagguccaagacgcaguuaacaauaacgcucaggcccucaguaaacuugcuagcgaacuguccaacaccuuuggagccaucucugcaagcaucggcgacauuauacagagauuggaugugcuagagcaggacgcccaaaucgauaggcugauuaauggccggcucacgacucugaacgcuuucguagcgcagcagcuugugcgcucagagagugcagcccuguccgcucaguuggccaaggacaaggucaaugaaugcgugaaagcacaaagcaagcgaucuggguuuuguggacaggguacacauaucguuucauucguggucaacgccccaaauggccucuauuuuaugcacgugggguacuaucccaguaaccauauagagguaguuagcgcuuacggacugugcgaugccgcaaauccuaccaacuguauugcgccagugaauggcuauuucaucaaaacuaacaauacaagaaucgucgacgaaugguccuacaccgguucuucguuuuaugcucccgagccgauuacgagcuuaaacaccaaguacguggccccucaggucacauaccaaaauaucuccacuaaccugcccccaccucuacucgggaauagcaccggcauugauuuccaggacgaacuggaugaguuuuucaaaaacgugaguacaucuauacccaacuuuggaagccuuacucagaucaauaccacauugcuggaccucaccuaugagaugcugucccuucagcaaguugugaaggcacugaacgaaucauacauugauuugaaagagcucggcaauuauacuuacuauaacaaguggccagacaagaucgaagagauccugagcaaaauuuaccacauagaaaaugagaucgccaggauuaagaaauuaaucggggaggcuugaggacuaguuauaagacugacuagcccgaugggccucccaacgggcccuccuccccuccuugcaccgagauuaauaaaaaaaaaaaaaaaaaaaaaaaaaaaaaaaaaaaaaaaaaaaaaaaaaaaaaaaaaaaaaaaaugcaucccccccccccccccccccccccccccccccaaaggcucuuuucagagccaccagaauu

SEQ ID NO: 14899 - RNA, 4279 nt, Artificial Sequence
  MERS-CoV/England 1__YP_007188579.1 spike protein mRNA human (1-1353)
aggagaaagcuuaccaugauccacagcguguuccugcucauguuucuucugacccccacagaguccuacgucgacguuggcccugauucugugaagucagccugcauugaaguagacauacagcaaacuuucuuugauaaaacguggccaagaccgaucgacgugaguaaggcugaugggauuaucuauccccagggaaggaccuacagcaacauuacaaucacuuaucaggguuuguucccuuaccagggcgaccauggggauauguaugucuacuccgcaggacacgccaccggcacaaccccacaaaaauuauuuguggcgaauuauucucaggacguuaagcaguucgcuaacgguuuugugguccggauaggggccgcagccaauucgacuggaacagugaucauuucacccagcaccagugcuacgauccgcaaaauuuacccugcauucaugcugggcuccucuguaggcaacuuuagcgaugggaagaugggacgauucuuuaaucauacucuaguucuccugccagacgguuguggcacccuucugcgugccuucuacugcaucuuggagcccagauccgggaaccacuguccugcuggaaauucauauacaaguuuugccacuuaccauaccccagcgacagauugcagcgacggcaacuauaauaggaacgcaucucucaauuccuucaaggaauacuucaaccugcggaauuguaccuuuauguauacguacaacauaacugaggaugaaauucuggagugguucgguaucacacagaccgcccaaggggugcaccucuuuucaagccgcuaugucgacuuauacggaggcaauauguuccaguuugcuacucugccgguguacgacacaauuaaauauuacaguaucaucccccacucuauuagauccauacagagcgauaggaaggccugggcagcuuucuauguguacaaacuucagccuuugaccuuucugcuagacuucucggucgauggcuauauccggcgcgccauugacugcggguuuaacgaucucucucaacugcauuguuccuacgagucauucgacguugaaaguggaguguauagcguauccucuuuugaggcgaagccaagcgguucaguggucgaacaggccgagggcguggagugcgauuucaguccccuucuguccgggacgccuccacagguuuacaacuuuaaacgauugguguucaccaauuguaacuacaaucucacaaagcuguuaagccuguucucugucaacgacuuuacuugcucacaaaucagucccgcagcuauagccagcaauuguuauuccucucucauucuugauuacuucucguauccgcugagcaugaaguccgacuugucagugaguucugcuggaccuaucagccaguuuaacuacaaacaguccuucucaaauccaaccugccuaauccuggccacaguaccccacaaccucacuaccauuacaaagccucugaaauauagcuacaucaauaagugcucuagauuucuuuccgaugacaggaccgaaguuccccagcuggugaacgcaaaucaauauaguccaugugucagcauugugcccucuacugucugggaggacggcgauuacuaccggaaacaguuguccccucucgaaggugggggcuggcugguggccucaggaaguacgguugcuaugacagagcaguuacagaugggcuucgggauaaccgugcaauauggaacugacaccaacagcguaugcccaaagcuggaauuugcgaaugauacaaaaaucgcaucgcagcuagguaacugugucgaguacucccucuauggcgugucugggcguggaguuuuccagaauugcaccgccgugggcguccgccagcaaagauuuguguacgacgcuuaucagaaccugguagguuacuauagcgaugacgggaacuacuacugucuuagggccugcgugucaguuccggucagugugauuuaugauaaggagacuaagacacaugcaacguuguucggcuccguggccugugaacacaucucuagcaccaugucccaguacucacggagcacucgaaguaugcugaaacgcagagacucuacauauggaccccuccagaccccugucggcugcguucuggggcuuguaaauuccagccuguuuguggaggauuguaaguugccacucggacaaucgcugugcgcuuuacccgacacaccuucaacucugaccccaaggucugugcggaguguccccggugaaaugcgccuagccuccaucgcauucaaccacccgauucagguggaucagcucaauagcucuuacuuuaaacugagcauaccuacgaacuucuccuucggcguuacccaagaguauauccagacaacuauucagaaggugaccgucgacuguaaacaguacgugugcaauggguuucaaaagugcgaacagcuuuugagagaguauggacaguucuguucaaagaucaaccaggcgcugcauggcgcuaaucucaggcaagaugacaguguucguaaccuguuugccagcgugaaaucuucccagucaaguccaauuauccccgguuucgggggcgacuuuaauuuaacacugcuugagccuguaagcauauccacuggaucucggucggcacgaagcgccaucgaagaucuccucuucgacaaggucaccauugcugaucccggcuacaugcagggguacgacgauugcaugcagcaaggaccagccucagcaagagaccugaucugugcucaguauguggccggcuacaaagugcuaccuccccugauggaugucaacauggaggcggccuauacguccagucuccuggguucuauugcugggguuggauggacagcaggccuuagcuccuuugccgcuaucccauucgcccagucaauauuuuacagguugaauggugugggcauuacccaacagguacugucugaaaaccagaaguuaaucgcaaauaaauucaaccaggcgcucggggccaugcaaacuggauuuacaaccacuaaugaggcuuuccacaaggugcaggacgccgucaacaacaaugcacaggcucugagcaaacuugccagugaacuguccaacaccuucggcgcaauuagcgccucuaucggggauauaauccagcgcuuggacgugcucgagcaagaugcucagauugaccggcugaucaauggaagacuaacaacgcugaacgcguuuguugcccagcagcucgugaggucagaguccgcagcucugagugcccaacuugccaaggauaaggucaaugaaugcgugaaagcucagagcaagcgcucgggcuucuguggucaggggacccauauuguuucuuuuguggucaacgcaccgaauggauuguauuucaugcacguaggcuacuauccuuccaaccauaucgaggugguuagcgccuacggucugugcgacgcggcuaaucccacuaacuguauagccccagugaauggcuacuuuauuaaaacaaacaauacccgaaucgucgacgaauggucauauacagggaguucuuucuacgcacccgagccuaucacuuccuuaaacaccaaguauguggccccacagguaacguaccaaaauauuagcacaaacuugcccccuccgcugcuuggaaacucaaccggcaucgauuuucaggacgagcuggaugaguucuuuaagaaugugaguacuagcauuccaaacuucgggucccuaacccagauaaauacaacucuccuggacuugaccuaugaaaugcugucuuuacaacaggucguuaaagcucucaacgaaagcuacaucgaucugaaggagcuuggaaauuauacauacuacaacaaauggcccugguauauuuggcugggcuuuaucgcagguuugguggcccucgcgcugugcguguucuuuauucuauguugcacgggguguggaaccaauugcaugggcaagcugaaaugcaaccgguguugcgaccguuacgaagaguaugaucuugagccucacaagguccacgugcauugaggacuaguuauaagacugacuagcccgaugggccucccaacgggcccuccuccccuccuugcaccgagauuaauaaaaaaaaaaaaaaaaaaaaaaaaaaaaaaaaaaaaaaaaaaaaaaaaaaaaaaaaaaaaaaaaugcaucccccccccccccccccccccccccccccccaaaggcucuuuucagagccaccagaauu

SEQ ID NO: 14900 - RNA, 4279 nt, Artificial Sequence
  MERS-CoV/England 1__YP_007188579.1 spike protein mRNA human (1-1353)(V1060P_L1061P)
aggagaaagcuuaccaugauccacagcguguuccugcucauguuucuucugacccccacagaguccuacgucgacguuggcccugauucugugaagucagccugcauugaaguagacauacagcaaacuuucuuugauaaaacguggccaagaccgaucgacgugaguaaggcugaugggauuaucuauccccagggaaggaccuacagcaacauuacaaucacuuaucaggguuuguucccuuaccagggcgaccauggggauauguaugucuacuccgcaggacacgccaccggcacaaccccacaaaaauuauuuguggcgaauuauucucaggacguuaagcaguucgcuaacgguuuugugguccggauaggggccgcagccaauucgacuggaacagugaucauuucacccagcaccagugcuacgauccgcaaaauuuacccugcauucaugcugggcuccucuguaggcaacuuuagcgaugggaagaugggacgauucuuuaaucauacucuaguucuccugccagacgguuguggcacccuucugcgugccuucuacugcaucuuggagcccagauccgggaaccacuguccugcuggaaauucauauacaaguuuugccacuuaccauaccccagcgacagauugcagcgacggcaacuauaauaggaacgcaucucucaauuccuucaaggaauacuucaaccugcggaauuguaccuuuauguauacguacaacauaacugaggaugaaauucuggagugguucgguaucacacagaccgcccaaggggugcaccucuuuucaagccgcuaugucgacuuauacggaggcaauauguuccaguuugcuacucugccgguguacgacacaauuaaauauuacaguaucaucccccacucuauuagauccauacagagcgauaggaaggccugggcagcuuucuauguguacaaacuucagccuuugaccuuucugcuagacuucucggucgauggcuauauccggcgcgccauugacugcggguuuaacgaucucucucaacugcauuguuccuacgagucauucgacguugaaaguggaguguauagcguauccucuuuugaggcgaagccaagcgguucaguggucgaacaggccgagggcguggagugcgauuucaguccccuucuguccgggacgccuccacagguuuacaacuuuaaacgauugguguucaccaauuguaacuacaaucucacaaagcuguuaagccuguucucugucaacgacuuuacuugcucacaaaucagucccgcagcuauagccagcaauuguuauuccucucucauucuugauuacuucucguauccgcugagcaugaaguccgacuugucagugaguucugcuggaccuaucagccaguuuaacuacaaacaguccuucucaaauccaaccugccuaauccuggccacaguaccccacaaccucacuaccauuacaaagccucugaaauauagcuacaucaauaagugcucuagauuucuuuccgaugacaggaccgaaguuccccagcuggugaacgcaaaucaauauaguccaugugucagcauugugcccucuacugucugggaggacggcgauuacuaccggaaacaguuguccccucucgaaggugggggcuggcugguggccucaggaaguacgguugcuaugacagagcaguuacagaugggcuucgggauaaccgugcaauauggaacugacaccaacagcguaugcccaaagcuggaauuugcgaaugauacaaaaaucgcaucgcagcuagguaacugugucgaguacucccucuauggcgugucugggcguggaguuuuccagaauugcaccgccgugggcguccgccagcaaagauuuguguacgacgcuuaucagaaccugguagguuacuauagcgaugacgggaacuacuacugucuuagggccugcgugucaguuccggucagugugauuuaugauaaggagacuaagacacaugcaacguuguucggcuccguggccugugaacacaucucuagcaccaugucccaguacucacggagcacucgaaguaugcugaaacgcagagacucuacauauggaccccuccagaccccugucggcugcguucuggggcuuguaaauuccagccuguuuguggaggauuguaaguugccacucggacaaucgcugugcgcuuuacccgacacaccuucaacucugaccccaaggucugugcggaguguccccggugaaaugcgccuagccuccaucgcauucaaccacccgauucagguggaucagcucaauagcucuuacuuuaaacugagcauaccuacgaacuucuccuucggcguuacccaagaguauauccagacaacuauucagaaggugaccgucgacuguaaacaguacgugugcaauggguuucaaaagugcgaacagcuuuugagagaguauggacaguucuguucaaagaucaaccaggcgcugcauggcgcuaaucucaggcaagaugacaguguucguaaccuguuugccagcgugaaaucuucccagucaaguccaauuauccccgguuucgggggcgacuuuaauuuaacacugcuugagccuguaagcauauccacuggaucucggucggcacgaagcgccaucgaagaucucuuguucgacaaggucaccauugcugaucccggcuacaugcagggguacgacgauugcaugcagcaaggaccagccucagcaagagaccugaucugugcucaguauguggccggcuacaaagugcuaccuccccugauggaugucaacauggaggcggccuauacguccagucuccuggguucuauugcugggguuggauggacagcaggccuuagcuccuuugccgcuaucccauucgcccagucaauauuuuacagguugaauggugugggcauuacccaacagguacugucugaaaaccagaaguuaaucgcaaauaaauucaaccaggcgcucggggccaugcaaacuggauuuacaaccacuaaugaggcuuuccacaaggugcaggacgccgucaacaacaaugcacaggcucugagcaaacuugccagugaacuguccaacaccuucggcgcaauuagcgccucuaucggggauauaauccagcgcuuggacccgccugagcaagaugcucagauugaccggcucaucaauggaagacugacaacgcuaaacgcguuuguggcccagcagcugguuaggucagaguccgcagcucucagugcccaacuggccaaagauaaggugaaugaaugcgucaaagcucagagcaagcgcucgggcuucuguggucaggggacccauauugugucuuuuguugugaacgcacccaauggacuuuauuucaugcacgucggcuacuauccauccaaccauaucgagguagugagcgccuacgguuugugcgacgcggcuaaucccacuaacuguauagccccuguuaauggcuacuuuauuaaaacaaacaauacccgaaucguggacgaauggucauauacagggaguucuuucuacgcaccagagcccaucacuucccugaacaccaaguaugucgccccucaggugacguaccaaaauauuagcacaaacuuaccgccaccccuccugggaaacucaaccggcaucgauuuucaggacgagcuugaugaguucuuuaagaauguaaguacuagcauuccuaacuucgggucccugacccagauaaauacaacucuacucgaccugaccuaugaaauguugucucugcaacagguggucaaggcuuuaaacgaaagcuacaucgaucucaaggagcugggaaauuauacauacuacaacaaauggccaugguauauuuggcuuggcuuuaucgcaggucugguugccuuggcgcucugcguguucuuuauucuguguugcacgggguguggaaccaauugcaugggcaagcuaaaaugcaaccgguguugcgaccguuacgaagaguaugaucuggagccccacaaggugcacguccauugaggacuaguuauaagacugacuagcccgaugggccucccaacgggcccuccuccccuccuugcaccgagauuaauaaaaaaaaaaaaaaaaaaaaaaaaaaaaaaaaaaaaaaaaaaaaaaaaaaaaaaaaaaaaaaaaugcaucccccccccccccccccccccccccccccccaaaggcucuuuucagagccaccagaauu

SEQ ID NO: 14901 - RNA, 4093 nt, Artificial Sequence
  MERS-CoV/England 1__YP_007188579.1 spike protein mRNA human (variant)
aggagaaagcuuaccaugauccacagcguguuccugcucauguuucuucugacccccacagaguccuacgucgacguuggcccugauucugugaagucagccugcauugaaguagacauacagcaaacuuucuuugauaaaacguggccaagaccgaucgacgugaguaaggcugaugggauuaucuauccccagggaaggaccuacagcaacauuacaaucacuuaucaggguuuguucccuuaccagggcgaccauggggauauguaugucuacuccgcaggacacgccaccggcacaaccccacaaaaauuauuuguggcgaauuauucucaggacguuaagcaguucgcuaacgguuuugugguccggauaggggccgcagccaauucgacuggaacagugaucauuucacccagcaccagugcuacgauccgcaaaauuuacccugcauucaugcugggcuccucuguaggcaacuuuagcgaugggaagaugggacgauucuuuaaucauacucuaguucuccugccagacgguuguggcacccuucugcgugccuucuacugcaucuuggagcccagauccgggaaccacuguccugcuggaaauucauauacaaguuuugccacuuaccauaccccagcgacagauugcagcgacggcaacuauaauaggaacgcaucucucaauuccuucaaggaauacuucaaccugcggaauuguaccuuuauguauacguacaacauaacugaggaugaaauucuggagugguucgguaucacacagaccgcccaaggggugcaccucuuuucaagccgcuaugucgacuuauacggaggcaauauguuccaguuugcuacucugccgguguacgacacaauuaaauauuacaguaucaucccccacucuauuagauccauacagagcgauaggaaggccugggcagcuuucuauguguacaaacuucagccuuugaccuuucugcuagacuucucggucgauggcuauauccggcgcgccauugacugcggguuuaacgaucucucucaacugcauuguuccuacgagucauucgacguugaaaguggaguguauagcguauccucuuuugaggcgaagccaagcgguucaguggucgaacaggccgagggcguggagugcgauuucaguccccuucuguccgggacgccuccacagguuuacaacuuuaaacgauugguguucaccaauuguaacuacaaucucacaaagcuguuaagccuguucucugucaacgacuuuacuugcucacaaaucagucccgcagcuauagccagcaauuguuauuccucucucauucuugauuacuucucguauccgcugagcaugaaguccgacuugucagugaguucugcuggaccuaucagccaguuuaacuacaaacaguccuucucaaauccaaccugccuaauccuggccacaguaccccacaaccucacuaccauuacaaagccucugaaauauagcuacaucaauaagugcucuagauuucuuuccgaugacaggaccgaaguuccccagcuggugaacgcaaaucaauauaguccaugugucagcauugugcccucuacugucugggaggacggcgauuacuaccggaaacaguuguccccucucgaaggugggggcuggcugguggccucaggaaguacgguugcuaugacagagcaguuacagaugggcuucgggauaaccgugcaauauggaacugacaccaacagcguaugcccaaagcuggaauuugcgaaugauacaaaaaucgcaucgcagcuagguaacugugucgaguacucccucuauggcgugucugggcguggaguuuuccagaauugcaccgccgugggcguccgccagcaaagauuuguguacgacgcuuaucagaaccugguagguuacuauagcgaugacgggaacuacuacugucuuagggccugcgugucaguuccggucagugugauuuaugauaaggagacuaagacacaugcaacguuguucggcuccguggccugugaacacaucucuagcaccaugucccaguacucacggagcacucgaaguaugcugaaacgcagagacucuacauauggaccccuccagaccccugucggcugcguucuggggcuuguaaauuccagccuguuuguggaggauuguaaguugccacucggacaaucgcugugcgcuuuacccgacacaccuucaacucugaccccaaggucugugcggaguguccccggugaaaugcgccuagccuccaucgcauucaaccacccgauucagguggaucagcucaauagcucuuacuuuaaacugagcauaccuacgaacuucuccuucggcguuacccaagaguauauccagacaacuauucagaaggugaccgucgacuguaaacaguacgugugcaauggguuucaaaagugcgaacagcuuuugagagaguauggacaguucuguucaaagaucaaccaggcgcugcauggcgcuaaucucaggcaagaugacaguguucguaaccuguuugccagcgugaaaucuucccagucaaguccaauuauccccgguuucgggggcgacuuuaauuuaacacugcuugagccuguaagcauauccacuggaucucggucggcacgaagcgccaucgaagaucucuuguucgacaaggucaccauugcugaucccggcuacaugcagggguacgacgauugcaugcagcaaggaccagccucagcaagagaccugaucugugcucaguauguggccggcuacaaagugcuaccuccccugauggaugucaacauggaggcggccuauacguccagucuccuggguucuauugcugggguuggauggacagcaggccuuagcuccuuugccgcuaucccauucgcccagucaauauuuuacagguugaauggugugggcauuacccaacagguacugucugaaaaccagaaguuaaucgcaaauaaauucaaccaggcgcucggggccaugcaaacuggauuuacaaccacuaaugaggcuuuccacaaggugcaggacgccgucaacaacaaugcacaggcucugagcaaacuugccagugaacuguccaacaccuucggcgcaauuagcgccucuaucggggauauaauccagcgcuuggacccgccugagcaagaugcucagauugaccggcucaucaauggaagacugacaacgcuaaacgcguuuguggcccagcagcugguuaggucagaguccgcagcucucagugcccaacuggccaaagauaaggugaaugaaugcgucaaagcucagagcaagcgcucgggcuucuguggucaggggacccauauugugucuuuuguugugaacgcacccaauggacuuuauuucaugcacgucggcuacuauccauccaaccauaucgagguagugagcgccuacgguuugugcgacgcggcuaaucccacuaacuguauagccccuguuaauggcuacuuuauuaaaacaaacaauacccgaaucguggacgaauggucauauacagggaguucuuucuacgcaccagagcccaucacuucccugaacaccaaguaugucgccccucaggugacguaccaaaauauuagcacaaacuuaccgccaccccuccugggaaacucaaccggcaucgauuuucaggacgagcuugaugaguucuuuaagaauguaaguacuagcauuccuaacuucgggucccugacccagauaaauacaacucuacucgaccugaccuaugaaauguugucucugcaacagguggucaaggcuuuaaacgaaagcuacaucgaucucaaggagcugggaaauuauacauacugaggacuaguuauaagacugacuagcccgaugggccucccaacgggcccuccuccccuccuugcaccgagauuaauaaaaaaaaaaaaaaaaaaaaaaaaaaaaaaaaaaaaaaaaaaaaaaaaaaaaaaaaaaaaaaaaugcaucccccccccccccccccccccccccccccccaaaggcucuuuucagagccaccagaauu

SEQ ID NO: 14902 - RNA, 4093 nt, Artificial Sequence
  MERS-CoV/England 1__YP_007188579.1 spike protein mRNA human (variant)
aggagaaagcuuaccaugauccacagcguguuccugcucauguuucuucugacccccacagaguccuacgucgacguuggcccugauucugugaagucagccugcauugaaguagacauacagcaaacuuucuuugauaaaacguggccaagaccgaucgacgugaguaaggcugaugggauuaucuauccccagggaaggaccuacagcaacauuacaaucacuuaucaggguuuguucccuuaccagggcgaccauggggauauguaugucuacuccgcaggacacgccaccggcacaaccccacaaaaauuauuuguggcgaauuauucucaggacguuaagcaguucgcuaacgguuuugugguccggauaggggccgcagccaauucgacuggaacagugaucauuucacccagcaccagugcuacgauccgcaaaauuuacccugcauucaugcugggcuccucuguaggcaacuuuagcgaugggaagaugggacgauucuuuaaucauacucuaguucuccugccagacgguuguggcacccuucugcgugccuucuacugcaucuuggagcccagauccgggaaccacuguccugcuggaaauucauauacaaguuuugccacuuaccauaccccagcgacagauugcagcgacggcaacuauaauaggaacgcaucucucaauuccuucaaggaauacuucaaccugcggaauuguaccuuuauguauacguacaacauaacugaggaugaaauucuggagugguucgguaucacacagaccgcccaaggggugcaccucuuuucaagccgcuaugucgacuuauacggaggcaauauguuccaguuugcuacucugccgguguacgacacaauuaaauauuacaguaucaucccccacucuauuagauccauacagagcgauaggaaggccugggcagcuuucuauguguacaaacuucagccuuugaccuuucugcuagacuucucggucgauggcuauauccggcgcgccauugacugcggguuuaacgaucucucucaacugcauuguuccuacgagucauucgacguugaaaguggaguguauagcguauccucuuuugaggcgaagccaagcgguucaguggucgaacaggccgagggcguggagugcgauuucaguccccuucuguccgggacgccuccacagguuuacaacuuuaaacgauugguguucaccaauuguaacuacaaucucacaaagcuguuaagccuguucucugucaacgacuuuacuugcucacaaaucagucccgcagcuauagccagcaauuguuauuccucucucauucuugauuacuucucguauccgcugagcaugaaguccgacuugucagugaguucugcuggaccuaucagccaguuuaacuacaaacaguccuucucaaauccaaccugccuaauccuggccacaguaccccacaaccucacuaccauuacaaagccucugaaauauagcuacaucaauaagugcucuagauuucuuuccgaugacaggaccgaaguuccccagcuggugaacgcaaaucaauauaguccaugugucagcauugugcccucuacugucugggaggacggcgauuacuaccggaaacaguuguccccucucgaaggugggggcuggcugguggccucaggaaguacgguugcuaugacagagcaguuacagaugggcuucgggauaaccgugcaauauggaacugacaccaacagcguaugcccaaagcuggaauuugcgaaugauacaaaaaucgcaucgcagcuagguaacugugucgaguacucccucuauggcgugucugggcguggaguuuuccagaauugcaccgccgugggcguccgccagcaaagauuuguguacgacgcuuaucagaaccugguagguuacuauagcgaugacgggaacuacuacugucuuagggccugcgugucaguuccggucagugugauuuaugauaaggagacuaagacacaugcaacguuguucggcuccguggccugugaacacaucucuagcaccaugucccaguacucacggagcacucgaaguaugcugaaacgcagagacucuacauauggaccccuccagaccccugucggcugcguucuggggcuuguaaauuccagccuguuuguggaggauuguaaguugccacucggacaaucgcugugcgcuuuacccgacacaccuucaacucugaccccagccucuguggguaguguccccggcgaaaugaggcuagcauccaucgcguucaaccacccgauucagguggaucagcucaauagcucuuacuuuaaacugagcauaccuacgaacuucuccuucgggguuacccaagaguauauccagacaacuauucagaaggugaccgucgacuguaaacaguacgugugcaauggauuucaaaagugcgaacagcuuuugcgggaguauggccaguucuguucaaagaucaaccaggcucugcauggugccaaucuccgccaagaugacaguguuagaaaccuguuugcaagcgugaaaucuucccagucaaguccaauuauccccggguucggcggagacuuuaauuuaacacugcuugagccuguaagcauauccacuggcucuaggucggcccguagcgcuaucgaagaucuucucuucgacaaggucaccauugccgaucccggguacaugcagggauacgacgauugcaugcagcaaggcccagcaucagcucgggaccugaucugugcccaguauguggcggguuacaaagugcuaccuccccugauggaugucaacauggaggccgcuuauacguccagucuccuggggucuauugcaggaguuggcuggacagccggucuuagcuccuuugcugccaucccauucgcacagucaauauuuuaccgauugaauggcguggggauuacccaacagguacugucugaaaaccagaaguuaaucgcgaauaaauucaaccaggcccucggagcuaugcaaacuggcuuuacaaccacuaaugaggccuuccacaaggugcaggacgcagucaacaacaaugcucaggcccugagcaaguuggcaagugaacuguccaacaccuucggggccauuagcgcuucuaucggagauauaauccagagauuggacccgccugagcaagaugcgcagauugacaggcucaucaauggccgccugacaacgcuaaacgccuuuguggcacagcagcugguucggucagaguccgcugcccucagugcccaacuggcuaaagauaaggugaaugaaugcgucaaagcacagagcaagagaucggguuucugugggcagggaacccauauugugucuuuuguugugaacgcccccaauggccuuuauuucaugcacgucgguuacuauccauccaaccauaucgagguagugagcgcguacggcuugugcgacgcugccaaucccacuaacuguauagcaccuguuaauggguacuuuauuaaaacaaacaauaccaggaucguggacgaauggucauauacaggaaguucuuucuacgccccagagcccaucacuucccugaacaccaaguaugucgcuccucaggugacguaccaaaauauuagcacaaacuuaccgccaccccuccugggcaacucaaccgggaucgauuuucaggacgagcuugaugaguucuuuaagaauguaaguacuagcauuccuaacuucggaucccugacccagauaaauacaacucuacucgaccugaccuaugaaauguugucucugcaacagguggucaaagcauuaaacgaaagcuacaucgaucucaaggagcugggcaauuauacauacugaggacuaguuauaagacugacuagcccgaugggccucccaacgggcccuccuccccuccuugcaccgagauuaauaaaaaaaaaaaaaaaaaaaaaaaaaaaaaaaaaaaaaaaaaaaaaaaaaaaaaaaaaaaaaaaaugcaucccccccccccccccccccccccccccccccaaaggcucuuuucagagccaccagaauu

SEQ ID NO: 14903 - RNA, 4093 nt, Artificial Sequence
  MERS-CoV/England 1__YP_007188579.1 spike protein mRNA human (variant)
aggagaaagcuuaccaugauccacagcguguuccugcucauguuucuucugacccccacagaguccuacgucgacguuggcccugauucugugaagucagccugcauugaaguagacauacagcaaacuuucuuugauaaaacguggccaagaccgaucgacgugaguaaggcugaugggauuaucuauccccagggaaggaccuacagcaacauuacaaucacuuaucaggguuuguucccuuaccagggcgaccauggggauauguaugucuacuccgcaggacacgccaccggcacaaccccacaaaaauuauuuguggcgaauuauucucaggacguuaagcaguucgcuaacgguuuugugguccggauaggggccgcagccaauucgacuggaacagugaucauuucacccagcaccagugcuacgauccgcaaaauuuacccugcauucaugcugggcuccucuguaggcaacuuuagcgaugggaagaugggacgauucuuuaaucauacucuaguucuccugccagacgguuguggcacccuucugcgugccuucuacugcaucuuggagcccagauccgggaaccacuguccugcuggaaauucauauacaaguuuugccacuuaccauaccccagcgacagauugcagcgacggcaacuauaauaggaacgcaucucucaauuccuucaaggaauacuucaaccugcggaauuguaccuuuauguauacguacaacauaacugaggaugaaauucuggagugguucgguaucacacagaccgcccaaggggugcaccucuuuucaagccgcuaugucgacuuauacggaggcaauauguuccaguuugcuacucugccgguguacgacacaauuaaauauuacaguaucaucccccacucuauuagauccauacagagcgauaggaaggccugggcagcuuucuauguguacaaacuucagccuuugaccuuucugcuagacuucucggucgauggcuauauccggcgcgccauugacugcggguuuaacgaucucucucaacugcauuguuccuacgagucauucgacguugaaaguggaguguauagcguauccucuuuugaggcgaagccaagcgguucaguggucgaacaggccgagggcguggagugcgauuucaguccccuucuguccgggacgccuccacagguuuacaacuuuaaacgauugguguucaccaauuguaacuacaaucucacaaagcuguuaagccuguucucugucaacgacuuuacuugcucacaaaucagucccgcagcuauagccagcaauuguuauuccucucucauucuugauuacuucucguauccgcugagcaugaaguccgacuugucagugaguucugcuggaccuaucagccaguuuaacuacaaacaguccuucucaaauccaaccugccuaauccuggccacaguaccccacaaccucacuaccauuacaaagccucugaaauauagcuacaucaauaagugcucuagauuucuuuccgaugacaggaccgaaguuccccagcuggugaacgcaaaucaauauaguccaugugucagcauugugcccucuacugucugggaggacggcgauuacuaccggaaacaguuguccccucucgaaggugggggcuggcugguggccucaggaaguacgguugcuaugacagagcaguuacagaugggcuucgggauaaccgugcaauauggaacugacaccaacagcguaugcccaaagcuggaauuugcgaaugauacaaaaaucgcaucgcagcuagguaacugugucgaguacucccucuauggcgugucugggcguggaguuuuccagaauugcaccgccgugggcguccgccagcaaagauuuguguacgacgcuuaucagaaccugguagguuacuauagcgaugacgggaacuacuacugucuuagggccugcgugucaguuccggucagugugauuuaugauaaggagacuaagacacaugcaacguuguucggcuccguggccugugaacacaucucuagcaccaugucccaguacucacggagcacucgaaguaugcugaaacgcagagacucuacauauggaccccuccagaccccugucggcugcguucuggggcuuguaaauuccagccuguuuguggaggauuguaaguugccacucggacaaucgcugugcgcuuuacccgacacaccuucaacucugaccccagccucuguggguaguguccccggcgaaaugaggcuagcauccaucgcguucaaccacccgauucagguggaucagcucaauagcucuuacuuuaaacugagcauaccuacgaacuucuccuucgggguuacccaagaguauauccagacaacuauucagaaggugaccgucgacuguaaacaguacgugugcaauggauuucaaaagugcgaacagcuuuugcgggaguauggccaguucuguucaaagaucaaccaggcucugcauggugccaaucuccgccaagaugacaguguuagaaaccuguuugcaagcgugaaaucuucccagucaaguccaauuauccccggguucggcggagacuuuaauuuaacacugcuugagccuguaagcauauccacuggcucugggucggccggaagcgcuaucgaagaucuucucuucgacaaggucaccauugccgaucccggcuacaugcaggguuacgacgauugcaugcagcaagggccagcaucagcuagggaccugaucugugcccaguauguggcgggauacaaagugcuaccuccccugauggaugucaacauggaggccgcuuauacguccagucuccugggcucuauugccgguguuggcuggacagcagggcuuagcuccuuugcugccaucccauucgcacagucaauauuuuaccguuugaauggagugggcauuacccaacagguacugucugaaaaccagaaguuaaucgcgaauaaauucaaccaggcccucggggcuaugcaaacuggauuuacaaccacuaaugaggccuuccacaaggugcaggacgcagucaacaacaaugcucaggcccugagcaaguuggcaagugaacuguccaacaccuucggcgccauuagcgcuucuaucggugauauaauccagcgguuggacccgccugagcaagaugcgcagauugaccgacucaucaaugggagacugacaacgcuaaacgccuuuguggcacagcagcugguuaggucagaguccgcugcccucagugcccaacuggcuaaagauaaggugaaugaaugcgucaaagcacagagcaagcgcucgggauucuguggccaggguacccauauugugucuuuuguugugaacgcccccaauggccuuuauuucaugcacgucggguacuauccauccaaccauaucgagguagugagcgcguacggauugugcgacgcugccaaucccacuaacuguauagcaccuguuaauggcuacuuuauuaaaacaaacaauacccggaucguggacgaauggucauauacagggaguucuuucuacgccccagagcccaucacuucccugaacaccaaguaugucgcuccucaggugacguaccaaaauauuagcacaaacuuaccgccaccccuccugggaaacucaaccggcaucgauuuucaggacgagcuugaugaguucuuuaagaauguaaguacuagcauuccuaacuucgguucccugacccagauaaauacaacucuacucgaccugaccuaugaaauguugucucugcaacagguggucaaagcauuaaacgaaagcuacaucgaucucaaggagcuggggaauuauacauacugaggacuaguuauaagacugacuagcccgaugggccucccaacgggcccuccuccccuccuugcaccgagauuaauaaaaaaaaaaaaaaaaaaaaaaaaaaaaaaaaaaaaaaaaaaaaaaaaaaaaaaaaaaaaaaaaugcaucccccccccccccccccccccccccccccccaaaggcucuuuucagagccaccagaauu

SEQ ID NO: 14904 - RNA, 4174 nt, Artificial Sequence
  MERS-CoV/England 1__YP_007188579.1 spike protein mRNA human (variant)
aggagaaagcuuaccaugauccacagcguguuccugcucauguuucuucugacccccacagaguccuacgucgacguuggcccugauucugugaagucagccugcauugaaguagacauacagcaaacuuucuuugauaaaacguggccaagaccgaucgacgugaguaaggcugaugggauuaucuauccccagggaaggaccuacagcaacauuacaaucacuuaucaggguuuguucccuuaccagggcgaccauggggauauguaugucuacuccgcaggacacgccaccggcacaaccccacaaaaauuauuuguggcgaauuauucucaggacguuaagcaguucgcuaacgguuuugugguccggauaggggccgcagccaauucgacuggaacagugaucauuucacccagcaccagugcuacgauccgcaaaauuuacccugcauucaugcugggcuccucuguaggcaacuuuagcgaugggaagaugggacgauucuuuaaucauacucuaguucuccugccagacgguuguggcacccuucugcgugccuucuacugcaucuuggagcccagauccgggaaccacuguccugcuggaaauucauauacaaguuuugccacuuaccauaccccagcgacagauugcagcgacggcaacuauaauaggaacgcaucucucaauuccuucaaggaauacuucaaccugcggaauuguaccuuuauguauacguacaacauaacugaggaugaaauucuggagugguucgguaucacacagaccgcccaaggggugcaccucuuuucaagccgcuaugucgacuuauacggaggcaauauguuccaguuugcuacucugccgguguacgacacaauuaaauauuacaguaucaucccccacucuauuagauccauacagagcgauaggaaggccugggcagcuuucuauguguacaaacuucagccuuugaccuuucugcuagacuucucggucgauggcuauauccggcgcgccauugacugcggguuuaacgaucucucucaacugcauuguuccuacgagucauucgacguugaaaguggaguguauagcguauccucuuuugaggcgaagccaagcgguucaguggucgaacaggccgagggcguggagugcgauuucaguccccuucuguccgggacgccuccacagguuuacaacuuuaaacgauugguguucaccaauuguaacuacaaucucacaaagcuguuaagccuguucucugucaacgacuuuacuugcucacaaaucagucccgcagcuauagccagcaauuguuauuccucucucauucuugauuacuucucguauccgcugagcaugaaguccgacuugucagugaguucugcuggaccuaucagccaguuuaacuacaaacaguccuucucaaauccaaccugccuaauccuggccacaguaccccacaaccucacuaccauuacaaagccucugaaauauagcuacaucaauaagugcucuagauuucuuuccgaugacaggaccgaaguuccccagcuggugaacgcaaaucaauauaguccaugugucagcauugugcccucuacugucugggaggacggcgauuacuaccggaaacaguuguccccucucgaaggugggggcuggcugguggccucaggaaguacgguugcuaugacagagcaguuacagaugggcuucgggauaaccgugcaauauggaacugacaccaacagcguaugcccaaagcuggaauuugcgaaugauacaaaaaucgcaucgcagcuagguaacugugucgaguacucccucuauggcgugucugggcguggaguuuuccagaauugcaccgccgugggcguccgccagcaaagauuuguguacgacgcuuaucagaaccugguagguuacuauagcgaugacgggaacuacuacugucuuagggccugcgugucaguuccggucagugugauuuaugauaaggagacuaagacacaugcaacguuguucggcuccguggccugugaacacaucucuagcaccaugucccaguacucacggagcacucgaaguaugcugaaacgcagagacucuacauauggaccccuccagaccccugucggcugcguucuggggcuuguaaauuccagccuguuuguggaggauuguaaguugccacucggacaaucgcugugcgcuuuacccgacacaccuucaacucugaccccagccucuguggguaguguccccggcgaaaugaggcuagcauccaucgcguucaaccacccgauucagguggaucagcucaauagcucuuacuuuaaacugagcauaccuacgaacuucuccuucgggguuacccaagaguauauccagacaacuauucagaaggugaccgucgacuguaaacaguacgugugcaauggauuucaaaagugcgaacagcuuuugcgggaguauggccaguucuguucaaagaucaaccaggcucugcauggugccaaucuccgccaagaugacaguguuagaaaccuguuugcaagcgugaaaucuucccagucaaguccaauuauccccggguucggcggagacuuuaauuuaacacugcuugagccuguaagcauauccacuggcucuaggucggcccguagcgcuaucgaagaucuucucuucgacaaggucaccauugccgaucccggguacaugcagggauacgacgauugcaugcagcaaggcccagcaucagcucgggaccugaucugugcccaguauguggcggguuacaaagugcuaccuccccugauggaugucaacauggaggccgcuuauacguccagucuccuggggucuauugcaggaguuggcuggacagccggucuuagcuccuuugcugccaucccauucgcacagucaauauuuuaccgauugaauggcguggggauuacccaacagguacugucugaaaaccagaaguuaaucgcgaauaaauucaaccaggcccucggagcuaugcaaacuggcuuuacaaccacuaaugaggccuuccacaaggugcaggacgcagucaacaacaaugcucaggcccugagcaaguuggcaagugaacuguccaacaccuucggggccauuagcgcuucuaucggagauauaauccagagauuggacccgccugagcaagaugcgcagauugacaggcucaucaauggccgccugacaacgcuaaacgccuuuguggcacagcagcugguucggucagaguccgcugcccucagugcccaacuggcuaaagauaaggugaaugaaugcgucaaagcacagagcaagagaucggguuucugugggcagggaacccauauugugucuuuuguugugaacgcccccaauggccuuuauuucaugcacgucgguuacuauccauccaaccauaucgagguagugagcgcguacggcuugugcgacgcugccaaucccacuaacuguauagcaccuguuaauggguacuuuauuaaaacaaacaauaccaggaucguggacgaauggucauauacaggaaguucuuucuacgccccagagcccaucacuucccugaacaccaaguaugucgcuccucaggugacguaccaaaauauuagcacaaacuuaccgccaccccuccugggcaacucaaccgggaucgauuuucaggacgagcuugaugaguucuuuaagaauguaaguacuagcauuccuaacuucggaucccugacccagauaaauacaacucuacucgaccugaccuaugaaauguugucucugcaacagguggucaaagcauuaaacgaaagcuacaucgaucucaaggagcugggcaauuauacauacgguggguacauuccagaagcgccccgcgacggacaggccuauguucgaaaagauggcgagugggugcuucuguccacguuuugaggacuaguuauaagacugacuagcccgaugggccucccaacgggcccuccuccccuccuugcaccgagauuaauaaaaaaaaaaaaaaaaaaaaaaaaaaaaaaaaaaaaaaaaaaaaaaaaaaaaaaaaaaaaaaaaugcaucccccccccccccccccccccccccccccccaaaggcucuuuucagagccaccagaauu

SEQ ID NO: 14905 - RNA, 4174 nt, Artificial Sequence
  MERS-CoV/England 1__YP_007188579.1 spike protein mRNA human (variant)
aggagaaagcuuaccaugauccacagcguguuccugcucauguuucuucugacccccacagaguccuacgucgacguuggcccugauucugugaagucagccugcauugaaguagacauacagcaaacuuucuuugauaaaacguggccaagaccgaucgacgugaguaaggcugaugggauuaucuauccccagggaaggaccuacagcaacauuacaaucacuuaucaggguuuguucccuuaccagggcgaccauggggauauguaugucuacuccgcaggacacgccaccggcacaaccccacaaaaauuauuuguggcgaauuauucucaggacguuaagcaguucgcuaacgguuuugugguccggauaggggccgcagccaauucgacuggaacagugaucauuucacccagcaccagugcuacgauccgcaaaauuuacccugcauucaugcugggcuccucuguaggcaacuuuagcgaugggaagaugggacgauucuuuaaucauacucuaguucuccugccagacgguuguggcacccuucugcgugccuucuacugcaucuuggagcccagauccgggaaccacuguccugcuggaaauucauauacaaguuuugccacuuaccauaccccagcgacagauugcagcgacggcaacuauaauaggaacgcaucucucaauuccuucaaggaauacuucaaccugcggaauuguaccuuuauguauacguacaacauaacugaggaugaaauucuggagugguucgguaucacacagaccgcccaaggggugcaccucuuuucaagccgcuaugucgacuuauacggaggcaauauguuccaguuugcuacucugccgguguacgacacaauuaaauauuacaguaucaucccccacucuauuagauccauacagagcgauaggaaggccugggcagcuuucuauguguacaaacuucagccuuugaccuuucugcuagacuucucggucgauggcuauauccggcgcgccauugacugcggguuuaacgaucucucucaacugcauuguuccuacgagucauucgacguugaaaguggaguguauagcguauccucuuuugaggcgaagccaagcgguucaguggucgaacaggccgagggcguggagugcgauuucaguccccuucuguccgggacgccuccacagguuuacaacuuuaaacgauugguguucaccaauuguaacuacaaucucacaaagcuguuaagccuguucucugucaacgacuuuacuugcucacaaaucagucccgcagcuauagccagcaauuguuauuccucucucauucuugauuacuucucguauccgcugagcaugaaguccgacuugucagugaguucugcuggaccuaucagccaguuuaacuacaaacaguccuucucaaauccaaccugccuaauccuggccacaguaccccacaaccucacuaccauuacaaagccucugaaauauagcuacaucaauaagugcucuagauuucuuuccgaugacaggaccgaaguuccccagcuggugaacgcaaaucaauauaguccaugugucagcauugugcccucuacugucugggaggacggcgauuacuaccggaaacaguuguccccucucgaaggugggggcuggcugguggccucaggaaguacgguugcuaugacagagcaguuacagaugggcuucgggauaaccgugcaauauggaacugacaccaacagcguaugcccaaagcuggaauuugcgaaugauacaaaaaucgcaucgcagcuagguaacugugucgaguacucccucuauggcgugucugggcguggaguuuuccagaauugcaccgccgugggcguccgccagcaaagauuuguguacgacgcuuaucagaaccugguagguuacuauagcgaugacgggaacuacuacugucuuagggccugcgugucaguuccggucagugugauuuaugauaaggagacuaagacacaugcaacguuguucggcuccguggccugugaacacaucucuagcaccaugucccaguacucacggagcacucgaaguaugcugaaacgcagagacucuacauauggaccccuccagaccccugucggcugcguucuggggcuuguaaauuccagccuguuuguggaggauuguaaguugccacucggacaaucgcugugcgcuuuacccgacacaccuucaacucugaccccagccucuguggguaguguccccggcgaaaugaggcuagcauccaucgcguucaaccacccgauucagguggaucagcucaauagcucuuacuuuaaacugagcauaccuacgaacuucuccuucgggguuacccaagaguauauccagacaacuauucagaaggugaccgucgacuguaaacaguacgugugcaauggauuucaaaagugcgaacagcuuuugcgggaguauggccaguucuguucaaagaucaaccaggcucugcauggugccaaucuccgccaagaugacaguguuagaaaccuguuugcaagcgugaaaucuucccagucaaguccaauuauccccggguucggcggagacuuuaauuuaacacugcuugagccuguaagcauauccacuggcucugggucggccggaagcgcuaucgaagaucuucucuucgacaaggucaccauugccgaucccggcuacaugcaggguuacgacgauugcaugcagcaagggccagcaucagcuagggaccugaucugugcccaguauguggcgggauacaaagugcuaccuccccugauggaugucaacauggaggccgcuuauacguccagucuccugggcucuauugccgguguuggcuggacagcagggcuuagcuccuuugcugccaucccauucgcacagucaauauuuuaccguuugaauggagugggcauuacccaacagguacugucugaaaaccagaaguuaaucgcgaauaaauucaaccaggcccucggggcuaugcaaacuggauuuacaaccacuaaugaggccuuccacaaggugcaggacgcagucaacaacaaugcucaggcccugagcaaguuggcaagugaacuguccaacaccuucggcgccauuagcgcuucuaucggugauauaauccagcgguuggacccgccugagcaagaugcgcagauugaccgacucaucaaugggagacugacaacgcuaaacgccuuuguggcacagcagcugguuaggucagaguccgcugcccucagugcccaacuggcuaaagauaaggugaaugaaugcgucaaagcacagagcaagcgcucgggauucuguggccaggguacccauauugugucuuuuguugugaacgcccccaauggccuuuauuucaugcacgucggguacuauccauccaaccauaucgagguagugagcgcguacggauugugcgacgcugccaaucccacuaacuguauagcaccuguuaauggcuacuuuauuaaaacaaacaauacccggaucguggacgaauggucauauacagggaguucuuucuacgccccagagcccaucacuucccugaacaccaaguaugucgcuccucaggugacguaccaaaauauuagcacaaacuuaccgccaccccuccugggaaacucaaccggcaucgauuuucaggacgagcuugaugaguucuuuaagaauguaaguacuagcauuccuaacuucgguucccugacccagauaaauacaacucuacucgaccugaccuaugaaauguugucucugcaacagguggucaaagcauuaaacgaaagcuacaucgaucucaaggagcuggggaauuauacauacggaggcuacauuccagaagcccccagagacggucaggcguauguuaggaaagauggcgagugggugcuucuguccacguuuugaggacuaguuauaagacugacuagcccgaugggccucccaacgggcccuccuccccuccuugcaccgagauuaauaaaaaaaaaaaaaaaaaaaaaaaaaaaaaaaaaaaaaaaaaaaaaaaaaaaaaaaaaaaaaaaaugcaucccccccccccccccccccccccccccccccaaaggcucuuuucagagccaccagaauu

SEQ ID NO: 14906 - protein, 1255 aa, Artificial Sequence
  SARS-CoV__P59594.1 spike protein (1-1255)
MFIFLLFLTLTSGSDLDRCTTFDDVQAPNYTQHTSSMRGVYYPDEIFRSDTLYLTQDLFLPFYSNVTGFHTINHTFGNPVIPFKDGIYFAATEKSNVVRGWVFGSTMNNKSQSVIIINNSTNVVIRACNFELCDNPFFAVSKPMGTQTHTMIFDNAFNCTFEYISDAFSLDVSEKSGNFKHLREFVFKNKDGFLYVYKGYQPIDVVRDLPSGFNTLKPIFKLPLGINITNFRAILTAFSPAQDIWGTSAAAYFVGYLKPTTFMLKYDENGTITDAVDCSQNPLAELKCSVKSFEIDKGIYQTSNFRVVPSGDVVRFPNITNLCPFGEVFNATKFPSVYAWERKKISNCVADYSVLYNSTFFSTFKCYGVSATKLNDLCFSNVYADSFVVKGDDVRQIAPGQTGVIADYNYKLPDDFMGCVLAWNTRNIDATSTGNYNYKYRYLRHGKLRPFERDISNVPFSPDGKPCTPPALNCYWPLNDYGFYTTTGIGYQPYRVVVLSFELLNAPATVCGPKLSTDLIKNQCVNFNFNGLTGTGVLTPSSKRFQPFQQFGRDVSDFTDSVRDPKTSEILDISPCSFGGVSVITPGTNASSEVAVLYQDVNCTDVSTAIHADQLTPAWRIYSTGNNVFQTQAGCLIGAEHVDTSYECDIPIGAGICASYHTVSLLRSTSQKSIVAYTMSLGADSSIAYSNNTIAIPTNFSISITTEVMPVSMAKTSVDCNMYICGDSTECANLLLQYGSFCTQLNRALSGIAAEQDRNTREVFAQVKQMYKTPTLKYFGGFNFSQILPDPLKPTKRSFIEDLLFNKVTLADAGFMKQYGECLGDINARDLICAQKFNGLTVLPPLLTDDMIAAYTAALVSGTATAGWTFGAGAALQIPFAMQMAYRFNGIGVTQNVLYENQKQIANQFNKAISQIQESLTTTSTALGKLQDVVNQNAQALNTLVKQLSSNFGAISSVLNDILSRLDKVEAEVQIDRLITGRLQSLQTYVTQQLIRAAEIRASANLAATKMSECVLGQSKRVDFCGKGYHLMSFPQAAPHGVVFLHVTYVPSQERNFTTAPAICHEGKAYFPREGVFVFNGTSWFITQRNFFSPQIITTDNTFVSGNCDVVIGIINNTVYDPLQPELDSFKEELDKYFKNHTSPDVDLGDISGINASVVNIQKEIDRLNEVAKNLNESLIDLQELGKYEQYIKWPWYVWLGFIAGLIAIVMVTILLCCMTSCCSCLKGACSCGSCCKFDEDDSEPVLKGVKLHYT

SEQ ID NO: 14907 - protein, 1255 aa, Artificial Sequence
  SARS-CoV__P59594.1 spike protein (1-1255)(K968P_V969P)
MFIFLLFLTLTSGSDLDRCTTFDDVQAPNYTQHTSSMRGVYYPDEIFRSDTLYLTQDLFLPFYSNVTGFHTINHTFGNPVIPFKDGIYFAATEKSNVVRGWVFGSTMNNKSQSVIIINNSTNVVIRACNFELCDNPFFAVSKPMGTQTHTMIFDNAFNCTFEYISDAFSLDVSEKSGNFKHLREFVFKNKDGFLYVYKGYQPIDVVRDLPSGFNTLKPIFKLPLGINITNFRAILTAFSPAQDIWGTSAAAYFVGYLKPTTFMLKYDENGTITDAVDCSQNPLAELKCSVKSFEIDKGIYQTSNFRVVPSGDVVRFPNITNLCPFGEVFNATKFPSVYAWERKKISNCVADYSVLYNSTFFSTFKCYGVSATKLNDLCFSNVYADSFVVKGDDVRQIAPGQTGVIADYNYKLPDDFMGCVLAWNTRNIDATSTGNYNYKYRYLRHGKLRPFERDISNVPFSPDGKPCTPPALNCYWPLNDYGFYTTTGIGYQPYRVVVLSFELLNAPATVCGPKLSTDLIKNQCVNFNFNGLTGTGVLTPSSKRFQPFQQFGRDVSDFTDSVRDPKTSEILDISPCSFGGVSVITPGTNASSEVAVLYQDVNCTDVSTAIHADQLTPAWRIYSTGNNVFQTQAGCLIGAEHVDTSYECDIPIGAGICASYHTVSLLRSTSQKSIVAYTMSLGADSSIAYSNNTIAIPTNFSISITTEVMPVSMAKTSVDCNMYICGDSTECANLLLQYGSFCTQLNRALSGIAAEQDRNTREVFAQVKQMYKTPTLKYFGGFNFSQILPDPLKPTKRSFIEDLLFNKVTLADAGFMKQYGECLGDINARDLICAQKFNGLTVLPPLLTDDMIAAYTAALVSGTATAGWTFGAGAALQIPFAMQMAYRFNGIGVTQNVLYENQKQIANQFNKAISQIQESLTTTSTALGKLQDVVNQNAQALNTLVKQLSSNFGAISSVLNDILSRLDPPEAEVQIDRLITGRLQSLQTYVTQQLIRAAEIRASANLAATKMSECVLGQSKRVDFCGKGYHLMSFPQAAPHGVVFLHVTYVPSQERNFTTAPAICHEGKAYFPREGVFVFNGTSWFITQRNFFSPQIITTDNTFVSGNCDVVIGIINNTVYDPLQPELDSFKEELDKYFKNHTSPDVDLGDISGINASVVNIQKEIDRLNEVAKNLNESLIDLQELGKYEQYIKWPWYVWLGFIAGLIAIVMVTILLCCMTSCCSCLKGACSCGSCCKFDEDDSEPVLKGVKLHYT

SEQ ID NO: 14908 - protein, 526 aa, Artificial Sequence
  SARS-CoV__P59594.1 spike protein (1-17_747-1255)
MFIFLLFLTLTSGSDLDRALSGIAAEQDRNTREVFAQVKQMYKTPTLKYFGGFNFSQILPDPLKPTKRSFIEDLLFNKVTLADAGFMKQYGECLGDINARDLICAQKFNGLTVLPPLLTDDMIAAYTAALVSGTATAGWTFGAGAALQIPFAMQMAYRFNGIGVTQNVLYENQKQIANQFNKAISQIQESLTTTSTALGKLQDVVNQNAQALNTLVKQLSSNFGAISSVLNDILSRLDKVEAEVQIDRLITGRLQSLQTYVTQQLIRAAEIRASANLAATKMSECVLGQSKRVDFCGKGYHLMSFPQAAPHGVVFLHVTYVPSQERNFTTAPAICHEGKAYFPREGVFVFNGTSWFITQRNFFSPQIITTDNTFVSGNCDVVIGIINNTVYDPLQPELDSFKEELDKYFKNHTSPDVDLGDISGINASVVNIQKEIDRLNEVAKNLNESLIDLQELGKYEQYIKWPWYVWLGFIAGLIAIVMVTILLCCMTSCCSCLKGACSCGSCCKFDEDDSEPVLKGVKLHYT

SEQ ID NO: 14909 - protein, 1255 aa, Artificial Sequence
  SARS-CoV/Tor2__NP_828851.1 spike protein (1-1255)
MFIFLLFLTLTSGSDLDRCTTFDDVQAPNYTQHTSSMRGVYYPDEIFRSDTLYLTQDLFLPFYSNVTGFHTINHTFGNPVIPFKDGIYFAATEKSNVVRGWVFGSTMNNKSQSVIIINNSTNVVIRACNFELCDNPFFAVSKPMGTQTHTMIFDNAFNCTFEYISDAFSLDVSEKSGNFKHLREFVFKNKDGFLYVYKGYQPIDVVRDLPSGFNTLKPIFKLPLGINITNFRAILTAFSPAQDIWGTSAAAYFVGYLKPTTFMLKYDENGTITDAVDCSQNPLAELKCSVKSFEIDKGIYQTSNFRVVPSGDVVRFPNITNLCPFGEVFNATKFPSVYAWERKKISNCVADYSVLYNSTFFSTFKCYGVSATKLNDLCFSNVYADSFVVKGDDVRQIAPGQTGVIADYNYKLPDDFMGCVLAWNTRNIDATSTGNYNYKYRYLRHGKLRPFERDISNVPFSPDGKPCTPPALNCYWPLNDYGFYTTTGIGYQPYRVVVLSFELLNAPATVCGPKLSTDLIKNQCVNFNFNGLTGTGVLTPSSKRFQPFQQFGRDVSDFTDSVRDPKTSEILDISPCAFGGVSVITPGTNASSEVAVLYQDVNCTDVSTAIHADQLTPAWRIYSTGNNVFQTQAGCLIGAEHVDTSYECDIPIGAGICASYHTVSLLRSTSQKSIVAYTMSLGADSSIAYSNNTIAIPTNFSISITTEVMPVSMAKTSVDCNMYICGDSTECANLLLQYGSFCTQLNRALSGIAAEQDRNTREVFAQVKQMYKTPTLKYFGGFNFSQILPDPLKPTKRSFIEDLLFNKVTLADAGFMKQYGECLGDINARDLICAQKFNGLTVLPPLLTDDMIAAYTAALVSGTATAGWTFGAGAALQIPFAMQMAYRFNGIGVTQNVLYENQKQIANQFNKAISQIQESLTTTSTALGKLQDVVNQNAQALNTLVKQLSSNFGAISSVLNDILSRLDKVEAEVQIDRLITGRLQSLQTYVTQQLIRAAEIRASANLAATKMSECVLGQSKRVDFCGKGYHLMSFPQAAPHGVVFLHVTYVPSQERNFTTAPAICHEGKAYFPREGVFVFNGTSWFITQRNFFSPQIITTDNTFVSGNCDVVIGIINNTVYDPLQPELDSFKEELDKYFKNHTSPDVDLGDISGINASVVNIQKEIDRLNEVAKNLNESLIDLQELGKYEQYIKWPWYVWLGFIAGLIAIVMVTILLCCMTSCCSCLKGACSCGSCCKFDEDDSEPVLKGVKLHYT

SEQ ID NO: 14910 - protein, 1255 aa, Artificial Sequence
  SARS-CoV/Tor2__NP_828851.1 spike protein (1-1255)(K968P_V969P)
MFIFLLFLTLTSGSDLDRCTTFDDVQAPNYTQHTSSMRGVYYPDEIFRSDTLYLTQDLFLPFYSNVTGFHTINHTFGNPVIPFKDGIYFAATEKSNVVRGWVFGSTMNNKSQSVIIINNSTNVVIRACNFELCDNPFFAVSKPMGTQTHTMIFDNAFNCTFEYISDAFSLDVSEKSGNFKHLREFVFKNKDGFLYVYKGYQPIDVVRDLPSGFNTLKPIFKLPLGINITNFRAILTAFSPAQDIWGTSAAAYFVGYLKPTTFMLKYDENGTITDAVDCSQNPLAELKCSVKSFEIDKGIYQTSNFRVVPSGDVVRFPNITNLCPFGEVFNATKFPSVYAWERKKISNCVADYSVLYNSTFFSTFKCYGVSATKLNDLCFSNVYADSFVVKGDDVRQIAPGQTGVIADYNYKLPDDFMGCVLAWNTRNIDATSTGNYNYKYRYLRHGKLRPFERDISNVPFSPDGKPCTPPALNCYWPLNDYGFYTTTGIGYQPYRVVVLSFELLNAPATVCGPKLSTDLIKNQCVNFNFNGLTGTGVLTPSSKRFQPFQQFGRDVSDFTDSVRDPKTSEILDISPCAFGGVSVITPGTNASSEVAVLYQDVNCTDVSTAIHADQLTPAWRIYSTGNNVFQTQAGCLIGAEHVDTSYECDIPIGAGICASYHTVSLLRSTSQKSIVAYTMSLGADSSIAYSNNTIAIPTNFSISITTEVMPVSMAKTSVDCNMYICGDSTECANLLLQYGSFCTQLNRALSGIAAEQDRNTREVFAQVKQMYKTPTLKYFGGFNFSQILPDPLKPTKRSFIEDLLFNKVTLADAGFMKQYGECLGDINARDLICAQKFNGLTVLPPLLTDDMIAAYTAALVSGTATAGWTFGAGAALQIPFAMQMAYRFNGIGVTQNVLYENQKQIANQFNKAISQIQESLTTTSTALGKLQDVVNQNAQALNTLVKQLSSNFGAISSVLNDILSRLDPPEAEVQIDRLITGRLQSLQTYVTQQLIRAAEIRASANLAATKMSECVLGQSKRVDFCGKGYHLMSFPQAAPHGVVFLHVTYVPSQERNFTTAPAICHEGKAYFPREGVFVFNGTSWFITQRNFFSPQIITTDNTFVSGNCDVVIGIINNTVYDPLQPELDSFKEELDKYFKNHTSPDVDLGDISGINASVVNIQKEIDRLNEVAKNLNESLIDLQELGKYEQYIKWPWYVWLGFIAGLIAIVMVTILLCCMTSCCSCLKGACSCGSCCKFDEDDSEPVLKGVKLHYT

SEQ ID NO: 14911 - protein, 1190 aa, Artificial Sequence
  SARS-CoV/Tor2__NP_828851.1 spike protein (variant)
MFIFLLFLTLTSGSDLDRCTTFDDVQAPNYTQHTSSMRGVYYPDEIFRSDTLYLTQDLFLPFYSNVTGFHTINHTFGNPVIPFKDGIYFAATEKSNVVRGWVFGSTMNNKSQSVIIINNSTNVVIRACNFELCDNPFFAVSKPMGTQTHTMIFDNAFNCTFEYISDAFSLDVSEKSGNFKHLREFVFKNKDGFLYVYKGYQPIDVVRDLPSGFNTLKPIFKLPLGINITNFRAILTAFSPAQDIWGTSAAAYFVGYLKPTTFMLKYDENGTITDAVDCSQNPLAELKCSVKSFEIDKGIYQTSNFRVVPSGDVVRFPNITNLCPFGEVFNATKFPSVYAWERKKISNCVADYSVLYNSTFFSTFKCYGVSATKLNDLCFSNVYADSFVVKGDDVRQIAPGQTGVIADYNYKLPDDFMGCVLAWNTRNIDATSTGNYNYKYRYLRHGKLRPFERDISNVPFSPDGKPCTPPALNCYWPLNDYGFYTTTGIGYQPYRVVVLSFELLNAPATVCGPKLSTDLIKNQCVNFNFNGLTGTGVLTPSSKRFQPFQQFGRDVSDFTDSVRDPKTSEILDISPCAFGGVSVITPGTNASSEVAVLYQDVNCTDVSTAIHADQLTPAWRIYSTGNNVFQTQAGCLIGAEHVDTSYECDIPIGAGICASYHTVSLLRSTSQKSIVAYTMSLGADSSIAYSNNTIAIPTNFSISITTEVMPVSMAKTSVDCNMYICGDSTECANLLLQYGSFCTQLNRALSGIAAEQDRNTREVFAQVKQMYKTPTLKYFGGFNFSQILPDPLKPTKRSFIEDLLFNKVTLADAGFMKQYGECLGDINARDLICAQKFNGLTVLPPLLTDDMIAAYTAALVSGTATAGWTFGAGAALQIPFAMQMAYRFNGIGVTQNVLYENQKQIANQFNKAISQIQESLTTTSTALGKLQDVVNQNAQALNTLVKQLSSNFGAISSVLNDILSRLDPPEAEVQIDRLITGRLQSLQTYVTQQLIRAAEIRASANLAATKMSECVLGQSKRVDFCGKGYHLMSFPQAAPHGVVFLHVTYVPSQERNFTTAPAICHEGKAYFPREGVFVFNGTSWFITQRNFFSPQIITTDNTFVSGNCDVVIGIINNTVYDPLQPELDSFKEELDKYFKNHTSPDVDLGDISGINASVVNIQKEIDRLNEVAKNLNESLIDLQELGKYEQ

SEQ ID NO: 14912 - protein, 1217 aa, Artificial Sequence
  SARS-CoV/Tor2__NP_828851.1 spike protein (variant)
MFIFLLFLTLTSGSDLDRCTTFDDVQAPNYTQHTSSMRGVYYPDEIFRSDTLYLTQDLFLPFYSNVTGFHTINHTFGNPVIPFKDGIYFAATEKSNVVRGWVFGSTMNNKSQSVIIINNSTNVVIRACNFELCDNPFFAVSKPMGTQTHTMIFDNAFNCTFEYISDAFSLDVSEKSGNFKHLREFVFKNKDGFLYVYKGYQPIDVVRDLPSGFNTLKPIFKLPLGINITNFRAILTAFSPAQDIWGTSAAAYFVGYLKPTTFMLKYDENGTITDAVDCSQNPLAELKCSVKSFEIDKGIYQTSNFRVVPSGDVVRFPNITNLCPFGEVFNATKFPSVYAWERKKISNCVADYSVLYNSTFFSTFKCYGVSATKLNDLCFSNVYADSFVVKGDDVRQIAPGQTGVIADYNYKLPDDFMGCVLAWNTRNIDATSTGNYNYKYRYLRHGKLRPFERDISNVPFSPDGKPCTPPALNCYWPLNDYGFYTTTGIGYQPYRVVVLSFELLNAPATVCGPKLSTDLIKNQCVNFNFNGLTGTGVLTPSSKRFQPFQQFGRDVSDFTDSVRDPKTSEILDISPCAFGGVSVITPGTNASSEVAVLYQDVNCTDVSTAIHADQLTPAWRIYSTGNNVFQTQAGCLIGAEHVDTSYECDIPIGAGICASYHTVSLLRSTSQKSIVAYTMSLGADSSIAYSNNTIAIPTNFSISITTEVMPVSMAKTSVDCNMYICGDSTECANLLLQYGSFCTQLNRALSGIAAEQDRNTREVFAQVKQMYKTPTLKYFGGFNFSQILPDPLKPTKRSFIEDLLFNKVTLADAGFMKQYGECLGDINARDLICAQKFNGLTVLPPLLTDDMIAAYTAALVSGTATAGWTFGAGAALQIPFAMQMAYRFNGIGVTQNVLYENQKQIANQFNKAISQIQESLTTTSTALGKLQDVVNQNAQALNTLVKQLSSNFGAISSVLNDILSRLDPPEAEVQIDRLITGRLQSLQTYVTQQLIRAAEIRASANLAATKMSECVLGQSKRVDFCGKGYHLMSFPQAAPHGVVFLHVTYVPSQERNFTTAPAICHEGKAYFPREGVFVFNGTSWFITQRNFFSPQIITTDNTFVSGNCDVVIGIINNTVYDPLQPELDSFKEELDKYFKNHTSPDVDLGDISGINASVVNIQKEIDRLNEVAKNLNESLIDLQELGKYEQGGYIPEAPRDGQAYVRKDGEWVLLSTF

SEQ ID NO: 14913 - protein, 1353 aa, Artificial Sequence
  HCoV/OC43__P36334.1 spike protein (1-1353)
MFLILLISLPTAFAVIGDLKCTSDNINDKDTGPPPISTDTVDVTNGLGTYYVLDRVYLNTTLFLNGYYPTSGSTYRNMALKGSVLLSRLWFKPPFLSDFINGIFAKVKNTKVIKDRVMYSEFPAITIGSTFVNTSYSVVVQPRTINSTQDGDNKLQGLLEVSVCQYNMCEYPQTICHPNLGNHRKELWHLDTGVVSCLYKRNFTYDVNADYLYFHFYQEGGTFYAYFTDTGVVTKFLFNVYLGMALSHYYVMPLTCNSKLTLEYWVTPLTSRQYLLAFNQDGIIFNAEDCMSDFMSEIKCKTQSIAPPTGVYELNGYTVQPIADVYRRKPNLPNCNIEAWLNDKSVPSPLNWERKTFSNCNFNMSSLMSFIQADSFTCNNIDAAKIYGMCFSSITIDKFAIPNGRKVDLQLGNLGYLQSFNYRIDTTATSCQLYYNLPAANVSVSRFNPSTWNKRFGFIEDSVFKPRPAGVLTNHDVVYAQHCFKAPKNFCPCKLNGSCVGSGPGKNNGIGTCPAGTNYLTCDNLCTPDPITFTGTYKCPQTKSLVGIGEHCSGLAVKSDYCGGNSCTCRPQAFLGWSADSCLQGDKCNIFANFILHDVNSGLTCSTDLQKANTDIILGVCVNYDLYGILGQGIFVEVNATYYNSWQNLLYDSNGNLYGFRDYIINRTFMIRSCYSGRVSAAFHANSSEPALLFRNIKCNYVFNNSLTRQLQPINYFDSYLGCVVNAYNSTAISVQTCDLTVGSGYCVDYSKNRRSRGAITTGYRFTNFEPFTVNSVNDSLEPVGGLYEIQIPSEFTIGNMVEFIQTSSPKVTIDCAAFVCGDYAACKSQLVEYGSFCDNINAILTEVNELLDTTQLQVANSLMNGVTLSTKLKDGVNFNVDDINFSPVLGCLGSECSKASSRSAIEDLLFDKVKLSDVGFVEAYNNCTGGAEIRDLICVQSYKGIKVLPPLLSENQISGYTLAATSASLFPPWTAAAGVPFYLNVQYRINGLGVTMDVLSQNQKLIANAFNNALYAIQEGFDATNSALVKIQAVVNANAEALNNLLQQLSNRFGAISASLQEILSRLDALEAEAQIDRLINGRLTALNAYVSQQLSDSTLVKFSAAQAMEKVNECVKSQSSRINFCGNGNHIISLVQNAPYGLYFIHFSYVPTKYVTARVSPGLCIAGDRGIAPKSGYFVNVNNTWMYTGSGYYYPEPITENNVVVMSTCAVNYTKAPYVMLNTSIPNLPDFKEELDQWFKNQTSVAPDLSLDYINVTFLDLQVEMNRLQEAIKVLNQSYINLKDIGTYEYYVKWPWYVWLLICLAGVAMLVLLFFICCCTGCGTSCFKKCGGCCDDYTGYQELVIKTSHDD

SEQ ID NO: 14914 - protein, 1353 aa, Artificial Sequence
  HCoV/OC43__P36334.1 spike protein (1-1353)(A1070P_L1071P)
MFLILLISLPTAFAVIGDLKCTSDNINDKDTGPPPISTDTVDVTNGLGTYYVLDRVYLNTTLFLNGYYPTSGSTYRNMALKGSVLLSRLWFKPPFLSDFINGIFAKVKNTKVIKDRVMYSEFPAITIGSTFVNTSYSVVVQPRTINSTQDGDNKLQGLLEVSVCQYNMCEYPQTICHPNLGNHRKELWHLDTGVVSCLYKRNFTYDVNADYLYFHFYQEGGTFYAYFTDTGVVTKFLFNVYLGMALSHYYVMPLTCNSKLTLEYWVTPLTSRQYLLAFNQDGIIFNAEDCMSDFMSEIKCKTQSIAPPTGVYELNGYTVQPIADVYRRKPNLPNCNIEAWLNDKSVPSPLNWERKTFSNCNFNMSSLMSFIQADSFTCNNIDAAKIYGMCFSSITIDKFAIPNGRKVDLQLGNLGYLQSFNYRIDTTATSCQLYYNLPAANVSVSRFNPSTWNKRFGFIEDSVFKPRPAGVLTNHDVVYAQHCFKAPKNFCPCKLNGSCVGSGPGKNNGIGTCPAGTNYLTCDNLCTPDPITFTGTYKCPQTKSLVGIGEHCSGLAVKSDYCGGNSCTCRPQAFLGWSADSCLQGDKCNIFANFILHDVNSGLTCSTDLQKANTDIILGVCVNYDLYGILGQGIFVEVNATYYNSWQNLLYDSNGNLYGFRDYIINRTFMIRSCYSGRVSAAFHANSSEPALLFRNIKCNYVFNNSLTRQLQPINYFDSYLGCVVNAYNSTAISVQTCDLTVGSGYCVDYSKNRRSRGAITTGYRFTNFEPFTVNSVNDSLEPVGGLYEIQIPSEFTIGNMVEFIQTSSPKVTIDCAAFVCGDYAACKSQLVEYGSFCDNINAILTEVNELLDTTQLQVANSLMNGVTLSTKLKDGVNFNVDDINFSPVLGCLGSECSKASSRSAIEDLLFDKVKLSDVGFVEAYNNCTGGAEIRDLICVQSYKGIKVLPPLLSENQISGYTLAATSASLFPPWTAAAGVPFYLNVQYRINGLGVTMDVLSQNQKLIANAFNNALYAIQEGFDATNSALVKIQAVVNANAEALNNLLQQLSNRFGAISASLQEILSRLDPPEAEAQIDRLINGRLTALNAYVSQQLSDSTLVKFSAAQAMEKVNECVKSQSSRINFCGNGNHIISLVQNAPYGLYFIHFSYVPTKYVTARVSPGLCIAGDRGIAPKSGYFVNVNNTWMYTGSGYYYPEPITENNVVVMSTCAVNYTKAPYVMLNTSIPNLPDFKEELDQWFKNQTSVAPDLSLDYINVTFLDLQVEMNRLQEAIKVLNQSYINLKDIGTYEYYVKWPWYVWLLICLAGVAMLVLLFFICCCTGCGTSCFKKCGGCCDDYTGYQELVIKTSHDD

SEQ ID NO: 14915 - protein, 1362 aa, Artificial Sequence
  HCoV/OC43/1783A_10__AIL49484.1 spike protein (1-1362)
MFLILLISLPTAFAVIGDLKCPLDSRTGSLNNIDTGPPSISTATVDVTNGLGTYYVLDRVYLNTTLFLNGYYPTSGSTYRNMALKGTDKLSTLWFKPPFLSDFINGIFAKVKNTKVFKDGVMYSEFPAITIGSTFVNTSYSVVVQPRTINSTQDGVNKLQGLLEVSVCQYNMCEYPHTICHPKLGNHFKELWHMDTGVVSCLYKRNFTYDVNATYLYFHFYQEGGTFYAYFTDTGVVTKFLFNVYLGMALSHYYVMPLTCISRRDIGFTLEYWVTPLTSRQYLLAFNQDGIIFNAVDCMSDFMSEIKCKTQSIAPPTGVYELNGYTVQPIADVYRRKPDLPNCNIEAWLNDKSVPSPLNWERKTFSNCNFNMSSLMSFIQADSFTCNNIDAAKIYGMCFSSITIDKFAIPNGRKVDLQLGNLGYLQSFNYRIDTTATSCQLYYNLPAANVSVSRFNPSTWNKRFGFIENSVFKPQPAGVLTNHDVVYAQHCFKAPKNFCPCKLNSSLCVGSGPGKNNGIGTCPAGTNYLTCHNLCNPDPITFTGPYKCPQTKSLVGIGEHCSGLAVKSDYCGGNPCTCQPQAFLGWSADSCLQGDKCNIFANLILHDVNSGLTCSTDLQKANTDIKLGVCVNYDLYGISGQGIFVEVNATYYNSWQNLLYDSNGNLYGFRDYITNRTFMIRSCYSGRVSAAFHANSSEPALLFRNIKCNYVFNNSLIRQLQPINYFDSYLGCVVNAYNSTAISVQTCDLTVGSGYCVDYSKNRRSRRAITTGYRFTNFEPFTVNSVNDSLEPVGGLYEIQIPSEFTIGNMEEFIQTSSPKVTIDCAAFVCGDYAACKSQLVEYGSFCDNINAILTEVNELLDTTQLQVANSLMNGVTLSTKLKDGVNFNVDDINFSSVLGCLGSECSKASSRSAIEDLLFDKVKLSDVGFVAAYNNCTGGAEIRDLICVQSYKGIKVLPPLLSENQISGYTLAATSASLFPPWTAAAGVPFYLNVQYRINGLGVTMDVLSQNQKLIANAFNNALDAIQEGFDATNSALVKIQAVVNANAEALNNLLQQLSNRFGAISSSLQEILSRLDALEAEAQIDRLINGRLTALNAYVSQQLSDSTLVKFSAAQAMEKVNECVKSQSSRINFCGNGNHIISLVQNAPYGLYFIHFSYVPTKYVTAKVSPGLCIAGDRGIAPKSGYFVNVNNTWMYTGSGYYYPEPITENNVVVMSTCAVNYTKAPYVMLNTSTPNLPDFREELDQWFKNQTSVAPDLSLDYINVTFLDLQVEMNRLQEAIKVLNQSYINLKDIGTYEYYVKWPWYVWLLIGLAGVAMLVLLFFICCCTGCGTSCFKKCGGCCDDYTGYQELVIKTSHDD

SEQ ID NO: 14916 - protein, 1362 aa, Artificial Sequence
  HCoV/OC43/1783A_10__AIL49484.1 spike protein (1-1362)(A1079P_L1080P)
MFLILLISLPTAFAVIGDLKCPLDSRTGSLNNIDTGPPSISTATVDVTNGLGTYYVLDRVYLNTTLFLNGYYPTSGSTYRNMALKGTDKLSTLWFKPPFLSDFINGIFAKVKNTKVFKDGVMYSEFPAITIGSTFVNTSYSVVVQPRTINSTQDGVNKLQGLLEVSVCQYNMCEYPHTICHPKLGNHFKELWHMDTGVVSCLYKRNFTYDVNATYLYFHFYQEGGTFYAYFTDTGVVTKFLFNVYLGMALSHYYVMPLTCISRRDIGFTLEYWVTPLTSRQYLLAFNQDGIIFNAVDCMSDFMSEIKCKTQSIAPPTGVYELNGYTVQPIADVYRRKPDLPNCNIEAWLNDKSVPSPLNWERKTFSNCNFNMSSLMSFIQADSFTCNNIDAAKIYGMCFSSITIDKFAIPNGRKVDLQLGNLGYLQSFNYRIDTTATSCQLYYNLPAANVSVSRFNPSTWNKRFGFIENSVFKPQPAGVLTNHDVVYAQHCFKAPKNFCPCKLNSSLCVGSGPGKNNGIGTCPAGTNYLTCHNLCNPDPITFTGPYKCPQTKSLVGIGEHCSGLAVKSDYCGGNPCTCQPQAFLGWSADSCLQGDKCNIFANLILHDVNSGLTCSTDLQKANTDIKLGVCVNYDLYGISGQGIFVEVNATYYNSWQNLLYDSNGNLYGFRDYITNRTFMIRSCYSGRVSAAFHANSSEPALLFRNIKCNYVFNNSLIRQLQPINYFDSYLGCVVNAYNSTAISVQTCDLTVGSGYCVDYSKNRRSRRAITTGYRFTNFEPFTVNSVNDSLEPVGGLYEIQIPSEFTIGNMEEFIQTSSPKVTIDCAAFVCGDYAACKSQLVEYGSFCDNINAILTEVNELLDTTQLQVANSLMNGVTLSTKLKDGVNFNVDDINFSSVLGCLGSECSKASSRSAIEDLLFDKVKLSDVGFVAAYNNCTGGAEIRDLICVQSYKGIKVLPPLLSENQISGYTLAATSASLFPPWTAAAGVPFYLNVQYRINGLGVTMDVLSQNQKLIANAFNNALDAIQEGFDATNSALVKIQAVVNANAEALNNLLQQLSNRFGAISSSLQEILSRLDPPEAEAQIDRLINGRLTALNAYVSQQLSDSTLVKFSAAQAMEKVNECVKSQSSRINFCGNGNHIISLVQNAPYGLYFIHFSYVPTKYVTAKVSPGLCIAGDRGIAPKSGYFVNVNNTWMYTGSGYYYPEPITENNVVVMSTCAVNYTKAPYVMLNTSTPNLPDFREELDQWFKNQTSVAPDLSLDYINVTFLDLQVEMNRLQEAIKVLNQSYINLKDIGTYEYYVKWPWYVWLLIGLAGVAMLVLLFFICCCTGCGTSCFKKCGGCCDDYTGYQELVIKTSHDD

SEQ ID NO: 14917 - protein, 1287 aa, Artificial Sequence
  HCoV/OC43/1783A_10__AIL49484.1 spike protein (variant)
MFLILLISLPTAFAVIGDLKCPLDSRTGSLNNIDTGPPSISTATVDVTNGLGTYYVLDRVYLNTTLFLNGYYPTSGSTYRNMALKGTDKLSTLWFKPPFLSDFINGIFAKVKNTKVFKDGVMYSEFPAITIGSTFVNTSYSVVVQPRTINSTQDGVNKLQGLLEVSVCQYNMCEYPHTICHPKLGNHFKELWHMDTGVVSCLYKRNFTYDVNATYLYFHFYQEGGTFYAYFTDTGVVTKFLFNVYLGMALSHYYVMPLTCISRRDIGFTLEYWVTPLTSRQYLLAFNQDGIIFNAVDCMSDFMSEIKCKTQSIAPPTGVYELNGYTVQPIADVYRRKPDLPNCNIEAWLNDKSVPSPLNWERKTFSNCNFNMSSLMSFIQADSFTCNNIDAAKIYGMCFSSITIDKFAIPNGRKVDLQLGNLGYLQSFNYRIDTTATSCQLYYNLPAANVSVSRFNPSTWNKRFGFIENSVFKPQPAGVLTNHDVVYAQHCFKAPKNFCPCKLNSSLCVGSGPGKNNGIGTCPAGTNYLTCHNLCNPDPITFTGPYKCPQTKSLVGIGEHCSGLAVKSDYCGGNPCTCQPQAFLGWSADSCLQGDKCNIFANLILHDVNSGLTCSTDLQKANTDIKLGVCVNYDLYGISGQGIFVEVNATYYNSWQNLLYDSNGNLYGFRDYITNRTFMIRSCYSGRVSAAFHANSSEPALLFRNIKCNYVFNNSLIRQLQPINYFDSYLGCVVNAYNSTAISVQTCDLTVGSGYCVDYSKNGGSGSAITTGYRFTNFEPFTVNSVNDSLEPVGGLYEIQIPSEFTIGNMEEFIQTSSPKVTIDCAAFVCGDYAACKSQLVEYGSFCDNINAILTEVNELLDTTQLQVANSLMNGVTLSTKLKDGVNFNVDDINFSSVLGCLGSECSKASSRSAIEDLLFDKVKLSDVGFVAAYNNCTGGAEIRDLICVQSYKGIKVLPPLLSENQISGYTLAATSASLFPPWTAAAGVPFYLNVQYRINGLGVTMDVLSQNQKLIANAFNNALDAIQEGFDATNSALVKIQAVVNANAEALNNLLQQLSNRFGAISSSLQEILSRLDPPEAEAQIDRLINGRLTALNAYVSQQLSDSTLVKFSAAQAMEKVNECVKSQSSRINFCGNGNHIISLVQNAPYGLYFIHFSYVPTKYVTAKVSPGLCIAGDRGIAPKSGYFVNVNNTWMYTGSGYYYPEPITENNVVVMSTCAVNYTKAPYVMLNTSTPNLPDFREELDQWFKNQTSVAPDLSLDYINVTFLDLQVEMNRLQEAIKVLN

SEQ ID NO: 14918 - protein, 1314 aa, Artificial Sequence
  HCoV/OC43/1783A_10__AIL49484.1 spike protein (variant)
MFLILLISLPTAFAVIGDLKCPLDSRTGSLNNIDTGPPSISTATVDVTNGLGTYYVLDRVYLNTTLFLNGYYPTSGSTYRNMALKGTDKLSTLWFKPPFLSDFINGIFAKVKNTKVFKDGVMYSEFPAITIGSTFVNTSYSVVVQPRTINSTQDGVNKLQGLLEVSVCQYNMCEYPHTICHPKLGNHFKELWHMDTGVVSCLYKRNFTYDVNATYLYFHFYQEGGTFYAYFTDTGVVTKFLFNVYLGMALSHYYVMPLTCISRRDIGFTLEYWVTPLTSRQYLLAFNQDGIIFNAVDCMSDFMSEIKCKTQSIAPPTGVYELNGYTVQPIADVYRRKPDLPNCNIEAWLNDKSVPSPLNWERKTFSNCNFNMSSLMSFIQADSFTCNNIDAAKIYGMCFSSITIDKFAIPNGRKVDLQLGNLGYLQSFNYRIDTTATSCQLYYNLPAANVSVSRFNPSTWNKRFGFIENSVFKPQPAGVLTNHDVVYAQHCFKAPKNFCPCKLNSSLCVGSGPGKNNGIGTCPAGTNYLTCHNLCNPDPITFTGPYKCPQTKSLVGIGEHCSGLAVKSDYCGGNPCTCQPQAFLGWSADSCLQGDKCNIFANLILHDVNSGLTCSTDLQKANTDIKLGVCVNYDLYGISGQGIFVEVNATYYNSWQNLLYDSNGNLYGFRDYITNRTFMIRSCYSGRVSAAFHANSSEPALLFRNIKCNYVFNNSLIRQLQPINYFDSYLGCVVNAYNSTAISVQTCDLTVGSGYCVDYSKNGGSGSAITTGYRFTNFEPFTVNSVNDSLEPVGGLYEIQIPSEFTIGNMEEFIQTSSPKVTIDCAAFVCGDYAACKSQLVEYGSFCDNINAILTEVNELLDTTQLQVANSLMNGVTLSTKLKDGVNFNVDDINFSSVLGCLGSECSKASSRSAIEDLLFDKVKLSDVGFVAAYNNCTGGAEIRDLICVQSYKGIKVLPPLLSENQISGYTLAATSASLFPPWTAAAGVPFYLNVQYRINGLGVTMDVLSQNQKLIANAFNNALDAIQEGFDATNSALVKIQAVVNANAEALNNLLQQLSNRFGAISSSLQEILSRLDPPEAEAQIDRLINGRLTALNAYVSQQLSDSTLVKFSAAQAMEKVNECVKSQSSRINFCGNGNHIISLVQNAPYGLYFIHFSYVPTKYVTAKVSPGLCIAGDRGIAPKSGYFVNVNNTWMYTGSGYYYPEPITENNVVVMSTCAVNYTKAPYVMLNTSTPNLPDFREELDQWFKNQTSVAPDLSLDYINVTFLDLQVEMNRLQEAIKVLNGGYIPEAPRDGQAYVRKDGEWVLLSTF

SEQ ID NO: 14919 - protein, 1351 aa, Artificial Sequence
  HCoV/HKU1/N5__Q0ZME7.1 spike protein (1-1351)
MFLIIFILPTTLAVIGDFNCTNSFINDYNKTIPRISEDVVDVSLGLGTYYVLNRVYLNTTLLFTGYFPKSGANFRDLALKGSIYLSTLWYKPPFLSDFNNGIFSKVKNTKLYVNNTLYSEFSTIVIGSVFVNTSYTIVVQPHNGILEITACQYTMCEYPHTVCKSKGSIRNESWHIDSSEPLCLFKKNFTYNVSADWLYFHFYQERGVFYAYYADVGMPTTFLFSLYLGTILSHYYVMPLTCNAISSNTDNETLEYWVTPLSRRQYLLNFDEHGVITNAVDCSSSFLSEIQCKTQSFAPNTGVYDLSGFTVKPVATVYRRIPNLPDCDIDNWLNNVSVPSPLNWERRIFSNCNFNLSTLLRLVHVDSFSCNNLDKSKIFGSCFNSITVDKFAIPNRRRDDLQLGSSGFLQSSNYKIDISSSSCQLYYSLPLVNVTINNFNPSSWNRRYGFGSFNLSSYDVVYSDHCFSVNSDFCPCADPSVVNSCAKSKPPSAICPAGTKYRHCDLDTTLYVKNWCRCSCLPDPISTYSPNTCPQKKVVVGIGEHCPGLGINEEKCGTQLNHSSCFCSPDAFLGWSFDSCISNNRCNIFSNFIFNGINSGTTCSNDLLYSNTEISTGVCVNYDLYGITGQGIFKEVSAAYYNNWQNLLYDSNGNIIGFKDFLTNKTYTILPCYSGRVSAAFYQNSSSPALLYRNLKCSYVLNNISFISQPFYFDSYLGCVLNAVNLTSYSVSSCDLRMGSGFCIDYALPSSRRKRRGISSPYRFVTFEPFNVSFVNDSVETVGGLFEIQIPTNFTIAGHEEFIQTSSPKVTIDCSAFVCSNYAACHDLLSEYGTFCDNINSILNEVNDLLDITQLQVANALMQGVTLSSNLNTNLHSDVDNIDFKSLLGCLGSQCGSSSRSLLEDLLFNKVKLSDVGFVEAYNNCTGGSEIRDLLCVQSFNGIKVLPPILSETQISGYTTAATVAAMFPPWSAAAGVPFSLNVQYRINGLGVTMDVLNKNQKLIANAFNKALLSIQNGFTATNSALAKIQSVVNANAQALNSLLQQLFNKFGAISSSLQEILSRLDNLEAQVQIDRLINGRLTALNAYVSQQLSDITLIKAGASRAIEKVNECVKSQSPRINFCGNGNHILSLVQNAPYGLLFIHFSYKPTSFKTVLVSPGLCLSGDRGIAPKQGYFIKQNDSWMFTGSSYYYPEPISDKNVVFMNSCSVNFTKAPFIYLNNSIPNLSDFEAELSLWFKNHTSIAPNLTFNSHINATFLDLYYEMNVIQESIKSLNSSFINLKEIGTYEMYVKWPWYIWLLIVILFIIFLMILFFICCCTGCGSACFSKCHNCCDEYGGHNDFVIKASHDD

SEQ ID NO: 14920 - protein, 1351 aa, Artificial Sequence
  HCoV/HKU1/N5__Q0ZME7.1 spike protein (1-1351)(N1067P_L1068P)
MFLIIFILPTTLAVIGDFNCTNSFINDYNKTIPRISEDVVDVSLGLGTYYVLNRVYLNTTLLFTGYFPKSGANFRDLALKGSIYLSTLWYKPPFLSDFNNGIFSKVKNTKLYVNNTLYSEFSTIVIGSVFVNTSYTIVVQPHNGILEITACQYTMCEYPHTVCKSKGSIRNESWHIDSSEPLCLFKKNFTYNVSADWLYFHFYQERGVFYAYYADVGMPTTFLFSLYLGTILSHYYVMPLTCNAISSNTDNETLEYWVTPLSRRQYLLNFDEHGVITNAVDCSSSFLSEIQCKTQSFAPNTGVYDLSGFTVKPVATVYRRIPNLPDCDIDNWLNNVSVPSPLNWERRIFSNCNFNLSTLLRLVHVDSFSCNNLDKSKIFGSCFNSITVDKFAIPNRRRDDLQLGSSGFLQSSNYKIDISSSSCQLYYSLPLVNVTINNFNPSSWNRRYGFGSFNLSSYDVVYSDHCFSVNSDFCPCADPSVVNSCAKSKPPSAICPAGTKYRHCDLDTTLYVKNWCRCSCLPDPISTYSPNTCPQKKVVVGIGEHCPGLGINEEKCGTQLNHSSCFCSPDAFLGWSFDSCISNNRCNIFSNFIFNGINSGTTCSNDLLYSNTEISTGVCVNYDLYGITGQGIFKEVSAAYYNNWQNLLYDSNGNIIGFKDFLTNKTYTILPCYSGRVSAAFYQNSSSPALLYRNLKCSYVLNNISFISQPFYFDSYLGCVLNAVNLTSYSVSSCDLRMGSGFCIDYALPSSRRKRRGISSPYRFVTFEPFNVSFVNDSVETVGGLFEIQIPTNFTIAGHEEFIQTSSPKVTIDCSAFVCSNYAACHDLLSEYGTFCDNINSILNEVNDLLDITQLQVANALMQGVTLSSNLNTNLHSDVDNIDFKSLLGCLGSQCGSSSRSLLEDLLFNKVKLSDVGFVEAYNNCTGGSEIRDLLCVQSFNGIKVLPPILSETQISGYTTAATVAAMFPPWSAAAGVPFSLNVQYRINGLGVTMDVLNKNQKLIANAFNKALLSIQNGFTATNSALAKIQSVVNANAQALNSLLQQLFNKFGAISSSLQEILSRLDPPEAQVQIDRLINGRLTALNAYVSQQLSDITLIKAGASRAIEKVNECVKSQSPRINFCGNGNHILSLVQNAPYGLLFIHFSYKPTSFKTVLVSPGLCLSGDRGIAPKQGYFIKQNDSWMFTGSSYYYPEPISDKNVVFMNSCSVNFTKAPFIYLNNSIPNLSDFEAELSLWFKNHTSIAPNLTFNSHINATFLDLYYEMNVIQESIKSLNSSFINLKEIGTYEMYVKWPWYIWLLIVILFIIFLMILFFICCCTGCGSACFSKCHNCCDEYGGHNDFVIKASHDD

SEQ ID NO: 14921 - protein, 1276 aa, Artificial Sequence
  HCoV/HKU1/N5__Q0ZME7.1 spike protein (variant)
MFLIIFILPTTLAVIGDFNCTNSFINDYNKTIPRISEDVVDVSLGLGTYYVLNRVYLNTTLLFTGYFPKSGANFRDLALKGSIYLSTLWYKPPFLSDFNNGIFSKVKNTKLYVNNTLYSEFSTIVIGSVFVNTSYTIVVQPHNGILEITACQYTMCEYPHTVCKSKGSIRNESWHIDSSEPLCLFKKNFTYNVSADWLYFHFYQERGVFYAYYADVGMPTTFLFSLYLGTILSHYYVMPLTCNAISSNTDNETLEYWVTPLSRRQYLLNFDEHGVITNAVDCSSSFLSEIQCKTQSFAPNTGVYDLSGFTVKPVATVYRRIPNLPDCDIDNWLNNVSVPSPLNWERRIFSNCNFNLSTLLRLVHVDSFSCNNLDKSKIFGSCFNSITVDKFAIPNRRRDDLQLGSSGFLQSSNYKIDISSSSCQLYYSLPLVNVTINNFNPSSWNRRYGFGSFNLSSYDVVYSDHCFSVNSDFCPCADPSVVNSCAKSKPPSAICPAGTKYRHCDLDTTLYVKNWCRCSCLPDPISTYSPNTCPQKKVVVGIGEHCPGLGINEEKCGTQLNHSSCFCSPDAFLGWSFDSCISNNRCNIFSNFIFNGINSGTTCSNDLLYSNTEISTGVCVNYDLYGITGQGIFKEVSAAYYNNWQNLLYDSNGNIIGFKDFLTNKTYTILPCYSGRVSAAFYQNSSSPALLYRNLKCSYVLNNISFISQPFYFDSYLGCVLNAVNLTSYSVSSCDLRMGSGFCIDYALPSSGGSGSGISSPYRFVTFEPFNVSFVNDSVETVGGLFEIQIPTNFTIAGHEEFIQTSSPKVTIDCSAFVCSNYAACHDLLSEYGTFCDNINSILNEVNDLLDITQLQVANALMQGVTLSSNLNTNLHSDVDNIDFKSLLGCLGSQCGSSSRSLLEDLLFNKVKLSDVGFVEAYNNCTGGSEIRDLLCVQSFNGIKVLPPILSETQISGYTTAATVAAMFPPWSAAAGVPFSLNVQYRINGLGVTMDVLNKNQKLIANAFNKALLSIQNGFTATNSALAKIQSVVNANAQALNSLLQQLFNKFGAISSSLQEILSRLDPPEAQVQIDRLINGRLTALNAYVSQQLSDITLIKAGASRAIEKVNECVKSQSPRINFCGNGNHILSLVQNAPYGLLFIHFSYKPTSFKTVLVSPGLCLSGDRGIAPKQGYFIKQNDSWMFTGSSYYYPEPISDKNVVFMNSCSVNFTKAPFIYLNNSIPNLSDFEAELSLWFKNHTSIAPNLTFNSHINATFLDLYYEMNVIQESIKSLN

SEQ ID NO: 14922 - protein, 1303 aa, Artificial Sequence
  HCoV/HKU1/N5__Q0ZME7.1 spike protein (variant)
MFLIIFILPTTLAVIGDFNCTNSFINDYNKTIPRISEDVVDVSLGLGTYYVLNRVYLNTTLLFTGYFPKSGANFRDLALKGSIYLSTLWYKPPFLSDFNNGIFSKVKNTKLYVNNTLYSEFSTIVIGSVFVNTSYTIVVQPHNGILEITACQYTMCEYPHTVCKSKGSIRNESWHIDSSEPLCLFKKNFTYNVSADWLYFHFYQERGVFYAYYADVGMPTTFLFSLYLGTILSHYYVMPLTCNAISSNTDNETLEYWVTPLSRRQYLLNFDEHGVITNAVDCSSSFLSEIQCKTQSFAPNTGVYDLSGFTVKPVATVYRRIPNLPDCDIDNWLNNVSVPSPLNWERRIFSNCNFNLSTLLRLVHVDSFSCNNLDKSKIFGSCFNSITVDKFAIPNRRRDDLQLGSSGFLQSSNYKIDISSSSCQLYYSLPLVNVTINNFNPSSWNRRYGFGSFNLSSYDVVYSDHCFSVNSDFCPCADPSVVNSCAKSKPPSAICPAGTKYRHCDLDTTLYVKNWCRCSCLPDPISTYSPNTCPQKKVVVGIGEHCPGLGINEEKCGTQLNHSSCFCSPDAFLGWSFDSCISNNRCNIFSNFIFNGINSGTTCSNDLLYSNTEISTGVCVNYDLYGITGQGIFKEVSAAYYNNWQNLLYDSNGNIIGFKDFLTNKTYTILPCYSGRVSAAFYQNSSSPALLYRNLKCSYVLNNISFISQPFYFDSYLGCVLNAVNLTSYSVSSCDLRMGSGFCIDYALPSSGGSGSGISSPYRFVTFEPFNVSFVNDSVETVGGLFEIQIPTNFTIAGHEEFIQTSSPKVTIDCSAFVCSNYAACHDLLSEYGTFCDNINSILNEVNDLLDITQLQVANALMQGVTLSSNLNTNLHSDVDNIDFKSLLGCLGSQCGSSSRSLLEDLLFNKVKLSDVGFVEAYNNCTGGSEIRDLLCVQSFNGIKVLPPILSETQISGYTTAATVAAMFPPWSAAAGVPFSLNVQYRINGLGVTMDVLNKNQKLIANAFNKALLSIQNGFTATNSALAKIQSVVNANAQALNSLLQQLFNKFGAISSSLQEILSRLDPPEAQVQIDRLINGRLTALNAYVSQQLSDITLIKAGASRAIEKVNECVKSQSPRINFCGNGNHILSLVQNAPYGLLFIHFSYKPTSFKTVLVSPGLCLSGDRGIAPKQGYFIKQNDSWMFTGSSYYYPEPISDKNVVFMNSCSVNFTKAPFIYLNNSIPNLSDFEAELSLWFKNHTSIAPNLTFNSHINATFLDLYYEMNVIQESIKSLNGGYIPEAPRDGQAYVRKDGEWVLLSTF

SEQ ID NO: 14923 - protein, 1171 aa, Artificial Sequence
  HCoV/229E/BN1/GER/2015__AOG74783.1 spike protein (1-1171)
MFVLLVAYALLHIAGCQTTNGTNTSHSVCNGCVGHSENVFAVESGGYIPSNFAFNNWFLLTNTSSVVDGVVRSFQPLLLNCLWSVSGSQFTTGFVYFNGTGRGACKGFYSNASSDVIRYNINFEENLRRGTILFKTSYGAVVFYCTNNTLVSGDAHIPSGTVLGNFYCFVNTTIGNETTSAFVGALPKTVREFVISRTGHFYINGYRYFSLGDVEAVNFNVTNAATTVCTVALASYADVLVNVSQTAIANIIYCNSVINRLRCDQLSFDVPDGFYSTSPIQPVELPVSIVSLPVYHKHTFIVLYVNFEHRRGPGKCYNCRPAVINITLANFNETKGPLCVDTSHFTTQFVDNVKLARWSASINTGNCPFSFGKVNNFVKFGSVCFSLKDIPGGCAMPIMANLVNSKSHNIGSLYVSWSDGDVITGVPKPVEGVSSFMNVTLNKCTKYNIYDVSGVGVIRISNDTFLNGITYTSTSGNLLGFKDVTNGTIYSITPCNPPDQLVVYQQAVVGAMLSENFTSYGFSNVVEMPKFFYASNGTYNCTDAVLTYSSFGVCADGSIIAVQPRNVSYDSVSAIVTANLSIPFNWTTSVQVEYLQITSTPIVVDCSTYVCNGNVRCVELLKQYTSACKTIEDALRNSAMLESADVSEMLTFDKKAFTLANVSSFGDYNLSSVIPSLPRSGSRVAGRSAIEDILFSKLVTSGLGTVDADYKKCTKGLSIADLACAQYYNGIMVLPGVADAERMAMYTGSLIGGIALGGLTSAASIPFSLAIQSRLNYVALQTDVLQENQRILAASFNKAMTNIVDAFTGVNDAITQTSQALQTVATALNKIQDVVNQQGNSLNHLTSQLRQNFQAISSSIQAIYDRLDIIQADQQVDRLITGRLAALNVFVSHTLTKYTEVRASRQLAQQKVNECVKSQSKRYGFCGNGTHIFSLVNAAPEGLVFLHTVLLPTQYKDVEAWSGLCVDGINGYVLRQPNLALYKEGNYYRITSRIMFEPRIPTIADFVQIENCNVTFVNISRSELQTIVPEYIDVNKTLQELSYKLPNYTVPDLVVEQYNQTILNLTSEISTLENKSAELNYTVQKLQTLIDNINSTLVDLKWLNRVETYIKWPWWVWLCISVVLIFVVSMLLLCCCSTGCCGFFSCFASSIRGCCESTKLPYYDVEKIHIQ

SEQ ID NO: 14924 - protein, 1171 aa, Artificial Sequence
  HCoV/229E/BN1/GER/2015__AOG74783.1 spike protein (1-1171)(I869P_I870P)
MFVLLVAYALLHIAGCQTTNGTNTSHSVCNGCVGHSENVFAVESGGYIPSNFAFNNWFLLTNTSSVVDGVVRSFQPLLLNCLWSVSGSQFTTGFVYFNGTGRGACKGFYSNASSDVIRYNINFEENLRRGTILFKTSYGAVVFYCTNNTLVSGDAHIPSGTVLGNFYCFVNTTIGNETTSAFVGALPKTVREFVISRTGHFYINGYRYFSLGDVEAVNFNVTNAATTVCTVALASYADVLVNVSQTAIANIIYCNSVINRLRCDQLSFDVPDGFYSTSPIQPVELPVSIVSLPVYHKHTFIVLYVNFEHRRGPGKCYNCRPAVINITLANFNETKGPLCVDTSHFTTQFVDNVKLARWSASINTGNCPFSFGKVNNFVKFGSVCFSLKDIPGGCAMPIMANLVNSKSHNIGSLYVSWSDGDVITGVPKPVEGVSSFMNVTLNKCTKYNIYDVSGVGVIRISNDTFLNGITYTSTSGNLLGFKDVTNGTIYSITPCNPPDQLVVYQQAVVGAMLSENFTSYGFSNVVEMPKFFYASNGTYNCTDAVLTYSSFGVCADGSIIAVQPRNVSYDSVSAIVTANLSIPFNWTTSVQVEYLQITSTPIVVDCSTYVCNGNVRCVELLKQYTSACKTIEDALRNSAMLESADVSEMLTFDKKAFTLANVSSFGDYNLSSVIPSLPRSGSRVAGRSAIEDILFSKLVTSGLGTVDADYKKCTKGLSIADLACAQYYNGIMVLPGVADAERMAMYTGSLIGGIALGGLTSAASIPFSLAIQSRLNYVALQTDVLQENQRILAASFNKAMTNIVDAFTGVNDAITQTSQALQTVATALNKIQDVVNQQGNSLNHLTSQLRQNFQAISSSIQAIYDRLDPPQADQQVDRLITGRLAALNVFVSHTLTKYTEVRASRQLAQQKVNECVKSQSKRYGFCGNGTHIFSLVNAAPEGLVFLHTVLLPTQYKDVEAWSGLCVDGINGYVLRQPNLALYKEGNYYRITSRIMFEPRIPTIADFVQIENCNVTFVNISRSELQTIVPEYIDVNKTLQELSYKLPNYTVPDLVVEQYNQTILNLTSEISTLENKSAELNYTVQKLQTLIDNINSTLVDLKWLNRVETYIKWPWWVWLCISVVLIFVVSMLLLCCCSTGCCGFFSCFASSIRGCCESTKLPYYDVEKIHIQ

SEQ ID NO: 14925 - protein, 1108 aa, Artificial Sequence
  HCoV/229E/BN1/GER/2015__AOG74783.1 spike protein (variant)
MFVLLVAYALLHIAGCQTTNGTNTSHSVCNGCVGHSENVFAVESGGYIPSNFAFNNWFLLTNTSSVVDGVVRSFQPLLLNCLWSVSGSQFTTGFVYFNGTGRGACKGFYSNASSDVIRYNINFEENLRRGTILFKTSYGAVVFYCTNNTLVSGDAHIPSGTVLGNFYCFVNTTIGNETTSAFVGALPKTVREFVISRTGHFYINGYRYFSLGDVEAVNFNVTNAATTVCTVALASYADVLVNVSQTAIANIIYCNSVINRLRCDQLSFDVPDGFYSTSPIQPVELPVSIVSLPVYHKHTFIVLYVNFEHRRGPGKCYNCRPAVINITLANFNETKGPLCVDTSHFTTQFVDNVKLARWSASINTGNCPFSFGKVNNFVKFGSVCFSLKDIPGGCAMPIMANLVNSKSHNIGSLYVSWSDGDVITGVPKPVEGVSSFMNVTLNKCTKYNIYDVSGVGVIRISNDTFLNGITYTSTSGNLLGFKDVTNGTIYSITPCNPPDQLVVYQQAVVGAMLSENFTSYGFSNVVEMPKFFYASNGTYNCTDAVLTYSSFGVCADGSIIAVQPRNVSYDSVSAIVTANLSIPFNWTTSVQVEYLQITSTPIVVDCSTYVCNGNVRCVELLKQYTSACKTIEDALRNSAMLESADVSEMLTFDKKAFTLANVSSFGDYNLSSVIPSLPRSGSRVAGRSAIEDILFSKLVTSGLGTVDADYKKCTKGLSIADLACAQYYNGIMVLPGVADAERMAMYTGSLIGGIALGGLTSAASIPFSLAIQSRLNYVALQTDVLQENQRILAASFNKAMTNIVDAFTGVNDAITQTSQALQTVATALNKIQDVVNQQGNSLNHLTSQLRQNFQAISSSIQAIYDRLDPPQADQQVDRLITGRLAALNVFVSHTLTKYTEVRASRQLAQQKVNECVKSQSKRYGFCGNGTHIFSLVNAAPEGLVFLHTVLLPTQYKDVEAWSGLCVDGINGYVLRQPNLALYKEGNYYRITSRIMFEPRIPTIADFVQIENCNVTFVNISRSELQTIVPEYIDVNKTLQELSYKLPNYTVPDLVVEQYNQTILNLTSEISTLENKSAELNYTVQKLQTLIDNINSTLVDLKWLNRVET

SEQ ID NO: 14926 - protein, 1135 aa, Artificial Sequence
  HCoV/229E/BN1/GER/2015__AOG74783.1 spike protein (variant)
MFVLLVAYALLHIAGCQTTNGTNTSHSVCNGCVGHSENVFAVESGGYIPSNFAFNNWFLLTNTSSVVDGVVRSFQPLLLNCLWSVSGSQFTTGFVYFNGTGRGACKGFYSNASSDVIRYNINFEENLRRGTILFKTSYGAVVFYCTNNTLVSGDAHIPSGTVLGNFYCFVNTTIGNETTSAFVGALPKTVREFVISRTGHFYINGYRYFSLGDVEAVNFNVTNAATTVCTVALASYADVLVNVSQTAIANIIYCNSVINRLRCDQLSFDVPDGFYSTSPIQPVELPVSIVSLPVYHKHTFIVLYVNFEHRRGPGKCYNCRPAVINITLANFNETKGPLCVDTSHFTTQFVDNVKLARWSASINTGNCPFSFGKVNNFVKFGSVCFSLKDIPGGCAMPIMANLVNSKSHNIGSLYVSWSDGDVITGVPKPVEGVSSFMNVTLNKCTKYNIYDVSGVGVIRISNDTFLNGITYTSTSGNLLGFKDVTNGTIYSITPCNPPDQLVVYQQAVVGAMLSENFTSYGFSNVVEMPKFFYASNGTYNCTDAVLTYSSFGVCADGSIIAVQPRNVSYDSVSAIVTANLSIPFNWTTSVQVEYLQITSTPIVVDCSTYVCNGNVRCVELLKQYTSACKTIEDALRNSAMLESADVSEMLTFDKKAFTLANVSSFGDYNLSSVIPSLPRSGSRVAGRSAIEDILFSKLVTSGLGTVDADYKKCTKGLSIADLACAQYYNGIMVLPGVADAERMAMYTGSLIGGIALGGLTSAASIPFSLAIQSRLNYVALQTDVLQENQRILAASFNKAMTNIVDAFTGVNDAITQTSQALQTVATALNKIQDVVNQQGNSLNHLTSQLRQNFQAISSSIQAIYDRLDPPQADQQVDRLITGRLAALNVFVSHTLTKYTEVRASRQLAQQKVNECVKSQSKRYGFCGNGTHIFSLVNAAPEGLVFLHTVLLPTQYKDVEAWSGLCVDGINGYVLRQPNLALYKEGNYYRITSRIMFEPRIPTIADFVQIENCNVTFVNISRSELQTIVPEYIDVNKTLQELSYKLPNYTVPDLVVEQYNQTILNLTSEISTLENKSAELNYTVQKLQTLIDNINSTLVDLKWLNRVETGGYIPEAPRDGQAYVRKDGEWVLLSTF

SEQ ID NO: 14927 - protein, 1356 aa, Artificial Sequence
  HCoV/NL63/RPTEC/2004__AFV53148.1 spike protein (1-1356)
MKLFLILLVLPLASCFFTCNSNANLSMLQLGVPDNSSTIVTGLLPTHWFCANQSTSVYSANGFFYIDVGNHRSAFALHTGYYDANQYYIYVTNEIGLNASVTLKICKFSRNTTFDFLSNASSSFDCIVNLLFTEQLGAPLGITISGETVRLHLYNVTRTFYVPAAYKLTKLSVKCYFNYSCVFSVVNATVTVNVTTHNGRVVNYTVCDDCNGYTDNIFSVQQDGRIPNGFPFNNWFLLTNGSTLVDGVSRLYQPLRLTCLWPVPGLKSSTGFVYFNATGSDVNCNGYQHNSVVDVMRYNLNFSANSLDNLKSGVIVFKTLQYDVLFYCSNSSSGVLDTTIPFGPSSQPYYCFINSTINTTHVSTFVGILPPTVREIVVARTGQFYINGFKYFDLGFIEAVNFNVTTASATDFWTVAFATFVDVLVNVSATNIQNLLYCDSPFEKLQCEHLQFGLQDGFYSANFLDDNVLPETYVALPIYYQHTDINFTATASFGGSCYVCKPHQVNISLNGNTSVCVRTSHFSIRYIYNRVKSGSPGDSSWHIYLKSGTCPFSFSKLNNFQKFKTICFSTVEVPGSCNFPLEATWHYTSYTIVGALYVTWSEGNSITGVPYPVSGIREFSNLVLNNCTKYNIYDYVGTGIIRSSNQSLAGGITYVSNSGNLLGFKNVSTGNIFIVTPCNQPDQVAVYQQSIIGAMTAVNESRYGLQNLLQLPNFYYVSNGGNNCTTAVMTYSNFGICADGSLIPVRPRNSSDNGISAIITANLSIPSNWTTSVQVEYLQITSTPIVVDCATYVCNGNPRCKNLLKQYTSACKTIEDALRLSAHLETNDVSSMLTFDSNAFSLANVTSFGDYNLSSVLPQRNIRSSRIAGRSALEDLLFSKVVTSGLGTVDVDYKSCTKGLSIADLACAQYYNGIMVLPGVADAERMAMYTGSLIGGMVLGGLTSAAAIPFSLALQARLNYVALQTDVLQENQKILAASFNKAINNIVASFSSVNDAITQTAEAIHTVTIALNKIQDVVNQQGSALNHLTSQLRHNFQAISNSIQAIYDRLDSIQADQQVDRLITGRLAALNAFVSQVLNKYTEVRGSRRLAQQKINECVKSQSNRYGFCGNGTHIFSIVNSAPDGLLFLHTVLLPTDYKNVKAWSGICVDGIYGYVLRQPNLVLYSDNGVFRVTSRIMFQPRLPVLSDFVQIYNCNVTFVNISRVELHTVIPDYVDVNKTLQEFAQNLPKYVKPNFDLTPFNLTYLNLSSELKQLEAKTASLFQTTVELQGLIDQINSTYVDLKLLNRFENYIKWPWWVWLIISVVFVVLLSLLVFCCLSTGCCGCCNCLTSSMRGCCDCGSTKLPYYEFEKVHVQ

SEQ ID NO: 14928 - protein, 1356 aa, Artificial Sequence
  HCoV/NL63/RPTEC/2004__AFV53148.1 spike protein (1-1356)(S1052P_I1053P)
MKLFLILLVLPLASCFFTCNSNANLSMLQLGVPDNSSTIVTGLLPTHWFCANQSTSVYSANGFFYIDVGNHRSAFALHTGYYDANQYYIYVTNEIGLNASVTLKICKFSRNTTFDFLSNASSSFDCIVNLLFTEQLGAPLGITISGETVRLHLYNVTRTFYVPAAYKLTKLSVKCYFNYSCVFSVVNATVTVNVTTHNGRVVNYTVCDDCNGYTDNIFSVQQDGRIPNGFPFNNWFLLTNGSTLVDGVSRLYQPLRLTCLWPVPGLKSSTGFVYFNATGSDVNCNGYQHNSVVDVMRYNLNFSANSLDNLKSGVIVFKTLQYDVLFYCSNSSSGVLDTTIPFGPSSQPYYCFINSTINTTHVSTFVGILPPTVREIVVARTGQFYINGFKYFDLGFIEAVNFNVTTASATDFWTVAFATFVDVLVNVSATNIQNLLYCDSPFEKLQCEHLQFGLQDGFYSANFLDDNVLPETYVALPIYYQHTDINFTATASFGGSCYVCKPHQVNISLNGNTSVCVRTSHFSIRYIYNRVKSGSPGDSSWHIYLKSGTCPFSFSKLNNFQKFKTICFSTVEVPGSCNFPLEATWHYTSYTIVGALYVTWSEGNSITGVPYPVSGIREFSNLVLNNCTKYNIYDYVGTGIIRSSNQSLAGGITYVSNSGNLLGFKNVSTGNIFIVTPCNQPDQVAVYQQSIIGAMTAVNESRYGLQNLLQLPNFYYVSNGGNNCTTAVMTYSNFGICADGSLIPVRPRNSSDNGISAIITANLSIPSNWTTSVQVEYLQITSTPIVVDCATYVCNGNPRCKNLLKQYTSACKTIEDALRLSAHLETNDVSSMLTFDSNAFSLANVTSFGDYNLSSVLPQRNIRSSRIAGRSALEDLLFSKVVTSGLGTVDVDYKSCTKGLSIADLACAQYYNGIMVLPGVADAERMAMYTGSLIGGMVLGGLTSAAAIPFSLALQARLNYVALQTDVLQENQKILAASFNKAINNIVASFSSVNDAITQTAEAIHTVTIALNKIQDVVNQQGSALNHLTSQLRHNFQAISNSIQAIYDRLDPPQADQQVDRLITGRLAALNAFVSQVLNKYTEVRGSRRLAQQKINECVKSQSNRYGFCGNGTHIFSIVNSAPDGLLFLHTVLLPTDYKNVKAWSGICVDGIYGYVLRQPNLVLYSDNGVFRVTSRIMFQPRLPVLSDFVQIYNCNVTFVNISRVELHTVIPDYVDVNKTLQEFAQNLPKYVKPNFDLTPFNLTYLNLSSELKQLEAKTASLFQTTVELQGLIDQINSTYVDLKLLNRFENYIKWPWWVWLIISVVFVVLLSLLVFCCLSTGCCGCCNCLTSSMRGCCDCGSTKLPYYEFEKVHVQ

SEQ ID NO: 14929 - protein, 1291 aa, Artificial Sequence
  HCoV/NL63/RPTEC/2004__AFV53148.1 spike protein (variant)
MKLFLILLVLPLASCFFTCNSNANLSMLQLGVPDNSSTIVTGLLPTHWFCANQSTSVYSANGFFYIDVGNHRSAFALHTGYYDANQYYIYVTNEIGLNASVTLKICKFSRNTTFDFLSNASSSFDCIVNLLFTEQLGAPLGITISGETVRLHLYNVTRTFYVPAAYKLTKLSVKCYFNYSCVFSVVNATVTVNVTTHNGRVVNYTVCDDCNGYTDNIFSVQQDGRIPNGFPFNNWFLLTNGSTLVDGVSRLYQPLRLTCLWPVPGLKSSTGFVYFNATGSDVNCNGYQHNSVVDVMRYNLNFSANSLDNLKSGVIVFKTLQYDVLFYCSNSSSGVLDTTIPFGPSSQPYYCFINSTINTTHVSTFVGILPPTVREIVVARTGQFYINGFKYFDLGFIEAVNFNVTTASATDFWTVAFATFVDVLVNVSATNIQNLLYCDSPFEKLQCEHLQFGLQDGFYSANFLDDNVLPETYVALPIYYQHTDINFTATASFGGSCYVCKPHQVNISLNGNTSVCVRTSHFSIRYIYNRVKSGSPGDSSWHIYLKSGTCPFSFSKLNNFQKFKTICFSTVEVPGSCNFPLEATWHYTSYTIVGALYVTWSEGNSITGVPYPVSGIREFSNLVLNNCTKYNIYDYVGTGIIRSSNQSLAGGITYVSNSGNLLGFKNVSTGNIFIVTPCNQPDQVAVYQQSIIGAMTAVNESRYGLQNLLQLPNFYYVSNGGNNCTTAVMTYSNFGICADGSLIPVRPRNSSDNGISAIITANLSIPSNWTTSVQVEYLQITSTPIVVDCATYVCNGNPRCKNLLKQYTSACKTIEDALRLSAHLETNDVSSMLTFDSNAFSLANVTSFGDYNLSSVLPQRNIRSSRIAGRSALEDLLFSKVVTSGLGTVDVDYKSCTKGLSIADLACAQYYNGIMVLPGVADAERMAMYTGSLIGGMVLGGLTSAAAIPFSLALQARLNYVALQTDVLQENQKILAASFNKAINNIVASFSSVNDAITQTAEAIHTVTIALNKIQDVVNQQGSALNHLTSQLRHNFQAISNSIQAIYDRLDPPQADQQVDRLITGRLAALNAFVSQVLNKYTEVRGSRRLAQQKINECVKSQSNRYGFCGNGTHIFSIVNSAPDGLLFLHTVLLPTDYKNVKAWSGICVDGIYGYVLRQPNLVLYSDNGVFRVTSRIMFQPRLPVLSDFVQIYNCNVTFVNISRVELHTVIPDYVDVNKTLQEFAQNLPKYVKPNFDLTPFNLTYLNLSSELKQLEAKTASLFQTTVELQGLIDQINSTYVDLKLLNRFEN

SEQ ID NO: 14930 - protein, 1318 aa, Artificial Sequence
  HCoV/NL63/RPTEC/2004__AFV53148.1 spike protein (variant)
MKLFLILLVLPLASCFFTCNSNANLSMLQLGVPDNSSTIVTGLLPTHWFCANQSTSVYSANGFFYIDVGNHRSAFALHTGYYDANQYYIYVTNEIGLNASVTLKICKFSRNTTFDFLSNASSSFDCIVNLLFTEQLGAPLGITISGETVRLHLYNVTRTFYVPAAYKLTKLSVKCYFNYSCVFSVVNATVTVNVTTHNGRVVNYTVCDDCNGYTDNIFSVQQDGRIPNGFPFNNWFLLTNGSTLVDGVSRLYQPLRLTCLWPVPGLKSSTGFVYFNATGSDVNCNGYQHNSVVDVMRYNLNFSANSLDNLKSGVIVFKTLQYDVLFYCSNSSSGVLDTTIPFGPSSQPYYCFINSTINTTHVSTFVGILPPTVREIVVARTGQFYINGFKYFDLGFIEAVNFNVTTASATDFWTVAFATFVDVLVNVSATNIQNLLYCDSPFEKLQCEHLQFGLQDGFYSANFLDDNVLPETYVALPIYYQHTDINFTATASFGGSCYVCKPHQVNISLNGNTSVCVRTSHFSIRYIYNRVKSGSPGDSSWHIYLKSGTCPFSFSKLNNFQKFKTICFSTVEVPGSCNFPLEATWHYTSYTIVGALYVTWSEGNSITGVPYPVSGIREFSNLVLNNCTKYNIYDYVGTGIIRSSNQSLAGGITYVSNSGNLLGFKNVSTGNIFIVTPCNQPDQVAVYQQSIIGAMTAVNESRYGLQNLLQLPNFYYVSNGGNNCTTAVMTYSNFGICADGSLIPVRPRNSSDNGISAIITANLSIPSNWTTSVQVEYLQITSTPIVVDCATYVCNGNPRCKNLLKQYTSACKTIEDALRLSAHLETNDVSSMLTFDSNAFSLANVTSFGDYNLSSVLPQRNIRSSRIAGRSALEDLLFSKVVTSGLGTVDVDYKSCTKGLSIADLACAQYYNGIMVLPGVADAERMAMYTGSLIGGMVLGGLTSAAAIPFSLALQARLNYVALQTDVLQENQKILAASFNKAINNIVASFSSVNDAITQTAEAIHTVTIALNKIQDVVNQQGSALNHLTSQLRHNFQAISNSIQAIYDRLDPPQADQQVDRLITGRLAALNAFVSQVLNKYTEVRGSRRLAQQKINECVKSQSNRYGFCGNGTHIFSIVNSAPDGLLFLHTVLLPTDYKNVKAWSGICVDGIYGYVLRQPNLVLYSDNGVFRVTSRIMFQPRLPVLSDFVQIYNCNVTFVNISRVELHTVIPDYVDVNKTLQEFAQNLPKYVKPNFDLTPFNLTYLNLSSELKQLEAKTASLFQTTVELQGLIDQINSTYVDLKLLNRFENGGYIPEAPRDGQAYVRKDGEWVLLSTF

SEQ ID NO: 14931 - protein, 1256 aa, Artificial Sequence
  Bat SARS-like CoV/WIV1__AGZ48828.1 spike protein (1-1256)
MKLLVLVFATLVSSYTIEKCLDFDDRTPPANTQFLSSHRGVYYPDDIFRSNVLHLVQDHFLPFDSNVTRFITFGLNFDNPIIPFKDGIYFAATEKSNVIRGWVFGSTMNNKSQSVIIMNNSTNLVIRACNFELCDNPFFVVLKSNNTQIPSYIFNNAFNCTFEYVSKDFNLDLGEKPGNFKDLREFVFRNKDGFLHVYSGYQPISAASGLPTGFNALKPIFKLPLGINITNFRTLLTAFPPRPDYWGTSAAAYFVGYLKPTTFMLKYDENGTITDAVDCSQNPLAELKCSVKSFEIDKGIYQTSNFRVAPSKEVVRFPNITNLCPFGEVFNATTFPSVYAWERKRISNCVADYSVLYNSTSFSTFKCYGVSATKLNDLCFSNVYADSFVVKGDDVRQIAPGQTGVIADYNYKLPDDFTGCVLAWNTRNIDATQTGNYNYKYRSLRHGKLRPFERDISNVPFSPDGKPCTPPAFNCYWPLNDYGFYITNGIGYQPYRVVVLSFELLNAPATVCGPKLSTDLIKNQCVNFNFNGLTGTGVLTPSSKRFQPFQQFGRDVSDFTDSVRDPKTSEILDISPCSFGGVSVITPGTNTSSEVAVLYQDVNCTDVPVAIHADQLTPSWRVHSTGNNVFQTQAGCLIGAEHVDTSYECDIPIGAGICASYHTVSSLRSTSQKSIVAYTMSLGADSSIAYSNNTIAIPTNFSISITTEVMPVSMAKTSVDCNMYICGDSTECANLLLQYGSFCTQLNRALSGIAVEQDRNTREVFAQVKQMYKTPTLKDFGGFNFSQILPDPLKPTKRSFIEDLLFNKVTLADAGFMKQYGECLGDINARDLICAQKFNGLTVLPPLLTDDMIAAYTAALVSGTATAGWTFGAGAALQIPFAMQMAYRFNGIGVTQNVLYENQKQIANQFNKAISQIQESLTTTSTALGKLQDVVNQNAQALNTLVKQLSSNFGAISSVLNDILSRLDKVEAEVQIDRLITGRLQSLQTYVTQQLIRAAEIRASANLAATKMSECVLGQSKRVDFCGKGYHLMSFPQAAPHGVVFLHVTYVPSQERNFTTAPAICHEGKAYFPREGVFVFNGTSWFITQRNFFSPQIITTDNTFVSGSCDVVIGIINNTVYDPLQPELDSFKEELDKYFKNHTSPDVDLGDISGINASVVNIQKEIDRLNEVAKNLNESLIDLQELGKYEQYIKWPWYVWLGFIAGLIAIVMVTILLCCMTSCCSCLKGACSCGSCCKFDEDDSEPVLKGVKLHYT

SEQ ID NO: 14932 - protein, 1256 aa, Artificial Sequence
  Bat SARS-like CoV/WIV1__AGZ48828.1 spike protein (1-1256)(K969P_V970P)
MKLLVLVFATLVSSYTIEKCLDFDDRTPPANTQFLSSHRGVYYPDDIFRSNVLHLVQDHFLPFDSNVTRFITFGLNFDNPIIPFKDGIYFAATEKSNVIRGWVFGSTMNNKSQSVIIMNNSTNLVIRACNFELCDNPFFVVLKSNNTQIPSYIFNNAFNCTFEYVSKDFNLDLGEKPGNFKDLREFVFRNKDGFLHVYSGYQPISAASGLPTGFNALKPIFKLPLGINITNFRTLLTAFPPRPDYWGTSAAAYFVGYLKPTTFMLKYDENGTITDAVDCSQNPLAELKCSVKSFEIDKGIYQTSNFRVAPSKEVVRFPNITNLCPFGEVFNATTFPSVYAWERKRISNCVADYSVLYNSTSFSTFKCYGVSATKLNDLCFSNVYADSFVVKGDDVRQIAPGQTGVIADYNYKLPDDFTGCVLAWNTRNIDATQTGNYNYKYRSLRHGKLRPFERDISNVPFSPDGKPCTPPAFNCYWPLNDYGFYITNGIGYQPYRVVVLSFELLNAPATVCGPKLSTDLIKNQCVNFNFNGLTGTGVLTPSSKRFQPFQQFGRDVSDFTDSVRDPKTSEILDISPCSFGGVSVITPGTNTSSEVAVLYQDVNCTDVPVAIHADQLTPSWRVHSTGNNVFQTQAGCLIGAEHVDTSYECDIPIGAGICASYHTVSSLRSTSQKSIVAYTMSLGADSSIAYSNNTIAIPTNFSISITTEVMPVSMAKTSVDCNMYICGDSTECANLLLQYGSFCTQLNRALSGIAVEQDRNTREVFAQVKQMYKTPTLKDFGGFNFSQILPDPLKPTKRSFIEDLLFNKVTLADAGFMKQYGECLGDINARDLICAQKFNGLTVLPPLLTDDMIAAYTAALVSGTATAGWTFGAGAALQIPFAMQMAYRFNGIGVTQNVLYENQKQIANQFNKAISQIQESLTTTSTALGKLQDVVNQNAQALNTLVKQLSSNFGAISSVLNDILSRLDPPEAEVQIDRLITGRLQSLQTYVTQQLIRAAEIRASANLAATKMSECVLGQSKRVDFCGKGYHLMSFPQAAPHGVVFLHVTYVPSQERNFTTAPAICHEGKAYFPREGVFVFNGTSWFITQRNFFSPQIITTDNTFVSGSCDVVIGIINNTVYDPLQPELDSFKEELDKYFKNHTSPDVDLGDISGINASVVNIQKEIDRLNEVAKNLNESLIDLQELGKYEQYIKWPWYVWLGFIAGLIAIVMVTILLCCMTSCCSCLKGACSCGSCCKFDEDDSEPVLKGVKLHYT

SEQ ID NO: 14933 - protein, 1191 aa, Artificial Sequence
  Bat SARS-like CoV/WIV1__AGZ48828.1 spike protein (variant)
MKLLVLVFATLVSSYTIEKCLDFDDRTPPANTQFLSSHRGVYYPDDIFRSNVLHLVQDHFLPFDSNVTRFITFGLNFDNPIIPFKDGIYFAATEKSNVIRGWVFGSTMNNKSQSVIIMNNSTNLVIRACNFELCDNPFFVVLKSNNTQIPSYIFNNAFNCTFEYVSKDFNLDLGEKPGNFKDLREFVFRNKDGFLHVYSGYQPISAASGLPTGFNALKPIFKLPLGINITNFRTLLTAFPPRPDYWGTSAAAYFVGYLKPTTFMLKYDENGTITDAVDCSQNPLAELKCSVKSFEIDKGIYQTSNFRVAPSKEVVRFPNITNLCPFGEVFNATTFPSVYAWERKRISNCVADYSVLYNSTSFSTFKCYGVSATKLNDLCFSNVYADSFVVKGDDVRQIAPGQTGVIADYNYKLPDDFTGCVLAWNTRNIDATQTGNYNYKYRSLRHGKLRPFERDISNVPFSPDGKPCTPPAFNCYWPLNDYGFYITNGIGYQPYRVVVLSFELLNAPATVCGPKLSTDLIKNQCVNFNFNGLTGTGVLTPSSKRFQPFQQFGRDVSDFTDSVRDPKTSEILDISPCSFGGVSVITPGTNTSSEVAVLYQDVNCTDVPVAIHADQLTPSWRVHSTGNNVFQTQAGCLIGAEHVDTSYECDIPIGAGICASYHTVSSLRSTSQKSIVAYTMSLGADSSIAYSNNTIAIPTNFSISITTEVMPVSMAKTSVDCNMYICGDSTECANLLLQYGSFCTQLNRALSGIAVEQDRNTREVFAQVKQMYKTPTLKDFGGFNFSQILPDPLKPTKRSFIEDLLFNKVTLADAGFMKQYGECLGDINARDLICAQKFNGLTVLPPLLTDDMIAAYTAALVSGTATAGWTFGAGAALQIPFAMQMAYRFNGIGVTQNVLYENQKQIANQFNKAISQIQESLTTTSTALGKLQDVVNQNAQALNTLVKQLSSNFGAISSVLNDILSRLDPPEAEVQIDRLITGRLQSLQTYVTQQLIRAAEIRASANLAATKMSECVLGQSKRVDFCGKGYHLMSFPQAAPHGVVFLHVTYVPSQERNFTTAPAICHEGKAYFPREGVFVFNGTSWFITQRNFFSPQIITTDNTFVSGSCDVVIGIINNTVYDPLQPELDSFKEELDKYFKNHTSPDVDLGDISGINASVVNIQKEIDRLNEVAKNLNESLIDLQELGKYEQ

SEQ ID NO: 14934 - protein, 1218 aa, Artificial Sequence
  Bat SARS-like CoV/WIV1__AGZ48828.1 spike protein (variant)
MKLLVLVFATLVSSYTIEKCLDFDDRTPPANTQFLSSHRGVYYPDDIFRSNVLHLVQDHFLPFDSNVTRFITFGLNFDNPIIPFKDGIYFAATEKSNVIRGWVFGSTMNNKSQSVIIMNNSTNLVIRACNFELCDNPFFVVLKSNNTQIPSYIFNNAFNCTFEYVSKDFNLDLGEKPGNFKDLREFVFRNKDGFLHVYSGYQPISAASGLPTGFNALKPIFKLPLGINITNFRTLLTAFPPRPDYWGTSAAAYFVGYLKPTTFMLKYDENGTITDAVDCSQNPLAELKCSVKSFEIDKGIYQTSNFRVAPSKEVVRFPNITNLCPFGEVFNATTFPSVYAWERKRISNCVADYSVLYNSTSFSTFKCYGVSATKLNDLCFSNVYADSFVVKGDDVRQIAPGQTGVIADYNYKLPDDFTGCVLAWNTRNIDATQTGNYNYKYRSLRHGKLRPFERDISNVPFSPDGKPCTPPAFNCYWPLNDYGFYITNGIGYQPYRVVVLSFELLNAPATVCGPKLSTDLIKNQCVNFNFNGLTGTGVLTPSSKRFQPFQQFGRDVSDFTDSVRDPKTSEILDISPCSFGGVSVITPGTNTSSEVAVLYQDVNCTDVPVAIHADQLTPSWRVHSTGNNVFQTQAGCLIGAEHVDTSYECDIPIGAGICASYHTVSSLRSTSQKSIVAYTMSLGADSSIAYSNNTIAIPTNFSISITTEVMPVSMAKTSVDCNMYICGDSTECANLLLQYGSFCTQLNRALSGIAVEQDRNTREVFAQVKQMYKTPTLKDFGGFNFSQILPDPLKPTKRSFIEDLLFNKVTLADAGFMKQYGECLGDINARDLICAQKFNGLTVLPPLLTDDMIAAYTAALVSGTATAGWTFGAGAALQIPFAMQMAYRFNGIGVTQNVLYENQKQIANQFNKAISQIQESLTTTSTALGKLQDVVNQNAQALNTLVKQLSSNFGAISSVLNDILSRLDPPEAEVQIDRLITGRLQSLQTYVTQQLIRAAEIRASANLAATKMSECVLGQSKRVDFCGKGYHLMSFPQAAPHGVVFLHVTYVPSQERNFTTAPAICHEGKAYFPREGVFVFNGTSWFITQRNFFSPQIITTDNTFVSGSCDVVIGIINNTVYDPLQPELDSFKEELDKYFKNHTSPDVDLGDISGINASVVNIQKEIDRLNEVAKNLNESLIDLQELGKYEQGGYIPEAPRDGQAYVRKDGEWVLLSTF

SEQ ID NO: 14935 - protein, 1274 aa, Artificial Sequence
  BatCoV/HKU9-1 BF_005I__YP_001039971.1 spike protein (1-1274)
MLLILVLGVSLAAASRPECFNPRFTLTPLNHTLNYTSIKAKVSNVLLPDPYIAYSGQTLRQNLFMADMSNTILYPVTPPANGANGGFIYNTSIIPVSAGLFVNTWMYRQPASSRAYCQEPFGVAFGDTFENDRIAILIMAPDNLGSWSAVAPRNQTNIYLLVCSNATLCINPGFNRWGPAGSFIAPDALVDHSNSCFVNNTFSVNISTSRISLAFLFKDGDLLIYHSGWLPTSNFEHGFSRGSHPMTYFMSLPVGGNLPRAQFFQSIVRSNAIDKGDGMCTNFDVNLHVAHLINRDLLVSYFNNGSVANAADCADSAAEELYCVTGSFDPPTGVYPLSRYRAQVAGFVRVTQRGSYCTPPYSVLQDPPQPVVWRRYMLYDCVFDFTVVVDSLPTHQLQCYGVSPRRLASMCYGSVTLDVMRINETHLNNLFNRVPDTFSLYNYALPDNFYGCLHAFYLNSTAPYAVANRFPIKPGGRQSNSAFIDTVINAAHYSPFSYVYGLAVITLKPAAGSKLVCPVANDTVVITDRCVQYNLYGYTGTGVLSKNTSLVIPDGKVFTASSTGTIIGVSINSTTYSIMPCVTVPVSVGYHPNFERALLFNGLSCSQRSRAVTEPVSVLWSASATAQDAFDTPSGCVVNVELRNTTIVNTCAMPIGNSLCFINGSIATANADSLPRLQLVNYDPLYDNSTATPMTPVYWVKVPTNFTLSATEEYIQTTAPKITIDCARYLCGDSSRCLNVLLHYGTFCNDINKALSRVSTILDSALLSLVKELSINTRDEVTTFSFDGDYNFTGLMGCLGPNCGATTYRSAFSDLLYDKVRITDPGFMQSYQKCIDSQWGGSIRDLLCTQTYNGIAVLPPIVSPAMQALYTSLLVGAVASSGYTFGITSAGVIPFATQLQFRLNGIGVTTQVLVENQKLIASSFNNALVNIQKGFTETSIALSKMQDVINQHAAQLHTLVVQLGNSFGAISSSINEIFSRLEGLAANAEVDRLINGRMMVLNTYVTQLLIQASEAKAQNALAAQKISECVKAQSLRNDFCGNGTHVLSIPQLAPNGVLFIHYAYTPTEYAFVQTSAGLCHNGTGYAPRQGMFVLPNNTNMWHFTTMQFYNPVNISASNTQVLTSCSVNYTSVNYTVLEPSVPGDYDFQKEFDKFYKNLSTIFNNTFNPNDFNFSTVDVTAQIKSLHDVVNQLNQSFIDLKKLNVYEKTIKWPWYVWLAMIAGIVGLVLAVIMLMCMTNCCSCFKGMCDCRRCCGSYDSYDDVYPAVRVNKKRTV

SEQ ID NO: 14936 - protein, 1274 aa, Artificial Sequence
  BatCoV/HKU9-1 BF_005I__YP_001039971.1 spike protein (1-1274)(G983P_L984P)
MLLILVLGVSLAAASRPECFNPRFTLTPLNHTLNYTSIKAKVSNVLLPDPYIAYSGQTLRQNLFMADMSNTILYPVTPPANGANGGFIYNTSIIPVSAGLFVNTWMYRQPASSRAYCQEPFGVAFGDTFENDRIAILIMAPDNLGSWSAVAPRNQTNIYLLVCSNATLCINPGFNRWGPAGSFIAPDALVDHSNSCFVNNTFSVNISTSRISLAFLFKDGDLLIYHSGWLPTSNFEHGFSRGSHPMTYFMSLPVGGNLPRAQFFQSIVRSNAIDKGDGMCTNFDVNLHVAHLINRDLLVSYFNNGSVANAADCADSAAEELYCVTGSFDPPTGVYPLSRYRAQVAGFVRVTQRGSYCTPPYSVLQDPPQPVVWRRYMLYDCVFDFTVVVDSLPTHQLQCYGVSPRRLASMCYGSVTLDVMRINETHLNNLFNRVPDTFSLYNYALPDNFYGCLHAFYLNSTAPYAVANRFPIKPGGRQSNSAFIDTVINAAHYSPFSYVYGLAVITLKPAAGSKLVCPVANDTVVITDRCVQYNLYGYTGTGVLSKNTSLVIPDGKVFTASSTGTIIGVSINSTTYSIMPCVTVPVSVGYHPNFERALLFNGLSCSQRSRAVTEPVSVLWSASATAQDAFDTPSGCVVNVELRNTTIVNTCAMPIGNSLCFINGSIATANADSLPRLQLVNYDPLYDNSTATPMTPVYWVKVPTNFTLSATEEYIQTTAPKITIDCARYLCGDSSRCLNVLLHYGTFCNDINKALSRVSTILDSALLSLVKELSINTRDEVTTFSFDGDYNFTGLMGCLGPNCGATTYRSAFSDLLYDKVRITDPGFMQSYQKCIDSQWGGSIRDLLCTQTYNGIAVLPPIVSPAMQALYTSLLVGAVASSGYTFGITSAGVIPFATQLQFRLNGIGVTTQVLVENQKLIASSFNNALVNIQKGFTETSIALSKMQDVINQHAAQLHTLVVQLGNSFGAISSSINEIFSRLEPPAANAEVDRLINGRMMVLNTYVTQLLIQASEAKAQNALAAQKISECVKAQSLRNDFCGNGTHVLSIPQLAPNGVLFIHYAYTPTEYAFVQTSAGLCHNGTGYAPRQGMFVLPNNTNMWHFTTMQFYNPVNISASNTQVLTSCSVNYTSVNYTVLEPSVPGDYDFQKEFDKFYKNLSTIFNNTFNPNDFNFSTVDVTAQIKSLHDVVNQLNQSFIDLKKLNVYEKTIKWPWYVWLAMIAGIVGLVLAVIMLMCMTNCCSCFKGMCDCRRCCGSYDSYDDVYPAVRVNKKRTV

SEQ ID NO: 14937 - protein, 1207 aa, Artificial Sequence
  BatCoV/HKU9-1 BF_005I__YP_001039971.1 spike protein (variant)
MLLILVLGVSLAAASRPECFNPRFTLTPLNHTLNYTSIKAKVSNVLLPDPYIAYSGQTLRQNLFMADMSNTILYPVTPPANGANGGFIYNTSIIPVSAGLFVNTWMYRQPASSRAYCQEPFGVAFGDTFENDRIAILIMAPDNLGSWSAVAPRNQTNIYLLVCSNATLCINPGFNRWGPAGSFIAPDALVDHSNSCFVNNTFSVNISTSRISLAFLFKDGDLLIYHSGWLPTSNFEHGFSRGSHPMTYFMSLPVGGNLPRAQFFQSIVRSNAIDKGDGMCTNFDVNLHVAHLINRDLLVSYFNNGSVANAADCADSAAEELYCVTGSFDPPTGVYPLSRYRAQVAGFVRVTQRGSYCTPPYSVLQDPPQPVVWRRYMLYDCVFDFTVVVDSLPTHQLQCYGVSPRRLASMCYGSVTLDVMRINETHLNNLFNRVPDTFSLYNYALPDNFYGCLHAFYLNSTAPYAVANRFPIKPGGRQSNSAFIDTVINAAHYSPFSYVYGLAVITLKPAAGSKLVCPVANDTVVITDRCVQYNLYGYTGTGVLSKNTSLVIPDGKVFTASSTGTIIGVSINSTTYSIMPCVTVPVSVGYHPNFERALLFNGLSCSQRSRAVTEPVSVLWSASATAQDAFDTPSGCVVNVELRNTTIVNTCAMPIGNSLCFINGSIATANADSLPRLQLVNYDPLYDNSTATPMTPVYWVKVPTNFTLSATEEYIQTTAPKITIDCARYLCGDSSRCLNVLLHYGTFCNDINKALSRVSTILDSALLSLVKELSINTRDEVTTFSFDGDYNFTGLMGCLGPNCGATTYRSAFSDLLYDKVRITDPGFMQSYQKCIDSQWGGSIRDLLCTQTYNGIAVLPPIVSPAMQALYTSLLVGAVASSGYTFGITSAGVIPFATQLQFRLNGIGVTTQVLVENQKLIASSFNNALVNIQKGFTETSIALSKMQDVINQHAAQLHTLVVQLGNSFGAISSSINEIFSRLEPPAANAEVDRLINGRMMVLNTYVTQLLIQASEAKAQNALAAQKISECVKAQSLRNDFCGNGTHVLSIPQLAPNGVLFIHYAYTPTEYAFVQTSAGLCHNGTGYAPRQGMFVLPNNTNMWHFTTMQFYNPVNISASNTQVLTSCSVNYTSVNYTVLEPSVPGDYDFQKEFDKFYKNLSTIFNNTFNPNDFNFSTVDVTAQIKSLHDVVNQLNQSFIDLKKLNVYEK

SEQ ID NO: 14938 - protein, 1234 aa, Artificial Sequence
  BatCoV/HKU9-1 BF_005I__YP_001039971.1 spike protein (variant)
MLLILVLGVSLAAASRPECFNPRFTLTPLNHTLNYTSIKAKVSNVLLPDPYIAYSGQTLRQNLFMADMSNTILYPVTPPANGANGGFIYNTSIIPVSAGLFVNTWMYRQPASSRAYCQEPFGVAFGDTFENDRIAILIMAPDNLGSWSAVAPRNQTNIYLLVCSNATLCINPGFNRWGPAGSFIAPDALVDHSNSCFVNNTFSVNISTSRISLAFLFKDGDLLIYHSGWLPTSNFEHGFSRGSHPMTYFMSLPVGGNLPRAQFFQSIVRSNAIDKGDGMCTNFDVNLHVAHLINRDLLVSYFNNGSVANAADCADSAAEELYCVTGSFDPPTGVYPLSRYRAQVAGFVRVTQRGSYCTPPYSVLQDPPQPVVWRRYMLYDCVFDFTVVVDSLPTHQLQCYGVSPRRLASMCYGSVTLDVMRINETHLNNLFNRVPDTFSLYNYALPDNFYGCLHAFYLNSTAPYAVANRFPIKPGGRQSNSAFIDTVINAAHYSPFSYVYGLAVITLKPAAGSKLVCPVANDTVVITDRCVQYNLYGYTGTGVLSKNTSLVIPDGKVFTASSTGTIIGVSINSTTYSIMPCVTVPVSVGYHPNFERALLFNGLSCSQRSRAVTEPVSVLWSASATAQDAFDTPSGCVVNVELRNTTIVNTCAMPIGNSLCFINGSIATANADSLPRLQLVNYDPLYDNSTATPMTPVYWVKVPTNFTLSATEEYIQTTAPKITIDCARYLCGDSSRCLNVLLHYGTFCNDINKALSRVSTILDSALLSLVKELSINTRDEVTTFSFDGDYNFTGLMGCLGPNCGATTYRSAFSDLLYDKVRITDPGFMQSYQKCIDSQWGGSIRDLLCTQTYNGIAVLPPIVSPAMQALYTSLLVGAVASSGYTFGITSAGVIPFATQLQFRLNGIGVTTQVLVENQKLIASSFNNALVNIQKGFTETSIALSKMQDVINQHAAQLHTLVVQLGNSFGAISSSINEIFSRLEPPAANAEVDRLINGRMMVLNTYVTQLLIQASEAKAQNALAAQKISECVKAQSLRNDFCGNGTHVLSIPQLAPNGVLFIHYAYTPTEYAFVQTSAGLCHNGTGYAPRQGMFVLPNNTNMWHFTTMQFYNPVNISASNTQVLTSCSVNYTSVNYTVLEPSVPGDYDFQKEFDKFYKNLSTIFNNTFNPNDFNFSTVDVTAQIKSLHDVVNQLNQSFIDLKKLNVYEKGGYIPEAPRDGQAYVRKDGEWVLLSTF

SEQ ID NO: 14939 - protein, 1160 aa, Artificial Sequence
  PDCoV/Swine/Thailand/S5011/2015__AMN91621.1 spike protein (1-1160)
MQRALLIMTLLCLARAKFADDLLDLLTFPGAHRFLHKPTRNDSILYSRANNNFDVGVLPGYPTKNVNLFSPLTNSTLPINGLHRSYQPLMLNCLTKITNQTLSMYLQPSEIQTYSCGGAMVKYQTHDAVRIILDLIATDRISVEVVGQAGENYVFVCSDQFNYTTALHNSTFFSLNSQLYCFTNNTYLGILPPDLTDFTVYRTGQFYANGYLLGTLPITVNYVRLYRGQLSANSAHFALANLTDTLITLTNTTISQITYCDKSVVDSIACQRSSHQVEDGFYSDPKSAVRARQRTIVTLPKLPELEVVQLNISAHMDFGEARLDSVTINGNTSYCVTKPYFRLETNFLCRGCTMNLRTDTCSFDLSAVNNGMSFSQFCLSTESGACEMKIIVTYVWNYLLRQRLYVTAVEGQTHTGTTSVHATDTSSVITDVCTDYTIYGVSGTGIIKPSDLLLHNGIAFTSPTGELYAFKNITTGKTLQVLPCETPSQLIVINNTVVGAITSSNSTENNRFTTTIVTPTFFYSTNATTLNCTKPVLSYGPISVCSDGAIAGTSTLQNTRPSIVSLYDGEIEIPSAFSLSVQTEYLQVQAEQVIVDCPQYVCNGNSRCLQLLAQYTSACSNIEVALHSSAQLDSREIISMFKTSTQSLQLANITNFKGDYNFSSILTSRVGGRSAIEDLLFNKVVTSGLGTVDQDYKSCSRNMAIADLVCSQYYNGIMVLPGVVDAEKMAMYTGSLTGAMVFGGLTAAAAIPFATAVQARLNYVALQTNVLQENQKILAESFNQAVGNISLALSSVNDAIQQTSEALNTVAIAIKKIQTVVNQQGEALSHLTAQLSNNFQAISTSIQDIYNRLEEVEANQQVDRLINGRLAALNAYVTQLLNQMSQIRQSRLLAQQKINECVKSQSPRYGFCGNGTHIFSLTQTAPNGIFFMHAVLVPNKFTRVNASAGICVDNTRGYSLQPQLILYQFNNSWRVTPRNMYEPRLPRQADFIQLTDCSVTFYNTTAANLPNIIPDVIDVNQTVSDIIDNLPTATPPQWDVGIYNNTILNLTVEINDLQERSKNLSQIADRLQNYIDNLNNTLVDLEWLNRVETYLKWPWYIWLAIALALIAFVTILITIFLCTGCCGGCFGCCGGCFGLFSKKKRYTDDQPTPSFKFKEW

SEQ ID NO: 14940 - protein, 1160 aa, Artificial Sequence
  PDCoV/Swine/Thailand/S5011/2015__AMN91621.1 spike protein (1-1160)(E855P_V856P)
MQRALLIMTLLCLARAKFADDLLDLLTFPGAHRFLHKPTRNDSILYSRANNNFDVGVLPGYPTKNVNLFSPLTNSTLPINGLHRSYQPLMLNCLTKITNQTLSMYLQPSEIQTYSCGGAMVKYQTHDAVRIILDLIATDRISVEVVGQAGENYVFVCSDQFNYTTALHNSTFFSLNSQLYCFTNNTYLGILPPDLTDFTVYRTGQFYANGYLLGTLPITVNYVRLYRGQLSANSAHFALANLTDTLITLTNTTISQITYCDKSVVDSIACQRSSHQVEDGFYSDPKSAVRARQRTIVTLPKLPELEVVQLNISAHMDFGEARLDSVTINGNTSYCVTKPYFRLETNFLCRGCTMNLRTDTCSFDLSAVNNGMSFSQFCLSTESGACEMKIIVTYVWNYLLRQRLYVTAVEGQTHTGTTSVHATDTSSVITDVCTDYTIYGVSGTGIIKPSDLLLHNGIAFTSPTGELYAFKNITTGKTLQVLPCETPSQLIVINNTVVGAITSSNSTENNRFTTTIVTPTFFYSTNATTLNCTKPVLSYGPISVCSDGAIAGTSTLQNTRPSIVSLYDGEIEIPSAFSLSVQTEYLQVQAEQVIVDCPQYVCNGNSRCLQLLAQYTSACSNIEVALHSSAQLDSREIISMFKTSTQSLQLANITNFKGDYNFSSILTSRVGGRSAIEDLLFNKVVTSGLGTVDQDYKSCSRNMAIADLVCSQYYNGIMVLPGVVDAEKMAMYTGSLTGAMVFGGLTAAAAIPFATAVQARLNYVALQTNVLQENQKILAESFNQAVGNISLALSSVNDAIQQTSEALNTVAIAIKKIQTVVNQQGEALSHLTAQLSNNFQAISTSIQDIYNRLEPPEANQQVDRLINGRLAALNAYVTQLLNQMSQIRQSRLLAQQKINECVKSQSPRYGFCGNGTHIFSLTQTAPNGIFFMHAVLVPNKFTRVNASAGICVDNTRGYSLQPQLILYQFNNSWRVTPRNMYEPRLPRQADFIQLTDCSVTFYNTTAANLPNIIPDVIDVNQTVSDIIDNLPTATPPQWDVGIYNNTILNLTVEINDLQERSKNLSQIADRLQNYIDNLNNTLVDLEWLNRVETYLKWPWYIWLAIALALIAFVTILITIFLCTGCCGGCFGCCGGCFGLFSKKKRYTDDQPTPSFKFKEW

SEQ ID NO: 14941 - protein, 1093 aa, Artificial Sequence
  PDCoV/Swine/Thailand/S5011/2015__AMN91621.1 spike protein (variant)
MQRALLIMTLLCLARAKFADDLLDLLTFPGAHRFLHKPTRNDSILYSRANNNFDVGVLPGYPTKNVNLFSPLTNSTLPINGLHRSYQPLMLNCLTKITNQTLSMYLQPSEIQTYSCGGAMVKYQTHDAVRIILDLIATDRISVEVVGQAGENYVFVCSDQFNYTTALHNSTFFSLNSQLYCFTNNTYLGILPPDLTDFTVYRTGQFYANGYLLGTLPITVNYVRLYRGQLSANSAHFALANLTDTLITLTNTTISQITYCDKSVVDSIACQRSSHQVEDGFYSDPKSAVRARQRTIVTLPKLPELEVVQLNISAHMDFGEARLDSVTINGNTSYCVTKPYFRLETNFLCRGCTMNLRTDTCSFDLSAVNNGMSFSQFCLSTESGACEMKIIVTYVWNYLLRQRLYVTAVEGQTHTGTTSVHATDTSSVITDVCTDYTIYGVSGTGIIKPSDLLLHNGIAFTSPTGELYAFKNITTGKTLQVLPCETPSQLIVINNTVVGAITSSNSTENNRFTTTIVTPTFFYSTNATTLNCTKPVLSYGPISVCSDGAIAGTSTLQNTRPSIVSLYDGEIEIPSAFSLSVQTEYLQVQAEQVIVDCPQYVCNGNSRCLQLLAQYTSACSNIEVALHSSAQLDSREIISMFKTSTQSLQLANITNFKGDYNFSSILTSRVGGRSAIEDLLFNKVVTSGLGTVDQDYKSCSRNMAIADLVCSQYYNGIMVLPGVVDAEKMAMYTGSLTGAMVFGGLTAAAAIPFATAVQARLNYVALQTNVLQENQKILAESFNQAVGNISLALSSVNDAIQQTSEALNTVAIAIKKIQTVVNQQGEALSHLTAQLSNNFQAISTSIQDIYNRLEPPEANQQVDRLINGRLAALNAYVTQLLNQMSQIRQSRLLAQQKINECVKSQSPRYGFCGNGTHIFSLTQTAPNGIFFMHAVLVPNKFTRVNASAGICVDNTRGYSLQPQLILYQFNNSWRVTPRNMYEPRLPRQADFIQLTDCSVTFYNTTAANLPNIIPDVIDVNQTVSDIIDNLPTATPPQWDVGIYNNTILNLTVEINDLQERSKNLSQIADRLQNYIDNLNNTLVDLEWLNRVET

SEQ ID NO: 14942 - protein, 1120 aa, Artificial Sequence
  PDCoV/Swine/Thailand/S5011/2015__AMN91621.1 spike protein (variant)
MQRALLIMTLLCLARAKFADDLLDLLTFPGAHRFLHKPTRNDSILYSRANNNFDVGVLPGYPTKNVNLFSPLTNSTLPINGLHRSYQPLMLNCLTKITNQTLSMYLQPSEIQTYSCGGAMVKYQTHDAVRIILDLIATDRISVEVVGQAGENYVFVCSDQFNYTTALHNSTFFSLNSQLYCFTNNTYLGILPPDLTDFTVYRTGQFYANGYLLGTLPITVNYVRLYRGQLSANSAHFALANLTDTLITLTNTTISQITYCDKSVVDSIACQRSSHQVEDGFYSDPKSAVRARQRTIVTLPKLPELEVVQLNISAHMDFGEARLDSVTINGNTSYCVTKPYFRLETNFLCRGCTMNLRTDTCSFDLSAVNNGMSFSQFCLSTESGACEMKIIVTYVWNYLLRQRLYVTAVEGQTHTGTTSVHATDTSSVITDVCTDYTIYGVSGTGIIKPSDLLLHNGIAFTSPTGELYAFKNITTGKTLQVLPCETPSQLIVINNTVVGAITSSNSTENNRFTTTIVTPTFFYSTNATTLNCTKPVLSYGPISVCSDGAIAGTSTLQNTRPSIVSLYDGEIEIPSAFSLSVQTEYLQVQAEQVIVDCPQYVCNGNSRCLQLLAQYTSACSNIEVALHSSAQLDSREIISMFKTSTQSLQLANITNFKGDYNFSSILTSRVGGRSAIEDLLFNKVVTSGLGTVDQDYKSCSRNMAIADLVCSQYYNGIMVLPGVVDAEKMAMYTGSLTGAMVFGGLTAAAAIPFATAVQARLNYVALQTNVLQENQKILAESFNQAVGNISLALSSVNDAIQQTSEALNTVAIAIKKIQTVVNQQGEALSHLTAQLSNNFQAISTSIQDIYNRLEPPEANQQVDRLINGRLAALNAYVTQLLNQMSQIRQSRLLAQQKINECVKSQSPRYGFCGNGTHIFSLTQTAPNGIFFMHAVLVPNKFTRVNASAGICVDNTRGYSLQPQLILYQFNNSWRVTPRNMYEPRLPRQADFIQLTDCSVTFYNTTAANLPNIIPDVIDVNQTVSDIIDNLPTATPPQWDVGIYNNTILNLTVEINDLQERSKNLSQIADRLQNYIDNLNNTLVDLEWLNRVETGGYIPEAPRDGQAYVRKDGEWVLLSTF

SEQ ID NO: 14943 - protein, 1386 aa, Artificial Sequence
  PEDV/NPL-PEDv/2013/P10__AHZ94887.1 spike protein (1-1386)
MKSLTYFWLFLPVLSTLSLPQDVTRCSANTNFRRFFSKFNVQAPAVVVLGGYLPIGENQGVNSTWYCAGQHPTASGVHGIFVSHIRGGHGFEIGISQEPFDPSGYQLYLHKATNGNTNATARLRICQFPSIKTLGPTANNDVTTGRNCLFNKAIPAHMSEHSVVGITWDNDRVTVFSDKIYYFYFKNDWSRVATKCYNSGGCAMQYVYEPTYYMLNVTSAGEDGISYQPCTANCIGYAANVFATEPNGHIPEGFSFNNWFLLSNDSTLVHGKVVSNQPLLVNCLLAIPKIYGLGQFFSFNQTIDGVCNGAAVQRAPEALRFNINDISVILAEGSIVLHTALGTNFSFVCSNSSNPHLATFAIPLGATQVPYYCFFKVDTYNSTVYKFLAVLPPTVREIVITKYGDVYVNGFGYLHLGLLDAVTINFTGHGTDDDVSGFWTIASTNFVDALIEVQGTAIQRILYCDDPVSQLKCSQVAFDLDDGFYTISSRNLLSHEQPISFVTLPSFNDHSFVNITVSASFGGHSGANLIASDTTINGFSSFCVDTRQFTISLFYNVTNSYGYVSKSQDSNCPFTLQSVNDYLSFSKFCVSTSLLASACTIDLFGYPEFGSGVKFTSLYFQFTKGELITGTPKPLEGVTDVSFMTLDVCTKYTIYGFKGEGIITLTNSSFLAGVYYTSDSGQLLAFKNVTSGAVYSVTPCSFSEQAAYVDDDIVGVISSLSSSTFNSTRELPGFFYHSNDGSNCTEPVLVYSNIGVCKSGSIGYVPSQSGQVKIAPTVTGNISIPTNFSMSIRTEYLQLYNTPVSVDCATYVCNGNSRCKQLLTQYTAACKTIESALQLSARLESVEVNSMLTISDEALQLATISSFNGDGYNFTNVLGVSVYDPASRRVVQKRSFIEDLLFNKVVTNGLGTVDEDYKRCSNGRSVADLVCAQYYSGVMVLPGVVDAEKLHMYSASLIGGMVLGGFTSAAALPFSYAVQARLNYLALQTDVLQRNQQLLAESFNSAIGNITSAFESVKEAISQTSKGLNTVAHALTKVQEVVNSQGAALTQLTVQLQHNFQAISSSIDDIYSRLDILSADAQVDRLITGRLSALNAFVAQTLTKYTEVQASRKLAQQKVNECVKSQSQRYGFCGGDGEHIFSLVQAAPQGLLFLHTVLVPSDFVDVIAIAGLCVNDEIALTLREPGLVLFTHELQNHTATEYFVSSRRMFEPRKPTVSDFVQIESCVVTYVNLTRDQLPDVIPDYIDVNKTLYEILASLPNRTGPSLPLDVFNATYLNLTGEIADLEQRSESLRNTTEELQSLIYNINNTLVDLEWLNRVETYIKWPWWVWLIIFIVLIFVVSLLVFCCISTGCCGCCGCCCACFSGCCRGPRLQPYEVFEKVHVQ

SEQ ID NO: 14944 - protein, 1386 aa, Artificial Sequence
  PEDV/NPL-PEDv/2013/P10__AHZ94887.1 spike protein (1-1386)(I1076P_L1077P)
MKSLTYFWLFLPVLSTLSLPQDVTRCSANTNFRRFFSKFNVQAPAVVVLGGYLPIGENQGVNSTWYCAGQHPTASGVHGIFVSHIRGGHGFEIGISQEPFDPSGYQLYLHKATNGNTNATARLRICQFPSIKTLGPTANNDVTTGRNCLFNKAIPAHMSEHSVVGITWDNDRVTVFSDKIYYFYFKNDWSRVATKCYNSGGCAMQYVYEPTYYMLNVTSAGEDGISYQPCTANCIGYAANVFATEPNGHIPEGFSFNNWFLLSNDSTLVHGKVVSNQPLLVNCLLAIPKIYGLGQFFSFNQTIDGVCNGAAVQRAPEALRFNINDISVILAEGSIVLHTALGTNFSFVCSNSSNPHLATFAIPLGATQVPYYCFFKVDTYNSTVYKFLAVLPPTVREIVITKYGDVYVNGFGYLHLGLLDAVTINFTGHGTDDDVSGFWTIASTNFVDALIEVQGTAIQRILYCDDPVSQLKCSQVAFDLDDGFYTISSRNLLSHEQPISFVTLPSFNDHSFVNITVSASFGGHSGANLIASDTTINGFSSFCVDTRQFTISLFYNVTNSYGYVSKSQDSNCPFTLQSVNDYLSFSKFCVSTSLLASACTIDLFGYPEFGSGVKFTSLYFQFTKGELITGTPKPLEGVTDVSFMTLDVCTKYTIYGFKGEGIITLTNSSFLAGVYYTSDSGQLLAFKNVTSGAVYSVTPCSFSEQAAYVDDDIVGVISSLSSSTFNSTRELPGFFYHSNDGSNCTEPVLVYSNIGVCKSGSIGYVPSQSGQVKIAPTVTGNISIPTNFSMSIRTEYLQLYNTPVSVDCATYVCNGNSRCKQLLTQYTAACKTIESALQLSARLESVEVNSMLTISDEALQLATISSFNGDGYNFTNVLGVSVYDPASRRVVQKRSFIEDLLFNKVVTNGLGTVDEDYKRCSNGRSVADLVCAQYYSGVMVLPGVVDAEKLHMYSASLIGGMVLGGFTSAAALPFSYAVQARLNYLALQTDVLQRNQQLLAESFNSAIGNITSAFESVKEAISQTSKGLNTVAHALTKVQEVVNSQGAALTQLTVQLQHNFQAISSSIDDIYSRLDPPSADAQVDRLITGRLSALNAFVAQTLTKYTEVQASRKLAQQKVNECVKSQSQRYGFCGGDGEHIFSLVQAAPQGLLFLHTVLVPSDFVDVIAIAGLCVNDEIALTLREPGLVLFTHELQNHTATEYFVSSRRMFEPRKPTVSDFVQIESCVVTYVNLTRDQLPDVIPDYIDVNKTLYEILASLPNRTGPSLPLDVFNATYLNLTGEIADLEQRSESLRNTTEELQSLIYNINNTLVDLEWLNRVETYIKWPWWVWLIIFIVLIFVVSLLVFCCISTGCCGCCGCCCACFSGCCRGPRLQPYEVFEKVHVQ

SEQ ID NO: 14945 - protein, 1322 aa, Artificial Sequence
  PEDV/NPL-PEDv/2013/P10__AHZ94887.1 spike protein (variant)
MKSLTYFWLFLPVLSTLSLPQDVTRCSANTNFRRFFSKFNVQAPAVVVLGGYLPIGENQGVNSTWYCAGQHPTASGVHGIFVSHIRGGHGFEIGISQEPFDPSGYQLYLHKATNGNTNATARLRICQFPSIKTLGPTANNDVTTGRNCLFNKAIPAHMSEHSVVGITWDNDRVTVFSDKIYYFYFKNDWSRVATKCYNSGGCAMQYVYEPTYYMLNVTSAGEDGISYQPCTANCIGYAANVFATEPNGHIPEGFSFNNWFLLSNDSTLVHGKVVSNQPLLVNCLLAIPKIYGLGQFFSFNQTIDGVCNGAAVQRAPEALRFNINDISVILAEGSIVLHTALGTNFSFVCSNSSNPHLATFAIPLGATQVPYYCFFKVDTYNSTVYKFLAVLPPTVREIVITKYGDVYVNGFGYLHLGLLDAVTINFTGHGTDDDVSGFWTIASTNFVDALIEVQGTAIQRILYCDDPVSQLKCSQVAFDLDDGFYTISSRNLLSHEQPISFVTLPSFNDHSFVNITVSASFGGHSGANLIASDTTINGFSSFCVDTRQFTISLFYNVTNSYGYVSKSQDSNCPFTLQSVNDYLSFSKFCVSTSLLASACTIDLFGYPEFGSGVKFTSLYFQFTKGELITGTPKPLEGVTDVSFMTLDVCTKYTIYGFKGEGIITLTNSSFLAGVYYTSDSGQLLAFKNVTSGAVYSVTPCSFSEQAAYVDDDIVGVISSLSSSTFNSTRELPGFFYHSNDGSNCTEPVLVYSNIGVCKSGSIGYVPSQSGQVKIAPTVTGNISIPTNFSMSIRTEYLQLYNTPVSVDCATYVCNGNSRCKQLLTQYTAACKTIESALQLSARLESVEVNSMLTISDEALQLATISSFNGDGYNFTNVLGVSVYDPASRRVVQKRSFIEDLLFNKVVTNGLGTVDEDYKRCSNGRSVADLVCAQYYSGVMVLPGVVDAEKLHMYSASLIGGMVLGGFTSAAALPFSYAVQARLNYLALQTDVLQRNQQLLAESFNSAIGNITSAFESVKEAISQTSKGLNTVAHALTKVQEVVNSQGAALTQLTVQLQHNFQAISSSIDDIYSRLDPPSADAQVDRLITGRLSALNAFVAQTLTKYTEVQASRKLAQQKVNECVKSQSQRYGFCGGDGEHIFSLVQAAPQGLLFLHTVLVPSDFVDVIAIAGLCVNDEIALTLREPGLVLFTHELQNHTATEYFVSSRRMFEPRKPTVSDFVQIESCVVTYVNLTRDQLPDVIPDYIDVNKTLYEILASLPNRTGPSLPLDVFNATYLNLTGEIADLEQRSESLRNTTEELQSLIYNINNTLVDLEWLNRVET

SEQ ID NO: 14946 - protein, 1349 aa, Artificial Sequence
  PEDV/NPL-PEDv/2013/P10__AHZ94887.1 spike protein (variant)
MKSLTYFWLFLPVLSTLSLPQDVTRCSANTNFRRFFSKFNVQAPAVVVLGGYLPIGENQGVNSTWYCAGQHPTASGVHGIFVSHIRGGHGFEIGISQEPFDPSGYQLYLHKATNGNTNATARLRICQFPSIKTLGPTANNDVTTGRNCLFNKAIPAHMSEHSVVGITWDNDRVTVFSDKIYYFYFKNDWSRVATKCYNSGGCAMQYVYEPTYYMLNVTSAGEDGISYQPCTANCIGYAANVFATEPNGHIPEGFSFNNWFLLSNDSTLVHGKVVSNQPLLVNCLLAIPKIYGLGQFFSFNQTIDGVCNGAAVQRAPEALRFNINDISVILAEGSIVLHTALGTNFSFVCSNSSNPHLATFAIPLGATQVPYYCFFKVDTYNSTVYKFLAVLPPTVREIVITKYGDVYVNGFGYLHLGLLDAVTINFTGHGTDDDVSGFWTIASTNFVDALIEVQGTAIQRILYCDDPVSQLKCSQVAFDLDDGFYTISSRNLLSHEQPISFVTLPSFNDHSFVNITVSASFGGHSGANLIASDTTINGFSSFCVDTRQFTISLFYNVTNSYGYVSKSQDSNCPFTLQSVNDYLSFSKFCVSTSLLASACTIDLFGYPEFGSGVKFTSLYFQFTKGELITGTPKPLEGVTDVSFMTLDVCTKYTIYGFKGEGIITLTNSSFLAGVYYTSDSGQLLAFKNVTSGAVYSVTPCSFSEQAAYVDDDIVGVISSLSSSTFNSTRELPGFFYHSNDGSNCTEPVLVYSNIGVCKSGSIGYVPSQSGQVKIAPTVTGNISIPTNFSMSIRTEYLQLYNTPVSVDCATYVCNGNSRCKQLLTQYTAACKTIESALQLSARLESVEVNSMLTISDEALQLATISSFNGDGYNFTNVLGVSVYDPASRRVVQKRSFIEDLLFNKVVTNGLGTVDEDYKRCSNGRSVADLVCAQYYSGVMVLPGVVDAEKLHMYSASLIGGMVLGGFTSAAALPFSYAVQARLNYLALQTDVLQRNQQLLAESFNSAIGNITSAFESVKEAISQTSKGLNTVAHALTKVQEVVNSQGAALTQLTVQLQHNFQAISSSIDDIYSRLDPPSADAQVDRLITGRLSALNAFVAQTLTKYTEVQASRKLAQQKVNECVKSQSQRYGFCGGDGEHIFSLVQAAPQGLLFLHTVLVPSDFVDVIAIAGLCVNDEIALTLREPGLVLFTHELQNHTATEYFVSSRRMFEPRKPTVSDFVQIESCVVTYVNLTRDQLPDVIPDYIDVNKTLYEILASLPNRTGPSLPLDVFNATYLNLTGEIADLEQRSESLRNTTEELQSLIYNINNTLVDLEWLNRVETGGYIPEAPRDGQAYVRKDGEWVLLSTF

SEQ ID NO: 14947 - protein, 1361 aa, Artificial Sequence
  MHV/S__BAK18575.1 spike protein (1-1361)
MLSVFILFLPSCLGYIGDFRCINLVNTDTSNASAPSVSTEVVDVSKGIGTYYVLDRVYLNATLLLTGYYPVDGSNYRNLALTGTNTLSLNWYKPPFLSEFNDGIFAKVKNLKASLPKDSTSYFPTIVIGSNFVTTSYTVVLEPYNGIIMASICQYTICLLPYTDCKPNTGGNKLIGFWHIDLKSPVCILKRNFTFNVNADWLYFHFYQQGGTFYAYYADAGSATTFLFSSYIGDVLTQYFVLPFVCTPTTTGVFSPQYWVTPLVKRQYLFNFNQKGTITSAVDCASSYTSEIKCKTQSMNPNTGVYDLSGYTVQPVGLVYRRVRNLPDCRIEDWLAAKTVPSPLNWERKTFQNCNFNLSSLLRLVQAGSLSCSNIDAAKVYGMCFGSMSIDKFAIPNSRRVDLQLGNSGFLQSFNYKIDTRATSCQLYYSLAQSNVTVNNHNPSSWNRRYGFNDVATFGRGKHDVAYAEACFTVGASYCPCANPSIVSPCTTGKPKFANCPTGTTNRECNVLALGSNLFKCDCTCNPSPLTTYDLRCLQGRSMLGVGDHCEGLGVLEDKCGGSNTCNCSADAFVGWAKDSCLSNGRCHIFSNLMLNGINSGTTCSTDLQLPNTEVVTGICVKYDLYGITGQGVFKEVKADYYNSWQNLLYDVNGNLNGFRDIVTNKTYLTRSCYSGRVSAAYHQDAPEPALLYRNLKCDYVFNNNIFREETPLNYFDSYLGCVVNADNSTEQAVDACDLRMGSGLCVNYSTAHRARTSVSTGYKLTTFEPFTVSIVNDSVESVGGLYEMQIPTNFTIASHQEFIQTRAPKVTIDCAAFVCGDYTTCRQQLVEYGSFCDNINAILGEVNNLIDTMQLQVASALIQGVTLSSRLADGISGQIDDINFSPLLGCLGSQCSEGTMAAQGRSTVEDLLFDKVKLSDVGFVEAYNNCTGGQEVRDLLCVQSFNGIKVLPPVLSENQVSGYTAGATASSMFPPWSAAAGVPFSLSVQYRINGLGVTMNVLSENQKMIASAFNNAIGAIQEGFDATNSALAKIQSVVNANAEALNNLLNQLSNRFGAISASLQEILSRLDALEAQAQIDRLINGRLTALNAYVSKQLSDMTLIKVSAAQAIEKVNECVKSQSPRINFCGNGNHILSLVQNAPYGLYFLHFSYVPTSFTTANVSPGLCISGDRGLAPKAGYFVQDDGEWKFTGSNYYYPEPITDKNSVVMSSCAVNYTKAPEVFLNTSISNLPDFKEELDKWFKNQTSVAPDLSLDFEKLNVTFLDLSDEMNRIQEAIKKLNESYINLKEIGTYEMYVKWPWYVWLLIGLAGVAVCVLLFFICCCTGCGSCCFKKCGNCCDEYGGHQDSIVIHNISSHED

SEQ ID NO: 14948 - protein, 1361 aa, Artificial Sequence
  MHV/S__BAK18575.1 spike protein (1-1361)(A1073P_L1074P)
MLSVFILFLPSCLGYIGDFRCINLVNTDTSNASAPSVSTEVVDVSKGIGTYYVLDRVYLNATLLLTGYYPVDGSNYRNLALTGTNTLSLNWYKPPFLSEFNDGIFAKVKNLKASLPKDSTSYFPTIVIGSNFVTTSYTVVLEPYNGIIMASICQYTICLLPYTDCKPNTGGNKLIGFWHIDLKSPVCILKRNFTFNVNADWLYFHFYQQGGTFYAYYADAGSATTFLFSSYIGDVLTQYFVLPFVCTPTTTGVFSPQYWVTPLVKRQYLFNFNQKGTITSAVDCASSYTSEIKCKTQSMNPNTGVYDLSGYTVQPVGLVYRRVRNLPDCRIEDWLAAKTVPSPLNWERKTFQNCNFNLSSLLRLVQAGSLSCSNIDAAKVYGMCFGSMSIDKFAIPNSRRVDLQLGNSGFLQSFNYKIDTRATSCQLYYSLAQSNVTVNNHNPSSWNRRYGFNDVATFGRGKHDVAYAEACFTVGASYCPCANPSIVSPCTTGKPKFANCPTGTTNRECNVLALGSNLFKCDCTCNPSPLTTYDLRCLQGRSMLGVGDHCEGLGVLEDKCGGSNTCNCSADAFVGWAKDSCLSNGRCHIFSNLMLNGINSGTTCSTDLQLPNTEVVTGICVKYDLYGITGQGVFKEVKADYYNSWQNLLYDVNGNLNGFRDIVTNKTYLTRSCYSGRVSAAYHQDAPEPALLYRNLKCDYVFNNNIFREETPLNYFDSYLGCVVNADNSTEQAVDACDLRMGSGLCVNYSTAHRARTSVSTGYKLTTFEPFTVSIVNDSVESVGGLYEMQIPTNFTIASHQEFIQTRAPKVTIDCAAFVCGDYTTCRQQLVEYGSFCDNINAILGEVNNLIDTMQLQVASALIQGVTLSSRLADGISGQIDDINFSPLLGCLGSQCSEGTMAAQGRSTVEDLLFDKVKLSDVGFVEAYNNCTGGQEVRDLLCVQSFNGIKVLPPVLSENQVSGYTAGATASSMFPPWSAAAGVPFSLSVQYRINGLGVTMNVLSENQKMIASAFNNAIGAIQEGFDATNSALAKIQSVVNANAEALNNLLNQLSNRFGAISASLQEILSRLDPPEAQAQIDRLINGRLTALNAYVSKQLSDMTLIKVSAAQAIEKVNECVKSQSPRINFCGNGNHILSLVQNAPYGLYFLHFSYVPTSFTTANVSPGLCISGDRGLAPKAGYFVQDDGEWKFTGSNYYYPEPITDKNSVVMSSCAVNYTKAPEVFLNTSISNLPDFKEELDKWFKNQTSVAPDLSLDFEKLNVTFLDLSDEMNRIQEAIKKLNESYINLKEIGTYEMYVKWPWYVWLLIGLAGVAVCVLLFFICCCTGCGSCCFKKCGNCCDEYGGHQDSIVIHNISSHED

SEQ ID NO: 14949 - protein, 1297 aa, Artificial Sequence
  MHV/S__BAK18575.1 spike protein (variant)
MLSVFILFLPSCLGYIGDFRCINLVNTDTSNASAPSVSTEVVDVSKGIGTYYVLDRVYLNATLLLTGYYPVDGSNYRNLALTGTNTLSLNWYKPPFLSEFNDGIFAKVKNLKASLPKDSTSYFPTIVIGSNFVTTSYTVVLEPYNGIIMASICQYTICLLPYTDCKPNTGGNKLIGFWHIDLKSPVCILKRNFTFNVNADWLYFHFYQQGGTFYAYYADAGSATTFLFSSYIGDVLTQYFVLPFVCTPTTTGVFSPQYWVTPLVKRQYLFNFNQKGTITSAVDCASSYTSEIKCKTQSMNPNTGVYDLSGYTVQPVGLVYRRVRNLPDCRIEDWLAAKTVPSPLNWERKTFQNCNFNLSSLLRLVQAGSLSCSNIDAAKVYGMCFGSMSIDKFAIPNSRRVDLQLGNSGFLQSFNYKIDTRATSCQLYYSLAQSNVTVNNHNPSSWNRRYGFNDVATFGRGKHDVAYAEACFTVGASYCPCANPSIVSPCTTGKPKFANCPTGTTNRECNVLALGSNLFKCDCTCNPSPLTTYDLRCLQGRSMLGVGDHCEGLGVLEDKCGGSNTCNCSADAFVGWAKDSCLSNGRCHIFSNLMLNGINSGTTCSTDLQLPNTEVVTGICVKYDLYGITGQGVFKEVKADYYNSWQNLLYDVNGNLNGFRDIVTNKTYLTRSCYSGRVSAAYHQDAPEPALLYRNLKCDYVFNNNIFREETPLNYFDSYLGCVVNADNSTEQAVDACDLRMGSGLCVNYSTAHRARTSVSTGYKLTTFEPFTVSIVNDSVESVGGLYEMQIPTNFTIASHQEFIQTRAPKVTIDCAAFVCGDYTTCRQQLVEYGSFCDNINAILGEVNNLIDTMQLQVASALIQGVTLSSRLADGISGQIDDINFSPLLGCLGSQCSEGTMAAQGRSTVEDLLFDKVKLSDVGFVEAYNNCTGGQEVRDLLCVQSFNGIKVLPPVLSENQVSGYTAGATASSMFPPWSAAAGVPFSLSVQYRINGLGVTMNVLSENQKMIASAFNNAIGAIQEGFDATNSALAKIQSVVNANAEALNNLLNQLSNRFGAISASLQEILSRLDPPEAQAQIDRLINGRLTALNAYVSKQLSDMTLIKVSAAQAIEKVNECVKSQSPRINFCGNGNHILSLVQNAPYGLYFLHFSYVPTSFTTANVSPGLCISGDRGLAPKAGYFVQDDGEWKFTGSNYYYPEPITDKNSVVMSSCAVNYTKAPEVFLNTSISNLPDFKEELDKWFKNQTSVAPDLSLDFEKLNVTFLDLSDEMNRIQEAIKKLNESYINLKEIGTYEM

SEQ ID NO: 14950 - protein, 1324 aa, Artificial Sequence
  MHV/S__BAK18575.1 spike protein (variant)
MLSVFILFLPSCLGYIGDFRCINLVNTDTSNASAPSVSTEVVDVSKGIGTYYVLDRVYLNATLLLTGYYPVDGSNYRNLALTGTNTLSLNWYKPPFLSEFNDGIFAKVKNLKASLPKDSTSYFPTIVIGSNFVTTSYTVVLEPYNGIIMASICQYTICLLPYTDCKPNTGGNKLIGFWHIDLKSPVCILKRNFTFNVNADWLYFHFYQQGGTFYAYYADAGSATTFLFSSYIGDVLTQYFVLPFVCTPTTTGVFSPQYWVTPLVKRQYLFNFNQKGTITSAVDCASSYTSEIKCKTQSMNPNTGVYDLSGYTVQPVGLVYRRVRNLPDCRIEDWLAAKTVPSPLNWERKTFQNCNFNLSSLLRLVQAGSLSCSNIDAAKVYGMCFGSMSIDKFAIPNSRRVDLQLGNSGFLQSFNYKIDTRATSCQLYYSLAQSNVTVNNHNPSSWNRRYGFNDVATFGRGKHDVAYAEACFTVGASYCPCANPSIVSPCTTGKPKFANCPTGTTNRECNVLALGSNLFKCDCTCNPSPLTTYDLRCLQGRSMLGVGDHCEGLGVLEDKCGGSNTCNCSADAFVGWAKDSCLSNGRCHIFSNLMLNGINSGTTCSTDLQLPNTEVVTGICVKYDLYGITGQGVFKEVKADYYNSWQNLLYDVNGNLNGFRDIVTNKTYLTRSCYSGRVSAAYHQDAPEPALLYRNLKCDYVFNNNIFREETPLNYFDSYLGCVVNADNSTEQAVDACDLRMGSGLCVNYSTAHRARTSVSTGYKLTTFEPFTVSIVNDSVESVGGLYEMQIPTNFTIASHQEFIQTRAPKVTIDCAAFVCGDYTTCRQQLVEYGSFCDNINAILGEVNNLIDTMQLQVASALIQGVTLSSRLADGISGQIDDINFSPLLGCLGSQCSEGTMAAQGRSTVEDLLFDKVKLSDVGFVEAYNNCTGGQEVRDLLCVQSFNGIKVLPPVLSENQVSGYTAGATASSMFPPWSAAAGVPFSLSVQYRINGLGVTMNVLSENQKMIASAFNNAIGAIQEGFDATNSALAKIQSVVNANAEALNNLLNQLSNRFGAISASLQEILSRLDPPEAQAQIDRLINGRLTALNAYVSKQLSDMTLIKVSAAQAIEKVNECVKSQSPRINFCGNGNHILSLVQNAPYGLYFLHFSYVPTSFTTANVSPGLCISGDRGLAPKAGYFVQDDGEWKFTGSNYYYPEPITDKNSVVMSSCAVNYTKAPEVFLNTSISNLPDFKEELDKWFKNQTSVAPDLSLDFEKLNVTFLDLSDEMNRIQEAIKKLNESYINLKEIGTYEMGGYIPEAPRDGQAYVRKDGEWVLLSTF

SEQ ID NO: 14951 - RNA, 3768 nt, Artificial Sequence
  SARS-CoV__P59594.1 spike protein CDS gc (1-1255)
auguucaucuuccugcuguuccugacccugaccagcggcuccgaccucgaccgcugcacgaccuucgacgacgugcaggcccccaacuacacccagcacaccagcuccaugcgcggggucuacuacccggacgagaucuuccggagcgacacgcuguaccugacccaggaccucuuccugcccuucuacuccaacgugaccggcuuccacaccaucaaccacacguucgggaaccccgugauccccuucaaggacggcaucuacuucgccgcgaccgagaaguccaacgucgugcggggguggguguucggcagcaccaugaacaacaagagccaguccgucaucaucaucaacaacagcaccaacguggugauccgcgccugcaacuucgagcugugcgacaacccguucuucgccgucuccaagcccaugggcacgcagacccacaccaugaucuucgacaacgccuucaacugcaccuucgaguacaucagcgacgccuucucccucgacgugagcgagaaguccgggaacuucaagcaccuccgggaguucguguucaagaacaaggacggcuuccuguacgucuacaagggguaccagcccaucgacguggugcgcgaccuccccagcggcuucaacacgcugaagccgaucuucaagcugccccucgggaucaacaucaccaacuuccgggcgauccugaccgccuucucccccgcccaggacaucuggggcaccagcgccgcggccuacuucgucggcuaccugaagcccacgaccuucaugcucaaguacgacgagaacgggaccaucaccgacgccguggacugcucccagaacccgcuggccgagcugaagugcagcgucaagagcuucgagaucgacaagggcaucuaccagacguccaacuuccgcguggugcccagcggggacgugguccgguuccccaacaucaccaaccucugccccuucggcgagguguucaacgccaccaaguucccguccguguacgcgugggagcgcaagaagaucagcaacugcgucgccgacuacuccgugcuguacaacagcaccuucuucuccacguucaagugcuacggcgucagcgccaccaagcugaacgaccucugcuucuccaacguguacgccgacagcuucguggucaagggggacgacgugcggcagaucgcccccggccagaccggggugaucgcggacuacaacuacaagcugcccgacgacuucaugggcugcguccuggccuggaacacccgcaacaucgacgccacguccaccgggaacuacaacuacaaguaccgguaccuccgccacggcaagcugcggcccuucgagcgcgacaucagcaacgugccguucucccccgacggcaagcccugcacgcccccggcccugaacugcuacuggccccucaacgacuacggguucuacaccaccaccggcaucggguaccagcccuaccggguggucgugcugagcuucgagcugcucaacgcccccgcgaccgugugcggcccgaagcuguccaccgaccugaucaagaaccagugcgucaacuucaacuucaacgggcucaccggcacgggcgugcugacccccagcuccaagcgcuuccagcccuuccagcaguucgggcgggacgugagcgacuucaccgacuccguccgcgacccgaagaccagcgagauccuggacaucagccccugcuccuucggcggggugagcgugaucacgcccggcaccaacgccuccagcgaggucgccgugcucuaccaggacgugaacugcaccgacgucuccaccgccauccacgccgaccagcugacgcccgcguggcggaucuacagcaccgggaacaacguguuccagacccaggccggcugccugaucggcgccgagcacguggacaccuccuacgagugcgacaucccgaucggggccggcaucugcgcgagcuaccacacggucucccuccugcgcagcaccucccagaaguccaucguggccuacaccaugagccugggggccgacagcuccaucgccuacagcaacaacaccaucgccauccccacgaacuucuccaucagcaucaccaccgaggugaugcccgucagcauggcgaagaccuccguggacugcaacauguacaucugcggcgacagcacggagugcgccaaccuccugcugcaguacggcuccuucugcacccagcugaaccgcgcccucagcgggaucgccgccgagcaggaccggaacacccgcgagguguucgcgcaggucaagcagauguacaagacccccacgcugaaguacuucggcggguucaacuucucccagauccugccggacccccucaagcccaccaagcggagcuucaucgaggaccugcuguucaacaaggugacccucgccgacgccggcuucaugaagcaguacggggagugccugggcgacaucaacgcccgcgaccugaucugcgcccagaaguucaacggccucaccgugcugcccccgcugcucacggacgacaugaucgcggccuacaccgccgcccuggucuccgggaccgcgaccgccggcuggacguucggggccggcgccgcccugcagauccccuucgcgaugcagauggccuaccgguucaacgggaucggcgugacccagaacgugcucuacgagaaccagaagcagaucgccaaccaguucaacaaggccaucagccagauccaggagucccugaccaccacgagcaccgcccugggcaagcuccaggacgucgugaaccagaacgcgcaggcccugaacacccuggugaagcagcucuccagcaacuucggggccaucuccagcguccugaacgacauccugucccgccucgacaagguggaggccgaggugcagaucgaccggcugaucaccggccgccugcagagccuccagaccuacgucacgcagcagcugauccgggccgcggagauccgcgccuccgccaaccuggccgcgaccaagaugagcgagugcgugcucgggcaguccaagcggguggacuucugcggcaagggguaccaccugaugagcuucccccaggccgcgccccacggcgucguguuccugcacgugaccuacgucccgagccaggagcgcaacuucaccacggcccccgccaucugccacgagggcaaggccuacuucccccgggaggggguguucguguucaacggcaccuccugguucaucacccagcgcaacuucuucagcccccagaucaucaccacggacaacaccuucgucuccgggaacugcgacguggucaucggcaucaucaacaacaccguguacgacccgcuccagcccgagcuggacagcuucaaggaggagcuggacaaguacuucaagaaccacaccucccccgacguggaccucggggacaucagcggcaucaacgccuccgucgugaacauccagaaggagaucgaccggcugaacgagguggccaagaaccugaacgagagccucaucgaccugcaggagcugggcaaguacgagcaguacaucaaguggcccugguacgucuggcucggguucaucgccggccugaucgccaucgugauggugacgauccugcucugcugcaugaccuccugcugcagcugccugaagggggcgugcuccugcggcagcugcugcaaguucgacgaggacgacuccgagccgguccugaagggcgugaagcuccacuacaccuga

SEQ ID NO: 14952 - RNA, 3768 nt, Artificial Sequence
  SARS-CoV__P59594.1 spike protein CDS gc (1-1255)(K968P_V969P)
auguucaucuuccugcuguuccugacccugaccagcggcuccgaccucgaccgcugcacgaccuucgacgacgugcaggcccccaacuacacccagcacaccagcuccaugcgcggggucuacuacccggacgagaucuuccggagcgacacgcuguaccugacccaggaccucuuccugcccuucuacuccaacgugaccggcuuccacaccaucaaccacacguucgggaaccccgugauccccuucaaggacggcaucuacuucgccgcgaccgagaaguccaacgucgugcggggguggguguucggcagcaccaugaacaacaagagccaguccgucaucaucaucaacaacagcaccaacguggugauccgcgccugcaacuucgagcugugcgacaacccguucuucgccgucuccaagcccaugggcacgcagacccacaccaugaucuucgacaacgccuucaacugcaccuucgaguacaucagcgacgccuucucccucgacgugagcgagaaguccgggaacuucaagcaccuccgggaguucguguucaagaacaaggacggcuuccuguacgucuacaagggguaccagcccaucgacguggugcgcgaccuccccagcggcuucaacacgcugaagccgaucuucaagcugccccucgggaucaacaucaccaacuuccgggcgauccugaccgccuucucccccgcccaggacaucuggggcaccagcgccgcggccuacuucgucggcuaccugaagcccacgaccuucaugcucaaguacgacgagaacgggaccaucaccgacgccguggacugcucccagaacccgcuggccgagcugaagugcagcgucaagagcuucgagaucgacaagggcaucuaccagacguccaacuuccgcguggugcccagcggggacgugguccgguuccccaacaucaccaaccucugccccuucggcgagguguucaacgccaccaaguucccguccguguacgcgugggagcgcaagaagaucagcaacugcgucgccgacuacuccgugcuguacaacagcaccuucuucuccacguucaagugcuacggcgucagcgccaccaagcugaacgaccucugcuucuccaacguguacgccgacagcuucguggucaagggggacgacgugcggcagaucgcccccggccagaccggggugaucgcggacuacaacuacaagcugcccgacgacuucaugggcugcguccuggccuggaacacccgcaacaucgacgccacguccaccgggaacuacaacuacaaguaccgguaccuccgccacggcaagcugcggcccuucgagcgcgacaucagcaacgugccguucucccccgacggcaagcccugcacgcccccggcccugaacugcuacuggccccucaacgacuacggguucuacaccaccaccggcaucggguaccagcccuaccggguggucgugcugagcuucgagcugcucaacgcccccgcgaccgugugcggcccgaagcuguccaccgaccugaucaagaaccagugcgucaacuucaacuucaacgggcucaccggcacgggcgugcugacccccagcuccaagcgcuuccagcccuuccagcaguucgggcgggacgugagcgacuucaccgacuccguccgcgacccgaagaccagcgagauccuggacaucagccccugcuccuucggcggggugagcgugaucacgcccggcaccaacgccuccagcgaggucgccgugcucuaccaggacgugaacugcaccgacgucuccaccgccauccacgccgaccagcugacgcccgcguggcggaucuacagcaccgggaacaacguguuccagacccaggccggcugccugaucggcgccgagcacguggacaccuccuacgagugcgacaucccgaucggggccggcaucugcgcgagcuaccacacggucucccuccugcgcagcaccucccagaaguccaucguggccuacaccaugagccugggggccgacagcuccaucgccuacagcaacaacaccaucgccauccccacgaacuucuccaucagcaucaccaccgaggugaugcccgucagcauggcgaagaccuccguggacugcaacauguacaucugcggcgacagcacggagugcgccaaccuccugcugcaguacggcuccuucugcacccagcugaaccgcgcccucagcgggaucgccgccgagcaggaccggaacacccgcgagguguucgcgcaggucaagcagauguacaagacccccacgcugaaguacuucggcggguucaacuucucccagauccugccggacccccucaagcccaccaagcggagcuucaucgaggaccugcuguucaacaaggugacccucgccgacgccggcuucaugaagcaguacggggagugccugggcgacaucaacgcccgcgaccugaucugcgcccagaaguucaacggccucaccgugcugcccccgcugcucacggacgacaugaucgcggccuacaccgccgcccuggucuccgggaccgcgaccgccggcuggacguucggggccggcgccgcccugcagauccccuucgcgaugcagauggccuaccgguucaacgggaucggcgugacccagaacgugcucuacgagaaccagaagcagaucgccaaccaguucaacaaggccaucagccagauccaggagucccugaccaccacgagcaccgcccugggcaagcuccaggacgucgugaaccagaacgcgcaggcccugaacacccuggugaagcagcucuccagcaacuucggggccaucuccagcguccugaacgacauccugucccgccucgacccgcccgaggccgaggugcagaucgaccggcugaucaccggccgccugcagagccuccagaccuacgugacgcagcagcugauccgggccgcggagauccgcgccuccgccaaccuggccgcgaccaagaugagcgagugcguccucgggcaguccaagcggguggacuucugcggcaagggguaccaccugaugagcuucccccaggccgcgccccacggcguggucuuccugcacgugaccuacgugcccagccaggagcgcaacuucaccacggcccccgccaucugccacgagggcaaggccuacuucccgcgggagggggucuucguguucaacggcaccuccugguucaucacccagcgcaacuucuucagcccccagaucaucaccacggacaacaccuucguguccgggaacugcgacgucgugaucggcaucaucaacaacaccgucuacgacccccuccagcccgagcuggacagcuucaaggaggagcuggacaaguacuucaagaaccacaccuccccggacguggaccucggggacaucagcggcaucaacgccuccguggucaacauccagaaggagaucgaccggcugaacgagguggccaagaaccugaacgagagccucaucgaccugcaggagcugggcaaguacgagcaguacaucaaguggcccugguacguguggcucggguucaucgccggccugaucgccaucgucauggugacgauccugcucugcugcaugaccuccugcugcagcugccugaagggggcgugcuccugcggcagcugcugcaaguucgacgaggacgacuccgagcccgugcugaagggcgucaagcuccacuacaccuga

SEQ ID NO: 14953 - RNA, 1581 nt, Artificial Sequence
  SARS-CoV__P59594.1 spike protein CDS gc (1-17_747-1255)
auguucaucuuccugcuguuccugacccugaccagcggcuccgaccucgaccgcgcccugagcgggaucgccgcggagcaggaccggaacacgcgcgagguguucgcccaggucaagcagauguacaagacccccacccugaaguacuucggcggguucaacuucucccagauccucccggacccccugaagcccaccaagcggagcuucaucgaggaccuccucuucaacaaggugacgcuggccgacgccggcuucaugaagcaguacggggagugccugggcgacaucaacgcccgcgaccucaucugcgcgcagaaguucaacggccugaccgugcugcccccgcuccugaccgacgacaugaucgccgccuacaccgccgcgcuggucuccgggacggccaccgccggcuggaccuucggggccggcgccgcgcuccagauccccuucgccaugcagauggccuaccgguucaacgggaucggcgugacccagaacgugcuguacgagaaccagaagcagaucgccaaccaguucaacaaggccaucagccagauccaggagucccugacgaccaccagcaccgcgcucggcaagcugcaggacgucgugaaccagaacgcccaggcccugaacacgcucgugaagcagcuguccagcaacuucggggccaucuccagcguccugaacgacauccucucccgccuggacaagguggaggccgaggugcagaucgaccggcugaucaccggccgccuccagagccugcagaccuacgucacccagcagcugauccgggcggccgagauccgcgccuccgccaaccucgccgcgacgaagaugagcgagugcgugcuggggcaguccaagcggguggacuucugcggcaagggcuaccaccugaugagcuucccccaggccgcgccccacggggucguguuccuccacgugaccuacgucccgucccaggagcgcaacuucaccaccgcccccgccaucugccacgagggcaaggccuacuucccccgggaggggguguucguguucaacggcacgagcugguucaucacccagcgcaacuucuucagcccccagaucaucaccaccgacaacacguucgucuccgggaacugcgacguggugaucggcaucaucaacaacaccgucuacgacccgcugcagcccgagcuggacagcuucaaggaggagcucgacaaguacuucaagaaccacaccucccccgacguggaccugggcgacaucagcgggaucaacgccuccgucgugaacauccagaaggagaucgaccggcugaacgagguggccaagaaccucaacgagagccugaucgaccugcaggagcucggcaaguacgagcaguacaucaaguggcccugguacgucuggcugggguucaucgccggccugaucgcgaucgugauggugaccauccugcucugcugcaugacguccugcugcagcugccugaagggggccugcuccugcggcagcugcugcaaguucgacgaggacgacuccgagccgguccugaagggcgugaagcuccacuacaccuga

SEQ ID NO: 14954 - RNA, 3768 nt, Artificial Sequence
  SARS-CoV/Tor2__NP_828851.1 spike protein CDS gc (1-1255)
auguucaucuuccugcuguuccugacccugaccagcggcuccgaccucgaccgcugcacgaccuucgacgacgugcaggcccccaacuacacccagcacaccagcuccaugcgcggggucuacuacccggacgagaucuuccggagcgacacgcuguaccugacccaggaccucuuccugcccuucuacuccaacgugaccggcuuccacaccaucaaccacacguucgggaaccccgugauccccuucaaggacggcaucuacuucgccgcgaccgagaaguccaacgucgugcggggguggguguucggcuccaccaugaacaacaagagccaguccgucaucaucaucaacaacagcaccaacguggugauccgcgccugcaacuucgagcugugcgacaacccguucuucgccgucuccaagcccaugggcacgcagacccacaccaugaucuucgacaacgccuucaacugcaccuucgaguacaucagcgacgccuucucccucgacgugagcgagaaguccgggaacuucaagcaccuccgggaguucguguucaagaacaaggacggcuuccuguacgucuacaagggguaccagcccaucgacguggugcgcgaccuccccagcggcuucaacacgcugaagccgaucuucaagcugccccucgggaucaacaucaccaacuuccgggcgauccugaccgccuucucccccgcccaggacaucuggggcaccagcgccgcggccuacuucgucggcuaccugaagcccacgaccuucaugcucaaguacgacgagaacgggaccaucaccgacgccguggacugcucccagaacccgcuggccgagcugaagugcagcgucaagagcuucgagaucgacaagggcaucuaccagacguccaacuuccgcguggugcccagcggggacgugguccgguuccccaacaucaccaaccucugccccuucggcgagguguucaacgccaccaaguucccguccguguacgcgugggagcgcaagaagaucagcaacugcgucgccgacuacuccgugcuguacaacagcaccuucuucuccacguucaagugcuacggcgucagcgccaccaagcugaacgaccucugcuucuccaacguguacgccgacagcuucguggucaagggggacgacgugcggcagaucgcccccggccagaccggggugaucgcggacuacaacuacaagcugcccgacgacuucaugggcugcguccuggccuggaacacccgcaacaucgacgccacguccaccgggaacuacaacuacaaguaccgguaccuccgccacggcaagcugcggcccuucgagcgcgacaucagcaacgugccguucucccccgacggcaagcccugcacgcccccggcccugaacugcuacuggccccucaacgacuacggguucuacaccaccaccggcaucggguaccagcccuaccggguggucgugcugagcuucgagcugcucaacgcccccgcgaccgugugcggcccgaagcuguccaccgaccugaucaagaaccagugcgucaacuucaacuucaacgggcucaccggcacgggcgugcugacccccagcuccaagcgcuuccagcccuuccagcaguucgggcgggacgugagcgacuucaccgacuccguccgcgacccgaagaccagcgagauccuggacaucagccccugcgccuucggcgggguguccgugaucacgcccggcaccaacgccagcuccgaggucgccgugcucuaccaggacgugaacugcaccgacgucagcaccgccauccacgcggaccagcugacgcccgccuggcggaucuacuccaccgggaacaacguguuccagacccaggccggcugccugaucggcgccgagcacguggacaccagcuacgagugcgacaucccgaucggggcgggcaucugcgccuccuaccacacggucagccuccugcgcuccaccagccagaaguccaucguggccuacaccaugagccugggggccgacuccagcaucgccuacuccaacaacaccaucgcgauccccacgaacuucagcaucuccaucaccaccgaggugaugcccgucagcauggccaagaccagcguggacugcaacauguacaucugcggcgacuccacggagugcgccaaccuccugcugcaguacggcagcuucugcacccagcugaaccgcgcccucuccgggaucgccgcggagcaggaccggaacacccgcgagguguucgcccaggucaagcagauguacaagacccccacgcugaaguacuucggcggguucaacuucagccagauccugccggacccccucaagcccaccaagcgguccuucaucgaggaccugcuguucaacaaggugacccucgccgacgccggcuucaugaagcaguacggggagugccugggcgacaucaacgcccgcgaccugaucugcgcgcagaaguucaacggccucaccgugcugcccccgcugcucacggacgacaugaucgccgccuacaccgccgcgcuggucagcgggaccgccaccgccggcuggacguucggggccggcgccgcgcugcagauccccuucgccaugcagauggccuaccgguucaacgggaucggcgugacccagaacgugcucuacgagaaccagaagcagaucgccaaccaguucaacaaggccaucucccagauccaggagagccugaccaccacguccaccgcgcugggcaagcuccaggacgucgugaaccagaacgcccaggcccugaacacccuggugaagcagcucagcuccaacuucggggccaucagcuccguccugaacgacauccugagccgccucgacaagguggaggccgaggugcagaucgaccggcugaucaccggccgccugcagucccuccagaccuacgucacgcagcagcugauccgggcggccgagauccgcgccagcgccaaccuggcggccaccaagauguccgagugcgugcucgggcagagcaagcggguggacuucugcggcaagggguaccaccugauguccuucccccaggccgcgccccacggcgucguguuccugcacgugaccuacgucccgagccaggagcgcaacuucaccacggcccccgccaucugccacgagggcaaggccuacuucccccgggaggggguguucguguucaacggcaccagcugguucaucacccagcgcaacuucuucagcccccagaucaucaccacggacaacaccuucgucagcgggaacugcgacguggucaucggcaucaucaacaacaccguguacgacccgcuccagcccgagcuggacuccuucaaggaggagcuggacaaguacuucaagaaccacaccagccccgacguggaccucggggacaucuccggcaucaacgccagcgucgugaacauccagaaggagaucgaccggcugaacgagguggccaagaaccugaacgagucccucaucgaccugcaggagcugggcaaguacgagcaguacaucaaguggcccugguacgucuggcucggguucaucgccggccugaucgcgaucgugauggugacgauccugcucugcugcaugaccagcugcugcuccugccugaagggggccugcagcugcggcuccugcugcaaguucgacgaggacgacagcgagccgguccugaagggcgugaagcuccacuacaccuga

SEQ ID NO: 14955 - RNA, 3768 nt, Artificial Sequence
  SARS-CoV/Tor2__NP_828851.1 spike protein CDS gc (1-1255)(K968P_V969P)
auguucaucuuccugcuguuccugacccugaccagcggcuccgaccucgaccgcugcacgaccuucgacgacgugcaggcccccaacuacacccagcacaccagcuccaugcgcggggucuacuacccggacgagaucuuccggagcgacacgcuguaccugacccaggaccucuuccugcccuucuacuccaacgugaccggcuuccacaccaucaaccacacguucgggaaccccgugauccccuucaaggacggcaucuacuucgccgcgaccgagaaguccaacgucgugcggggguggguguucggcuccaccaugaacaacaagagccaguccgucaucaucaucaacaacagcaccaacguggugauccgcgccugcaacuucgagcugugcgacaacccguucuucgccgucuccaagcccaugggcacgcagacccacaccaugaucuucgacaacgccuucaacugcaccuucgaguacaucagcgacgccuucucccucgacgugagcgagaaguccgggaacuucaagcaccuccgggaguucguguucaagaacaaggacggcuuccuguacgucuacaagggguaccagcccaucgacguggugcgcgaccuccccagcggcuucaacacgcugaagccgaucuucaagcugccccucgggaucaacaucaccaacuuccgggcgauccugaccgccuucucccccgcccaggacaucuggggcaccagcgccgcggccuacuucgucggcuaccugaagcccacgaccuucaugcucaaguacgacgagaacgggaccaucaccgacgccguggacugcucccagaacccgcuggccgagcugaagugcagcgucaagagcuucgagaucgacaagggcaucuaccagacguccaacuuccgcguggugcccagcggggacgugguccgguuccccaacaucaccaaccucugccccuucggcgagguguucaacgccaccaaguucccguccguguacgcgugggagcgcaagaagaucagcaacugcgucgccgacuacuccgugcuguacaacagcaccuucuucuccacguucaagugcuacggcgucagcgccaccaagcugaacgaccucugcuucuccaacguguacgccgacagcuucguggucaagggggacgacgugcggcagaucgcccccggccagaccggggugaucgcggacuacaacuacaagcugcccgacgacuucaugggcugcguccuggccuggaacacccgcaacaucgacgccacguccaccgggaacuacaacuacaaguaccgguaccuccgccacggcaagcugcggcccuucgagcgcgacaucagcaacgugccguucucccccgacggcaagcccugcacgcccccggcccugaacugcuacuggccccucaacgacuacggguucuacaccaccaccggcaucggguaccagcccuaccggguggucgugcugagcuucgagcugcucaacgcccccgcgaccgugugcggcccgaagcuguccaccgaccugaucaagaaccagugcgucaacuucaacuucaacgggcucaccggcacgggcgugcugacccccagcuccaagcgcuuccagcccuuccagcaguucgggcgggacgugagcgacuucaccgacuccguccgcgacccgaagaccagcgagauccuggacaucagccccugcgccuucggcgggguguccgugaucacgcccggcaccaacgccagcuccgaggucgccgugcucuaccaggacgugaacugcaccgacgucagcaccgccauccacgcggaccagcugacgcccgccuggcggaucuacuccaccgggaacaacguguuccagacccaggccggcugccugaucggcgccgagcacguggacaccagcuacgagugcgacaucccgaucggggcgggcaucugcgccuccuaccacacggucagccuccugcgcuccaccagccagaaguccaucguggccuacaccaugagccugggggccgacuccagcaucgccuacuccaacaacaccaucgcgauccccacgaacuucagcaucuccaucaccaccgaggugaugcccgucagcauggccaagaccagcguggacugcaacauguacaucugcggcgacuccacggagugcgccaaccuccugcugcaguacggcagcuucugcacccagcugaaccgcgcccucuccgggaucgccgcggagcaggaccggaacacccgcgagguguucgcccaggucaagcagauguacaagacccccacgcugaaguacuucggcggguucaacuucagccagauccugccggacccccucaagcccaccaagcgguccuucaucgaggaccugcuguucaacaaggugacccucgccgacgccggcuucaugaagcaguacggggagugccugggcgacaucaacgcccgcgaccugaucugcgcgcagaaguucaacggccucaccgugcugcccccgcugcucacggacgacaugaucgccgccuacaccgccgcgcuggucagcgggaccgccaccgccggcuggacguucggggccggcgccgcgcugcagauccccuucgccaugcagauggccuaccgguucaacgggaucggcgugacccagaacgugcucuacgagaaccagaagcagaucgccaaccaguucaacaaggccaucucccagauccaggagagccugaccaccacguccaccgcgcugggcaagcuccaggacgucgugaaccagaacgcccaggcccugaacacccuggugaagcagcucagcuccaacuucggggccaucagcuccguccugaacgacauccugagccgccucgacccgcccgaggccgaggugcagaucgaccggcugaucaccggccgccugcagucccuccagaccuacgugacgcagcagcugauccgggcggccgagauccgcgccagcgccaaccuggcggccaccaagauguccgagugcguccucgggcagagcaagcggguggacuucugcggcaagggguaccaccugauguccuucccccaggccgcgccccacggcguggucuuccugcacgugaccuacgugcccagccaggagcgcaacuucaccacggcccccgccaucugccacgagggcaaggccuacuucccgcgggagggggucuucguguucaacggcaccagcugguucaucacccagcgcaacuucuucagcccccagaucaucaccacggacaacaccuucgugagcgggaacugcgacgucgugaucggcaucaucaacaacaccgucuacgacccccuccagcccgagcuggacuccuucaaggaggagcuggacaaguacuucaagaaccacaccagcccggacguggaccucggggacaucuccggcaucaacgccagcguggucaacauccagaaggagaucgaccggcugaacgagguggccaagaaccugaacgagucccucaucgaccugcaggagcugggcaaguacgagcaguacaucaaguggcccugguacguguggcucggguucaucgccggccugaucgcgaucgucauggugacgauccugcucugcugcaugaccagcugcugcuccugccugaagggggccugcagcugcggcuccugcugcaaguucgacgaggacgacagcgagcccgugcugaagggcgucaagcuccacuacaccuga

SEQ ID NO: 14956 - RNA, 3573 nt, Artificial Sequence
  SARS-CoV/Tor2__NP_828851.1 spike protein CDS gc (variant)
auguucaucuuccugcuguuccugacccugaccagcggcuccgaccucgaccgcugcacgaccuucgacgacgugcaggcccccaacuacacccagcacaccagcuccaugcgcggggucuacuacccggacgagaucuuccggagcgacacgcuguaccugacccaggaccucuuccugcccuucuacuccaacgugaccggcuuccacaccaucaaccacacguucgggaaccccgugauccccuucaaggacggcaucuacuucgccgcgaccgagaaguccaacgucgugcggggguggguguucggcuccaccaugaacaacaagagccaguccgucaucaucaucaacaacagcaccaacguggugauccgcgccugcaacuucgagcugugcgacaacccguucuucgccgucuccaagcccaugggcacgcagacccacaccaugaucuucgacaacgccuucaacugcaccuucgaguacaucagcgacgccuucucccucgacgugagcgagaaguccgggaacuucaagcaccuccgggaguucguguucaagaacaaggacggcuuccuguacgucuacaagggguaccagcccaucgacguggugcgcgaccuccccagcggcuucaacacgcugaagccgaucuucaagcugccccucgggaucaacaucaccaacuuccgggcgauccugaccgccuucucccccgcccaggacaucuggggcaccagcgccgcggccuacuucgucggcuaccugaagcccacgaccuucaugcucaaguacgacgagaacgggaccaucaccgacgccguggacugcucccagaacccgcuggccgagcugaagugcagcgucaagagcuucgagaucgacaagggcaucuaccagacguccaacuuccgcguggugcccagcggggacgugguccgguuccccaacaucaccaaccucugccccuucggcgagguguucaacgccaccaaguucccguccguguacgcgugggagcgcaagaagaucagcaacugcgucgccgacuacuccgugcuguacaacagcaccuucuucuccacguucaagugcuacggcgucagcgccaccaagcugaacgaccucugcuucuccaacguguacgccgacagcuucguggucaagggggacgacgugcggcagaucgcccccggccagaccggggugaucgcggacuacaacuacaagcugcccgacgacuucaugggcugcguccuggccuggaacacccgcaacaucgacgccacguccaccgggaacuacaacuacaaguaccgguaccuccgccacggcaagcugcggcccuucgagcgcgacaucagcaacgugccguucucccccgacggcaagcccugcacgcccccggcccugaacugcuacuggccccucaacgacuacggguucuacaccaccaccggcaucggguaccagcccuaccggguggucgugcugagcuucgagcugcucaacgcccccgcgaccgugugcggcccgaagcuguccaccgaccugaucaagaaccagugcgucaacuucaacuucaacgggcucaccggcacgggcgugcugacccccagcuccaagcgcuuccagcccuuccagcaguucgggcgggacgugagcgacuucaccgacuccguccgcgacccgaagaccagcgagauccuggacaucagccccugcgccuucggcgggguguccgugaucacgcccggcaccaacgccagcuccgaggucgccgugcucuaccaggacgugaacugcaccgacgucagcaccgccauccacgcggaccagcugacgcccgccuggcggaucuacuccaccgggaacaacguguuccagacccaggccggcugccugaucggcgccgagcacguggacaccagcuacgagugcgacaucccgaucggggcgggcaucugcgccuccuaccacacggucagccuccugcgcuccaccagccagaaguccaucguggccuacaccaugagccugggggccgacuccagcaucgccuacuccaacaacaccaucgcgauccccacgaacuucagcaucuccaucaccaccgaggugaugcccgucagcauggccaagaccagcguggacugcaacauguacaucugcggcgacuccacggagugcgccaaccuccugcugcaguacggcagcuucugcacccagcugaaccgcgcccucuccgggaucgccgcggagcaggaccggaacacccgcgagguguucgcccaggucaagcagauguacaagacccccacgcugaaguacuucggcggguucaacuucagccagauccugccggacccccucaagcccaccaagcgguccuucaucgaggaccugcuguucaacaaggugacccucgccgacgccggcuucaugaagcaguacggggagugccugggcgacaucaacgcccgcgaccugaucugcgcgcagaaguucaacggccucaccgugcugcccccgcugcucacggacgacaugaucgccgccuacaccgccgcgcuggucagcgggaccgccaccgccggcuggacguucggggccggcgccgcgcugcagauccccuucgccaugcagauggccuaccgguucaacgggaucggcgugacccagaacgugcucuacgagaaccagaagcagaucgccaaccaguucaacaaggccaucucccagauccaggagagccugaccaccacguccaccgcgcugggcaagcuccaggacgucgugaaccagaacgcccaggcccugaacacccuggugaagcagcucagcuccaacuucggggccaucagcuccguccugaacgacauccugagccgccucgacccgcccgaggccgaggugcagaucgaccggcugaucaccggccgccugcagucccuccagaccuacgugacgcagcagcugauccgggcggccgagauccgcgccagcgccaaccuggcggccaccaagauguccgagugcguccucgggcagagcaagcggguggacuucugcggcaagggguaccaccugauguccuucccccaggccgcgccccacggcguggucuuccugcacgugaccuacgugcccagccaggagcgcaacuucaccacggcccccgccaucugccacgagggcaaggccuacuucccgcgggagggggucuucguguucaacggcaccagcugguucaucacccagcgcaacuucuucagcccccagaucaucaccacggacaacaccuucgugagcgggaacugcgacgucgugaucggcaucaucaacaacaccgucuacgacccccuccagcccgagcuggacuccuucaaggaggagcuggacaaguacuucaagaaccacaccagcccggacguggaccucggggacaucuccggcaucaacgccagcguggucaacauccagaaggagaucgaccggcugaacgagguggccaagaaccugaacgagucccucaucgaccugcaggagcugggcaaguacgagcaguga

SEQ ID NO: 14957 - RNA, 3654 nt, Artificial Sequence
  SARS-CoV/Tor2__NP_828851.1 spike protein CDS gc (variant)
auguucaucuuccugcuguuccugacccugaccagcggcuccgaccucgaccgcugcacgaccuucgacgacgugcaggcccccaacuacacccagcacaccagcuccaugcgcggggucuacuacccggacgagaucuuccggagcgacacgcuguaccugacccaggaccucuuccugcccuucuacuccaacgugaccggcuuccacaccaucaaccacacguucgggaaccccgugauccccuucaaggacggcaucuacuucgccgcgaccgagaaguccaacgucgugcggggguggguguucggcuccaccaugaacaacaagagccaguccgucaucaucaucaacaacagcaccaacguggugauccgcgccugcaacuucgagcugugcgacaacccguucuucgccgucuccaagcccaugggcacgcagacccacaccaugaucuucgacaacgccuucaacugcaccuucgaguacaucagcgacgccuucucccucgacgugagcgagaaguccgggaacuucaagcaccuccgggaguucguguucaagaacaaggacggcuuccuguacgucuacaagggguaccagcccaucgacguggugcgcgaccuccccagcggcuucaacacgcugaagccgaucuucaagcugccccucgggaucaacaucaccaacuuccgggcgauccugaccgccuucucccccgcccaggacaucuggggcaccagcgccgcggccuacuucgucggcuaccugaagcccacgaccuucaugcucaaguacgacgagaacgggaccaucaccgacgccguggacugcucccagaacccgcuggccgagcugaagugcagcgucaagagcuucgagaucgacaagggcaucuaccagacguccaacuuccgcguggugcccagcggggacgugguccgguuccccaacaucaccaaccucugccccuucggcgagguguucaacgccaccaaguucccguccguguacgcgugggagcgcaagaagaucagcaacugcgucgccgacuacuccgugcuguacaacagcaccuucuucuccacguucaagugcuacggcgucagcgccaccaagcugaacgaccucugcuucuccaacguguacgccgacagcuucguggucaagggggacgacgugcggcagaucgcccccggccagaccggggugaucgcggacuacaacuacaagcugcccgacgacuucaugggcugcguccuggccuggaacacccgcaacaucgacgccacguccaccgggaacuacaacuacaaguaccgguaccuccgccacggcaagcugcggcccuucgagcgcgacaucagcaacgugccguucucccccgacggcaagcccugcacgcccccggcccugaacugcuacuggccccucaacgacuacggguucuacaccaccaccggcaucggguaccagcccuaccggguggucgugcugagcuucgagcugcucaacgcccccgcgaccgugugcggcccgaagcuguccaccgaccugaucaagaaccagugcgucaacuucaacuucaacgggcucaccggcacgggcgugcugacccccagcuccaagcgcuuccagcccuuccagcaguucgggcgggacgugagcgacuucaccgacuccguccgcgacccgaagaccagcgagauccuggacaucagccccugcgccuucggcgggguguccgugaucacgcccggcaccaacgccagcuccgaggucgccgugcucuaccaggacgugaacugcaccgacgucagcaccgccauccacgcggaccagcugacgcccgccuggcggaucuacuccaccgggaacaacguguuccagacccaggccggcugccugaucggcgccgagcacguggacaccagcuacgagugcgacaucccgaucggggcgggcaucugcgccuccuaccacacggucagccuccugcgcuccaccagccagaaguccaucguggccuacaccaugagccugggggccgacuccagcaucgccuacuccaacaacaccaucgcgauccccacgaacuucagcaucuccaucaccaccgaggugaugcccgucagcauggccaagaccagcguggacugcaacauguacaucugcggcgacuccacggagugcgccaaccuccugcugcaguacggcagcuucugcacccagcugaaccgcgcccucuccgggaucgccgcggagcaggaccggaacacccgcgagguguucgcccaggucaagcagauguacaagacccccacgcugaaguacuucggcggguucaacuucagccagauccugccggacccccucaagcccaccaagcgguccuucaucgaggaccugcuguucaacaaggugacccucgccgacgccggcuucaugaagcaguacggggagugccugggcgacaucaacgcccgcgaccugaucugcgcgcagaaguucaacggccucaccgugcugcccccgcugcucacggacgacaugaucgccgccuacaccgccgcgcuggucagcgggaccgccaccgccggcuggacguucggggccggcgccgcgcugcagauccccuucgccaugcagauggccuaccgguucaacgggaucggcgugacccagaacgugcucuacgagaaccagaagcagaucgccaaccaguucaacaaggccaucucccagauccaggagagccugaccaccacguccaccgcgcugggcaagcuccaggacgucgugaaccagaacgcccaggcccugaacacccuggugaagcagcucagcuccaacuucggggccaucagcuccguccugaacgacauccugagccgccucgacccgcccgaggccgaggugcagaucgaccggcugaucaccggccgccugcagucccuccagaccuacgugacgcagcagcugauccgggcggccgagauccgcgccagcgccaaccuggcggccaccaagauguccgagugcguccucgggcagagcaagcggguggacuucugcggcaagggguaccaccugauguccuucccccaggccgcgccccacggcguggucuuccugcacgugaccuacgugcccagccaggagcgcaacuucaccacggcccccgccaucugccacgagggcaaggccuacuucccgcgggagggggucuucguguucaacggcaccagcugguucaucacccagcgcaacuucuucagcccccagaucaucaccacggacaacaccuucgugagcgggaacugcgacgucgugaucggcaucaucaacaacaccgucuacgacccccuccagcccgagcuggacuccuucaaggaggagcuggacaaguacuucaagaaccacaccagcccggacguggaccucggggacaucuccggcaucaacgccagcguggucaacauccagaaggagaucgaccggcugaacgagguggccaagaaccugaacgagucccucaucgaccugcaggagcugggcaaguacgagcagggcggguacauccccgaggcgccccgcgacgggcaggccuacgugcggaaggacggcgaguggguccuccugagcacguucuga

SEQ ID NO: 14958 - RNA, 4062 nt, Artificial Sequence
  HCoV/OC43__P36334.1 spike protein CDS gc (1-1353)
auguuccugauccuccugaucagccugcccaccgccuucgccgugaucggcgaccucaagugcaccuccgacaacaucaacgacaaggacacggggccgccgcccaucagcaccgacaccgucgacgugaccaacggccuggggacguacuacgugcuggaccgcgucuaccucaacaccacccuguuccugaacggcuacuaccccaccuccgggagcacguaccggaacauggcgcucaagggcuccgugcugcugagccgccucugguucaagccgcccuuccuguccgacuucaucaacggcaucuucgccaaggugaagaacaccaaggucaucaaggaccgggugauguacagcgaguuccccgccaucaccaucggguccaccuucgugaacacgagcuacuccgucguggugcagccccgcaccaucaacagcacccaggacggcgacaacaagcugcaggggcuccuggaggucuccgugugccaguacaacaugugcgaguacccccagaccaucugccaccccaaccugggcaaccaccggaaggagcucuggcaccuggacacggggguggucagcugccuguacaagcgcaacuucaccuacgacgugaacgccgacuaccucuacuuccacuucuaccaggagggcggcaccuucuacgccuacuucaccgacacggggguggucaccaaguuccuguucaacguguaccugggcauggcgcucucccacuacuacgugaugccccugaccugcaacagcaagcugacccucgaguacugggucacgccccugaccucccggcaguaccugcucgccuucaaccaggacgggaucaucuucaacgccgaggacugcaugagcgacuucauguccgagaucaagugcaagacccagagcaucgccccgcccaccggcguguacgagcugaacggcuacacggugcagcccaucgcggacgucuaccgccggaagcccaaccugccgaacugcaacaucgaggccuggcucaacgacaagagcgugcccagcccccugaacugggagcgcaagaccuucuccaacugcaacuucaacauguccagccugauguccuucauccaggccgacagcuucacgugcaacaacaucgacgccgccaagaucuacgggaugugcuucuccagcaucaccaucgacaaguucgcgauccccaacggccggaaggucgaccuccagcuggggaaccugggcuaccuccaguccuucaacuaccgcaucgacaccaccgccaccagcugccagcuguacuacaaccugccggccgccaacguguccgugagccgguucaaccccuccaccuggaacaagcgcuucggguucaucgaggacagcgucuucaagccccggcccgccggcgugcucacgaaccacgacguggucuacgcgcagcacugcuucaaggccccgaagaacuucugccccugcaagcugaacggcuccugcguggggagcggccccgggaagaacaacggcaucgggaccugccccgccggcaccaacuaccugaccugcgacaaccucugcaccccggaccccaucacguucaccggcaccuacaagugcccccagaccaagucccugguggggaucggcgagcacugcagcgggcuggccgucaaguccgacuacugcggcgggaacagcugcacgugccgcccgcaggccuuccugggcuggagcgcggacuccugccuccagggcgacaagugcaacaucuucgccaacuucauccugcacgacgugaacagcgggcugaccugcuccaccgaccuccagaaggccaacaccgacaucauccugggcgugugcgucaacuacgaccuguacgggauccucggccagggcaucuucguggaggugaacgccacguacuacaacagcuggcagaaccugcuguacgacuccaacgggaaccucuacggcuuccgggacuacaucaucaaccgcaccuucaugauccggagcugcuacuccgggcgcgucagcgccgcguuccacgccaacuccagcgagcccgcccugcuguuccggaacaucaagugcaacuacguguucaacaacucccucacccgccagcugcagcccaucaacuacuucgacagcuaccugggcugcguggucaacgccuacaacuccaccgcgaucagcgugcagacgugcgaccucaccgugggguccggcuacugcgucgacuacagcaagaaccgccggucccgcggcgccaucaccaccggguaccgguucacgaacuucgagcccuucaccgugaacagcgugaacgacagccuggagccggucggcgggcuguacgagauccagauccccuccgaguucaccaucggcaacaugguggaguucauccagaccagcucccccaaggugacgaucgacugcgccgccuucgucugcggggacuacgccgcgugcaagagccagcucguggaguacggcuccuucugcgacaacaucaacgccauccugaccgaggugaacgagcugcucgacaccacccagcugcaggucgccaacagccugaugaacggcgugacgcucuccaccaagcugaaggacggggugaacuucaacgucgacgacaucaacuucagccccgugcugggcugccucggguccgagugcagcaaggccuccagccgcuccgccaucgaggaccugcuguucgacaaggugaagcucagcgacgucggcuucguggaggcguacaacaacugcaccgggggcgccgagauccgggaccugaucugcgugcaguccuacaagggcaucaagguccugccgccccuccugagcgagaaccagaucuccggguacacccuggccgccacgagcgccucccucuucccgcccuggaccgcggccgccggcgugcccuucuaccugaacgugcaguaccgcaucaacgggcugggcgucaccauggacgugcucagccagaaccagaagcugaucgccaacgcguucaacaacgcccuguacgccauccaggagggguucgacgccaccaacagcgcccucgugaagauccaggcggucgugaacgccaacgccgaggcccugaacaaccugcuccagcagcuguccaaccgguucggcgccaucagcgcgucccugcaggagauccucagccgccuggacgcccuggaggccgaggcccagaucgaccggcucaucaacggccgccugacggcccugaacgcguacgugucccagcagcucagcgacuccacccuggucaaguucagcgccgcccaggccauggagaaggugaacgagugcgugaagucccagagcucccggaucaacuucugcgggaacggcaaccacaucaucagccugguccagaacgcgcccuacgggcucuacuucauccacuucuccuacgugcccaccaaguacgucaccgcccgcgugagccccggccugugcaucgccggcgaccgggggaucgccccgaaguccggcuacuucgugaacgucaacaacacguggauguacaccgggagcggcuacuacuaccccgagcccaucaccgagaacaacgugguggucauguccacgugcgccgugaacuacaccaaggcgcccuacgugaugcugaacaccagcaucccgaaccuccccgacuucaaggaggagcuggaccagugguucaagaaccagaccuccgucgcccccgaccugagccucgacuacaucaacgugaccuuccuggaccuccagguggagaugaaccgccugcaggaggccaucaagguccugaaccagagcuacaucaaccugaaggacaucgggaccuacgaguacuacgugaaguggcccugguacguguggcuccugaucugccuggccggcgucgccaugcucgugcugcuguucuucaucugcugcugcacgggcugcgggaccuccugcuucaagaagugcggcgggugcugcgacgacuacaccggcuaccaggagcucgugaucaagaccagccacgacgacuga

SEQ ID NO: 14959 - RNA, 4062 nt, Artificial Sequence
  HCoV/OC43__P36334.1 spike protein CDS gc (1-1353)(A1070P_L1071P)
auguuccugauccuccugaucagccugcccaccgccuucgccgugaucggcgaccucaagugcaccuccgacaacaucaacgacaaggacacggggccgccgcccaucagcaccgacaccgucgacgugaccaacggccuggggacguacuacgugcuggaccgcgucuaccucaacaccacccuguuccugaacggcuacuaccccaccuccgggagcacguaccggaacauggcgcucaagggcuccgugcugcugagccgccucugguucaagccgcccuuccuguccgacuucaucaacggcaucuucgccaaggugaagaacaccaaggucaucaaggaccgggugauguacagcgaguuccccgccaucaccaucggguccaccuucgugaacacgagcuacuccgucguggugcagccccgcaccaucaacagcacccaggacggcgacaacaagcugcaggggcuccuggaggucuccgugugccaguacaacaugugcgaguacccccagaccaucugccaccccaaccugggcaaccaccggaaggagcucuggcaccuggacacggggguggucagcugccuguacaagcgcaacuucaccuacgacgugaacgccgacuaccucuacuuccacuucuaccaggagggcggcaccuucuacgccuacuucaccgacacggggguggucaccaaguuccuguucaacguguaccugggcauggcgcucucccacuacuacgugaugccccugaccugcaacagcaagcugacccucgaguacugggucacgccccugaccucccggcaguaccugcucgccuucaaccaggacgggaucaucuucaacgccgaggacugcaugagcgacuucauguccgagaucaagugcaagacccagagcaucgccccgcccaccggcguguacgagcugaacggcuacacggugcagcccaucgcggacgucuaccgccggaagcccaaccugccgaacugcaacaucgaggccuggcucaacgacaagagcgugcccagcccccugaacugggagcgcaagaccuucuccaacugcaacuucaacauguccagccugauguccuucauccaggccgacagcuucacgugcaacaacaucgacgccgccaagaucuacgggaugugcuucuccagcaucaccaucgacaaguucgcgauccccaacggccggaaggucgaccuccagcuggggaaccugggcuaccuccaguccuucaacuaccgcaucgacaccaccgccaccagcugccagcuguacuacaaccugccggccgccaacguguccgugagccgguucaaccccuccaccuggaacaagcgcuucggguucaucgaggacagcgucuucaagccccggcccgccggcgugcucacgaaccacgacguggucuacgcgcagcacugcuucaaggccccgaagaacuucugccccugcaagcugaacggcuccugcguggggagcggccccgggaagaacaacggcaucgggaccugccccgccggcaccaacuaccugaccugcgacaaccucugcaccccggaccccaucacguucaccggcaccuacaagugcccccagaccaagucccugguggggaucggcgagcacugcagcgggcuggccgucaaguccgacuacugcggcgggaacagcugcacgugccgcccgcaggccuuccugggcuggagcgcggacuccugccuccagggcgacaagugcaacaucuucgccaacuucauccugcacgacgugaacagcgggcugaccugcuccaccgaccuccagaaggccaacaccgacaucauccugggcgugugcgucaacuacgaccuguacgggauccucggccagggcaucuucguggaggugaacgccacguacuacaacagcuggcagaaccugcuguacgacuccaacgggaaccucuacggcuuccgggacuacaucaucaaccgcaccuucaugauccggagcugcuacuccgggcgcgucagcgccgcguuccacgccaacuccagcgagcccgcccugcuguuccggaacaucaagugcaacuacguguucaacaacucccucacccgccagcugcagcccaucaacuacuucgacagcuaccugggcugcguggucaacgccuacaacuccaccgcgaucagcgugcagacgugcgaccucaccgugggguccggcuacugcgucgacuacagcaagaaccgccggucccgcggcgccaucaccaccggguaccgguucacgaacuucgagcccuucaccgugaacagcgugaacgacagccuggagccggucggcgggcuguacgagauccagauccccuccgaguucaccaucggcaacaugguggaguucauccagaccagcucccccaaggugacgaucgacugcgccgccuucgucugcggggacuacgccgcgugcaagagccagcucguggaguacggcuccuucugcgacaacaucaacgccauccugaccgaggugaacgagcugcucgacaccacccagcugcaggucgccaacagccugaugaacggcgugacgcucuccaccaagcugaaggacggggugaacuucaacgucgacgacaucaacuucagccccgugcugggcugccucggguccgagugcagcaaggccuccagccgcuccgccaucgaggaccugcuguucgacaaggugaagcucagcgacgucggcuucguggaggcguacaacaacugcaccgggggcgccgagauccgggaccugaucugcgugcaguccuacaagggcaucaagguccugccgccccuccugagcgagaaccagaucuccggguacacccuggccgccacgagcgccucccucuucccgcccuggaccgcggccgccggcgugcccuucuaccugaacgugcaguaccgcaucaacgggcugggcgucaccauggacgugcucagccagaaccagaagcugaucgccaacgcguucaacaacgcccuguacgccauccaggagggguucgacgccaccaacagcgcccucgugaagauccaggcggucgugaacgccaacgccgaggcccugaacaaccugcuccagcagcuguccaaccgguucggcgccaucagcgcgucccugcaggagauccucagccgccuggacccgcccgaggccgaggcccagaucgaccggcugaucaacggccgccucacggcccugaacgccuacgugucccagcagcugagcgacuccacccucgucaaguucagcgcggcccaggccauggagaaggugaacgagugcgugaagucccagagcucccggaucaacuucugcgggaacggcaaccacaucaucagccugguccagaacgcccccuacgggcuguacuucauccacuucuccuacgugcccaccaaguacgucaccgcgcgcgugagccccggccucugcaucgccggcgaccgggggaucgcccccaaguccggcuacuucgugaacgucaacaacacguggauguacaccgggagcggcuacuacuaccccgagccgaucaccgagaacaacgugguggucauguccacgugcgccgugaacuacaccaaggcccccuacgugaugcugaacaccagcauccccaaccugcccgacuucaaggaggagcucgaccagugguucaagaaccagaccuccgucgcgccggaccugagccuggacuacaucaacgugaccuuccucgaccuccagguggagaugaaccgccugcaggaggccaucaagguccugaaccagagcuacaucaaccugaaggacaucgggaccuacgaguacuacgugaaguggcccugguacguguggcugcucaucugccuggccggcgucgccaugcuggugcuccuguucuucaucugcugcugcacgggcugcgggaccuccugcuucaagaagugcggcgggugcugcgacgacuacaccggcuaccaggagcuggugaucaagaccagccacgacgacuga

SEQ ID NO: 14960 - RNA, 4089 nt, Artificial Sequence
  HCoV/OC43/1783A_10__AIL49484.1 spike protein CDS gc (1-1362)
auguuccugauccuccugaucagccugcccaccgccuucgccgugaucggcgaccucaagugcccgcuggacucccgcaccgggagccugaacaacaucgacacgggcccgcccuccaucagcaccgcgaccgucgacgugaccaacgggcucggcacguacuacgugcuggaccgggucuaccugaacaccacccucuuccugaacggguacuaccccaccuccggcagcacguaccgcaacauggcccugaagggcaccgacaagcucuccacccugugguucaagccgcccuuccugagcgacuucaucaacgggaucuucgccaaggugaagaacaccaagguguucaaggacggcgucauguacuccgaguuccccgccaucacgaucgggagcaccuucgugaacaccuccuacagcguggucgugcagccccggaccaucaacuccacgcaggacggcgugaacaagcuccaggggcugcuggaggucagcgugugccaguacaacaugugcgaguacccccacaccaucugccaccccaagcucggcaaccacuucaaggagcuguggcacauggacaccggcguggucuccugccuguacaagcgcaacuucaccuacgacgugaacgccacguaccucuacuuccacuucuaccaggagggcggcaccuucuacgcguacuucaccgacaccgggguggucacgaaguuccuguucaacguguaccugggcauggcccucagccacuacuacgugaugccccugaccugcaucucccggcgcgacaucggcuucacccuggaguacugggucacgccccucaccagccggcaguaccugcuggccuucaaccaggacgggaucaucuucaacgccguggacugcauguccgacuucaugagcgagaucaagugcaagacccagagcaucgcgccgcccaccggcguguacgagcucaacggguacaccguccagcccaucgccgacguguaccgccggaagcccgaccugccgaacugcaacaucgaggccuggcugaacgacaaguccguccccagcccccucaacugggagcgcaagacguucuccaacugcaacuucaacaugagcucccugaugagcuucauccaggccgacuccuucacgugcaacaacaucgacgccgcgaagaucuacggcaugugcuucagcuccaucaccaucgacaaguucgccauccccaacgggcggaagguggaccugcagcucggcaaccugggcuaccugcagagcuucaacuaccgcaucgacaccaccgccaccuccugccagcucuacuacaaccugccggccgccaacgugagcgucucccgguucaaccccagcaccuggaacaagcgcuucggguucaucgagaacuccguguucaagccccagcccgcgggcgugcugaccaaccacgacgucguguacgcccagcacugcuucaaggccccgaagaacuucugccccugcaagcucaacagcucccugugcguggggagcggccccgggaagaacaacggcaucgggaccugccccgccgggacgaacuaccugaccugccacaaccucugcaacccggaccccaucaccuucaccggccccuacaagugcccgcagacgaagucccuggucgggaucggcgagcacugcagcgggcuggccgucaagagcgacuacugcggcggcaaccccugcacgugccagccccaggcguuccuggggugguccgccgacagcugccuccagggcgacaagugcaacaucuucgccaaccugauccugcacgacgugaacuccgggcugaccugcagcaccgaccugcagaaggccaacaccgacaucaagcugggcgugugcgugaacuacgaccucuacggcaucuccgggcagggcaucuucguggaggucaacgccaccuacuacaacagcuggcagaaccugcuguacgacuccaacgggaaccucuacggcuuccgggacuacaucaccaaccgcaccuucaugauccggagcugcuacuccgggcgcgugagcgcggccuuccacgccaacuccagcgagcccgcccugcuguuccggaacaucaagugcaacuacguguucaacaacucccucauccgccagcugcagccgaucaacuacuucgacagcuaccugggcugcgucgugaacgcguacaacuccacggccaucagcgugcagaccugcgaccucaccgucggcuccggguacugcguggacuacagcaagaaccggcgcagccgccgggccaucaccacgggcuaccgcuucaccaacuucgagcccuucaccgugaacuccgucaacgacagccuggagcccgucgggggccuguacgagauccagauccccuccgaguucaccaucgggaacauggaggaguucauccagacgagcuccccgaaggugaccaucgacugcgccgccuucgugugcggcgacuacgcggccugcaagagccagcucguggaguacggcuccuucugcgacaacaucaacgccauccugaccgaggugaacgagcugcucgacaccacgcagcugcaggucgccaacagccugaugaacggggugacccucuccaccaagcugaaggacggcgugaacuucaacgucgacgacaucaacuucagcuccgugcuggggugccucggcagcgagugcuccaaggccagcucccggagcgcgaucgaggaccugcuguucgacaaggugaagcucuccgacgucggguucguggccgccuacaacaacugcaccggcggcgccgagauccgcgaccugaucugcgugcagagcuacaaggggaucaagguccugccgccccuccuguccgagaaccagaucagcggcuacacgcuggccgcgaccagcgccucccucuucccgcccuggaccgccgccgcgggggugcccuucuaccugaacgugcaguaccggaucaacggccugggggucaccauggacgugcucagccagaaccagaagcugaucgccaacgccuucaacaacgcccuggacgccauccaggagggcuucgacgcgacgaacuccgcccucgugaagauccaggccgucgugaacgccaacgccgaggcgcugaacaaccugcuccagcagcugagcaaccgcuucggcgccaucuccagcucccugcaggagauccucagccggcuggacgcccuggaggccgaggcccagaucgaccgccucaucaacgggcggcugaccgcgcugaacgccuacgugucccagcagcucagcgacuccacccuggucaaguucagcgccgcccaggcgauggagaaggugaacgagugcgugaagucccagagcucccgcaucaacuucugcggcaacgggaaccacaucaucagccugguccagaacgcccccuacggccucuacuucauccacuucuccuacgugcccaccaaguacgucacggccaaggugagccccggccugugcaucgccggggaccggggcaucgcccccaaguccggguacuucgugaacgucaacaacaccuggauguacaccggcagcggguacuacuaccccgagcccaucaccgagaacaacgugguggucaugagcacgugcgcggugaacuacaccaaggccccguacgugaugcugaacaccuccacccccaaccuccccgacuuccgcgaggagcuggaccagugguucaagaaccagaccagcgucgcccccgaccugucccucgacuacaucaacgugacguuccuggaccuccagguggagaugaaccggcuccaggaggccaucaagguccugaaccagagcuacaucaaccugaaggacaucggcaccuacgaguacuacgugaaguggccgugguacguguggcuccugaucggccuggccggggucgcgaugcucgugcugcuguucuucaucugcugcugcaccggcugcgggaccuccugcuucaagaagugcggcgggugcugcgacgacuacacgggcuaccaggagcucgugaucaagaccagccacgacgacuga

SEQ ID NO: 14961 - RNA, 4089 nt, Artificial Sequence
  HCoV/OC43/1783A_10__AIL49484.1 spike protein CDS gc (1-1362)(A1079P_L1080P)
auguuccugauccuccugaucagccugcccaccgccuucgccgugaucggcgaccucaagugcccgcuggacucccgcaccgggagccugaacaacaucgacacgggcccgcccuccaucagcaccgcgaccgucgacgugaccaacgggcucggcacguacuacgugcuggaccgggucuaccugaacaccacccucuuccugaacggguacuaccccaccuccggcagcacguaccgcaacauggcccugaagggcaccgacaagcucuccacccugugguucaagccgcccuuccugagcgacuucaucaacgggaucuucgccaaggugaagaacaccaagguguucaaggacggcgucauguacuccgaguuccccgccaucacgaucgggagcaccuucgugaacaccuccuacagcguggucgugcagccccggaccaucaacuccacgcaggacggcgugaacaagcuccaggggcugcuggaggucagcgugugccaguacaacaugugcgaguacccccacaccaucugccaccccaagcucggcaaccacuucaaggagcuguggcacauggacaccggcguggucuccugccuguacaagcgcaacuucaccuacgacgugaacgccacguaccucuacuuccacuucuaccaggagggcggcaccuucuacgcguacuucaccgacaccgggguggucacgaaguuccuguucaacguguaccugggcauggcccucagccacuacuacgugaugccccugaccugcaucucccggcgcgacaucggcuucacccuggaguacugggucacgccccucaccagccggcaguaccugcuggccuucaaccaggacgggaucaucuucaacgccguggacugcauguccgacuucaugagcgagaucaagugcaagacccagagcaucgcgccgcccaccggcguguacgagcucaacggguacaccguccagcccaucgccgacguguaccgccggaagcccgaccugccgaacugcaacaucgaggccuggcugaacgacaaguccguccccagcccccucaacugggagcgcaagacguucuccaacugcaacuucaacaugagcucccugaugagcuucauccaggccgacuccuucacgugcaacaacaucgacgccgcgaagaucuacggcaugugcuucagcuccaucaccaucgacaaguucgccauccccaacgggcggaagguggaccugcagcucggcaaccugggcuaccugcagagcuucaacuaccgcaucgacaccaccgccaccuccugccagcucuacuacaaccugccggccgccaacgugagcgucucccgguucaaccccagcaccuggaacaagcgcuucggguucaucgagaacuccguguucaagccccagcccgcgggcgugcugaccaaccacgacgucguguacgcccagcacugcuucaaggccccgaagaacuucugccccugcaagcucaacagcucccugugcguggggagcggccccgggaagaacaacggcaucgggaccugccccgccgggacgaacuaccugaccugccacaaccucugcaacccggaccccaucaccuucaccggccccuacaagugcccgcagacgaagucccuggucgggaucggcgagcacugcagcgggcuggccgucaagagcgacuacugcggcggcaaccccugcacgugccagccccaggcguuccuggggugguccgccgacagcugccuccagggcgacaagugcaacaucuucgccaaccugauccugcacgacgugaacuccgggcugaccugcagcaccgaccugcagaaggccaacaccgacaucaagcugggcgugugcgugaacuacgaccucuacggcaucuccgggcagggcaucuucguggaggucaacgccaccuacuacaacagcuggcagaaccugcuguacgacuccaacgggaaccucuacggcuuccgggacuacaucaccaaccgcaccuucaugauccggagcugcuacuccgggcgcgugagcgcggccuuccacgccaacuccagcgagcccgcccugcuguuccggaacaucaagugcaacuacguguucaacaacucccucauccgccagcugcagccgaucaacuacuucgacagcuaccugggcugcgucgugaacgcguacaacuccacggccaucagcgugcagaccugcgaccucaccgucggcuccggguacugcguggacuacagcaagaaccggcgcagccgccgggccaucaccacgggcuaccgcuucaccaacuucgagcccuucaccgugaacuccgucaacgacagccuggagcccgucgggggccuguacgagauccagauccccuccgaguucaccaucgggaacauggaggaguucauccagacgagcuccccgaaggugaccaucgacugcgccgccuucgugugcggcgacuacgcggccugcaagagccagcucguggaguacggcuccuucugcgacaacaucaacgccauccugaccgaggugaacgagcugcucgacaccacgcagcugcaggucgccaacagccugaugaacggggugacccucuccaccaagcugaaggacggcgugaacuucaacgucgacgacaucaacuucagcuccgugcuggggugccucggcagcgagugcuccaaggccagcucccggagcgcgaucgaggaccugcuguucgacaaggugaagcucuccgacgucggguucguggccgccuacaacaacugcaccggcggcgccgagauccgcgaccugaucugcgugcagagcuacaaggggaucaagguccugccgccccuccuguccgagaaccagaucagcggcuacacgcuggccgcgaccagcgccucccucuucccgcccuggaccgccgccgcgggggugcccuucuaccugaacgugcaguaccggaucaacggccugggggucaccauggacgugcucagccagaaccagaagcugaucgccaacgccuucaacaacgcccuggacgccauccaggagggcuucgacgcgacgaacuccgcccucgugaagauccaggccgucgugaacgccaacgccgaggcgcugaacaaccugcuccagcagcugagcaaccgcuucggcgccaucuccagcucccugcaggagauccucagccggcuggacccgcccgaggccgaggcccagaucgaccgccugaucaacgggcggcucaccgcccugaacgcguacgugucccagcagcugagcgacuccacccucgucaaguucagcgccgcccaggccauggagaaggugaacgagugcgugaagucccagagcucccgcaucaacuucugcggcaacgggaaccacaucaucagccugguccagaacgcgcccuacggccuguacuucauccacuucuccuacgugcccaccaaguacgucacggccaaggugagccccggccucugcaucgccggggaccggggcaucgcccccaaguccggguacuucgugaacgucaacaacaccuggauguacaccggcagcggguacuacuaccccgagcccaucaccgagaacaacgugguggucauguccacgugcgccgugaacuacaccaaggcgcccuacgugaugcugaacaccagcacccccaaccugccggacuuccgcgaggagcucgaccagugguucaagaaccagaccagcgucgcccccgaccugucccuggacuacaucaacgugacguuccucgaccuccagguggagaugaaccggcugcaggaggccaucaagguccucaaccagagcuacaucaaccugaaggacaucggcaccuacgaguacuacgugaaguggcccugguacguguggcugcucaucggccuggccggggucgccaugcuggugcuccuguucuucaucugcugcugcaccggcugcgggaccuccugcuucaagaagugcggcgggugcugcgacgacuacacgggcuaccaggagcuggugaucaagaccagccacgacgacuga

SEQ ID NO: 14962 - RNA, 3864 nt, Artificial Sequence
  HCoV/OC43/1783A_10__AIL49484.1 spike protein CDS gc (variant)
auguuccugauccuccugaucagccugcccaccgccuucgccgugaucggcgaccucaagugcccgcuggacucccgcaccgggagccugaacaacaucgacacgggcccgcccuccaucagcaccgcgaccgucgacgugaccaacgggcucggcacguacuacgugcuggaccgggucuaccugaacaccacccucuuccugaacggguacuaccccaccuccggcagcacguaccgcaacauggcccugaagggcaccgacaagcucuccacccugugguucaagccgcccuuccugagcgacuucaucaacgggaucuucgccaaggugaagaacaccaagguguucaaggacggcgucauguacuccgaguuccccgccaucacgaucgggagcaccuucgugaacaccuccuacagcguggucgugcagccccggaccaucaacuccacgcaggacggcgugaacaagcuccaggggcugcuggaggucagcgugugccaguacaacaugugcgaguacccccacaccaucugccaccccaagcucggcaaccacuucaaggagcuguggcacauggacaccggcguggucuccugccuguacaagcgcaacuucaccuacgacgugaacgccacguaccucuacuuccacuucuaccaggagggcggcaccuucuacgcguacuucaccgacaccgggguggucacgaaguuccuguucaacguguaccugggcauggcccucagccacuacuacgugaugccccugaccugcaucucccggcgcgacaucggcuucacccuggaguacugggucacgccccucaccagccggcaguaccugcuggccuucaaccaggacgggaucaucuucaacgccguggacugcauguccgacuucaugagcgagaucaagugcaagacccagagcaucgcgccgcccaccggcguguacgagcucaacggguacaccguccagcccaucgccgacguguaccgccggaagcccgaccugccgaacugcaacaucgaggccuggcugaacgacaaguccguccccagcccccucaacugggagcgcaagacguucuccaacugcaacuucaacaugagcucccugaugagcuucauccaggccgacuccuucacgugcaacaacaucgacgccgcgaagaucuacggcaugugcuucagcuccaucaccaucgacaaguucgccauccccaacgggcggaagguggaccugcagcucggcaaccugggcuaccugcagagcuucaacuaccgcaucgacaccaccgccaccuccugccagcucuacuacaaccugccggccgccaacgugagcgucucccgguucaaccccagcaccuggaacaagcgcuucggguucaucgagaacuccguguucaagccccagcccgcgggcgugcugaccaaccacgacgucguguacgcccagcacugcuucaaggccccgaagaacuucugccccugcaagcucaacagcucccugugcguggggagcggccccgggaagaacaacggcaucgggaccugccccgccgggacgaacuaccugaccugccacaaccucugcaacccggaccccaucaccuucaccggccccuacaagugcccgcagacgaagucccuggucgggaucggcgagcacugcagcgggcuggccgucaagagcgacuacugcggcggcaaccccugcacgugccagccccaggcguuccuggggugguccgccgacagcugccuccagggcgacaagugcaacaucuucgccaaccugauccugcacgacgugaacuccgggcugaccugcagcaccgaccugcagaaggccaacaccgacaucaagcugggcgugugcgugaacuacgaccucuacggcaucuccgggcagggcaucuucguggaggucaacgccaccuacuacaacagcuggcagaaccugcuguacgacuccaacgggaaccucuacggcuuccgggacuacaucaccaaccgcaccuucaugauccggagcugcuacuccgggcgcgugagcgcggccuuccacgccaacuccagcgagcccgcccugcuguuccggaacaucaagugcaacuacguguucaacaacucccucauccgccagcugcagccgaucaacuacuucgacagcuaccugggcugcgucgugaacgcguacaacuccacggccaucagcgugcagaccugcgaccucaccgucggcuccggguacugcguggacuacagcaagaacggcgggagcggcuccgccaucaccacgggguaccgguucaccaacuucgagcccuucaccgugaacagcgucaacgacucccuggagcccgugggcggccuguacgagauccagauccccagcgaguucaccaucgggaacauggaggaguucauccagacguccagcccgaaggugaccaucgacugcgccgccuucgucugcggcgacuacgcggccugcaagucccagcucguggaguacgggagcuucugcgacaacaucaacgccauccugaccgaggugaacgagcugcucgacaccacgcagcugcaggucgccaacucccugaugaacggcgugacccucagcaccaagcugaaggacggggugaacuucaacgucgacgacaucaacuucuccagcgugcugggcugccucggcuccgagugcagcaaggccuccagccgcuccgcgaucgaggaccugcuguucgacaaggugaagcucagcgacgucggguucguggccgccuacaacaacugcaccggcggggccgagauccgcgaccugaucugcgugcaguccuacaagggcaucaagguccugccgccccuccugagcgagaaccagaucagcggguacacgcuggccgcgaccuccgccagccucuucccgcccuggaccgccgccgcgggcgugcccuucuaccugaacgugcaguaccggaucaacggccugggggucaccauggacgugcucucccagaaccagaagcugaucgccaacgccuucaacaacgcccuggacgccauccaggagggcuucgacgcgacgaacagcgcccucgugaagauccaggccgucgugaacgccaacgccgaggcgcugaacaaccugcuccagcagcuguccaaccgcuucggggccaucagcuccagccugcaggagauccucucccggcuggacccgcccgaggccgaggcccagaucgaccgccugaucaacggccggcucaccgcccugaacgcguacgugagccagcagcuguccgacagcacccucgucaaguucuccgccgcccaggccauggagaaggugaacgagugcgucaagagccaguccagccgcaucaacuucugcggcaacgggaaccacaucaucucccuggugcagaacgcgcccuacggccuguacuucauccacuucagcuacgugcccaccaaguacgucacggccaaggugucccccgggcucugcaucgccggcgaccgggggaucgcccccaagagcggcuacuucgugaacgucaacaacaccuggauguacaccggcagcggguacuacuaccccgagcccaucaccgagaacaacgugguggucaugagcacgugcgccgugaacuacaccaaggcgcccuacgugaugcugaacaccuccacccccaaccugccggacuuccgcgaggagcucgaccagugguucaagaaccagaccuccgucgcccccgaccugagccuggacuacaucaacgugacguuccucgaccuccagguggagaugaaccggcugcaggaggccaucaagguccucaacuga

SEQ ID NO: 14963 - RNA, 3945 nt, Artificial Sequence
  HCoV/OC43/1783A_10__AIL49484.1 spike protein CDS gc (variant)
auguuccugauccuccugaucagccugcccaccgccuucgccgugaucggcgaccucaagugcccgcuggacucccgcaccgggagccugaacaacaucgacacgggcccgcccuccaucagcaccgcgaccgucgacgugaccaacgggcucggcacguacuacgugcuggaccgggucuaccugaacaccacccucuuccugaacggguacuaccccaccuccggcagcacguaccgcaacauggcccugaagggcaccgacaagcucuccacccugugguucaagccgcccuuccugagcgacuucaucaacgggaucuucgccaaggugaagaacaccaagguguucaaggacggcgucauguacuccgaguuccccgccaucacgaucgggagcaccuucgugaacaccuccuacagcguggucgugcagccccggaccaucaacuccacgcaggacggcgugaacaagcuccaggggcugcuggaggucagcgugugccaguacaacaugugcgaguacccccacaccaucugccaccccaagcucggcaaccacuucaaggagcuguggcacauggacaccggcguggucuccugccuguacaagcgcaacuucaccuacgacgugaacgccacguaccucuacuuccacuucuaccaggagggcggcaccuucuacgcguacuucaccgacaccgggguggucacgaaguuccuguucaacguguaccugggcauggcccucagccacuacuacgugaugccccugaccugcaucucccggcgcgacaucggcuucacccuggaguacugggucacgccccucaccagccggcaguaccugcuggccuucaaccaggacgggaucaucuucaacgccguggacugcauguccgacuucaugagcgagaucaagugcaagacccagagcaucgcgccgcccaccggcguguacgagcucaacggguacaccguccagcccaucgccgacguguaccgccggaagcccgaccugccgaacugcaacaucgaggccuggcugaacgacaaguccguccccagcccccucaacugggagcgcaagacguucuccaacugcaacuucaacaugagcucccugaugagcuucauccaggccgacuccuucacgugcaacaacaucgacgccgcgaagaucuacggcaugugcuucagcuccaucaccaucgacaaguucgccauccccaacgggcggaagguggaccugcagcucggcaaccugggcuaccugcagagcuucaacuaccgcaucgacaccaccgccaccuccugccagcucuacuacaaccugccggccgccaacgugagcgucucccgguucaaccccagcaccuggaacaagcgcuucggguucaucgagaacuccguguucaagccccagcccgcgggcgugcugaccaaccacgacgucguguacgcccagcacugcuucaaggccccgaagaacuucugccccugcaagcucaacagcucccugugcguggggagcggccccgggaagaacaacggcaucgggaccugccccgccgggacgaacuaccugaccugccacaaccucugcaacccggaccccaucaccuucaccggccccuacaagugcccgcagacgaagucccuggucgggaucggcgagcacugcagcgggcuggccgucaagagcgacuacugcggcggcaaccccugcacgugccagccccaggcguuccuggggugguccgccgacagcugccuccagggcgacaagugcaacaucuucgccaaccugauccugcacgacgugaacuccgggcugaccugcagcaccgaccugcagaaggccaacaccgacaucaagcugggcgugugcgugaacuacgaccucuacggcaucuccgggcagggcaucuucguggaggucaacgccaccuacuacaacagcuggcagaaccugcuguacgacuccaacgggaaccucuacggcuuccgggacuacaucaccaaccgcaccuucaugauccggagcugcuacuccgggcgcgugagcgcggccuuccacgccaacuccagcgagcccgcccugcuguuccggaacaucaagugcaacuacguguucaacaacucccucauccgccagcugcagccgaucaacuacuucgacagcuaccugggcugcgucgugaacgcguacaacuccacggccaucagcgugcagaccugcgaccucaccgucggcuccggguacugcguggacuacagcaagaacggcgggagcggcuccgccaucaccacgggguaccgguucaccaacuucgagcccuucaccgugaacagcgucaacgacucccuggagcccgugggcggccuguacgagauccagauccccagcgaguucaccaucgggaacauggaggaguucauccagacguccagcccgaaggugaccaucgacugcgccgccuucgucugcggcgacuacgcggccugcaagucccagcucguggaguacgggagcuucugcgacaacaucaacgccauccugaccgaggugaacgagcugcucgacaccacgcagcugcaggucgccaacucccugaugaacggcgugacccucagcaccaagcugaaggacggggugaacuucaacgucgacgacaucaacuucuccagcgugcugggcugccucggcuccgagugcagcaaggccuccagccgcuccgcgaucgaggaccugcuguucgacaaggugaagcucagcgacgucggguucguggccgccuacaacaacugcaccggcggggccgagauccgcgaccugaucugcgugcaguccuacaagggcaucaagguccugccgccccuccugagcgagaaccagaucagcggguacacgcuggccgcgaccuccgccagccucuucccgcccuggaccgccgccgcgggcgugcccuucuaccugaacgugcaguaccggaucaacggccugggggucaccauggacgugcucucccagaaccagaagcugaucgccaacgccuucaacaacgcccuggacgccauccaggagggcuucgacgcgacgaacagcgcccucgugaagauccaggccgucgugaacgccaacgccgaggcgcugaacaaccugcuccagcagcuguccaaccgcuucggggccaucagcuccagccugcaggagauccucucccggcuggacccgcccgaggccgaggcccagaucgaccgccugaucaacggccggcucaccgcccugaacgcguacgugagccagcagcuguccgacagcacccucgucaaguucuccgccgcccaggccauggagaaggugaacgagugcgucaagagccaguccagccgcaucaacuucugcggcaacgggaaccacaucaucucccuggugcagaacgcgcccuacggccuguacuucauccacuucagcuacgugcccaccaaguacgucacggccaaggugucccccgggcucugcaucgccggcgaccgggggaucgcccccaagagcggcuacuucgugaacgucaacaacaccuggauguacaccggcagcggguacuacuaccccgagcccaucaccgagaacaacgugguggucaugagcacgugcgccgugaacuacaccaaggcgcccuacgugaugcugaacaccuccacccccaaccugccggacuuccgcgaggagcucgaccagugguucaagaaccagaccuccgucgcccccgaccugagccuggacuacaucaacgugacguuccucgaccuccagguggagaugaaccggcugcaggaggccaucaagguccucaacggcggguacauccccgaggccccgcgcgacggccaggccuacgugcggaaggacggggagugggugcugcuguccaccuucuga

SEQ ID NO: 14964 - RNA, 4056 nt, Artificial Sequence
  HCoV/HKU1/N5__Q0ZME7.1 spike protein CDS gc (1-1351)
auguuccugaucaucuucauccuccccaccacccuggccgugaucggcgacuucaacugcacgaacagcuucaucaacgacuacaacaagaccaucccgcgcaucuccgaggacgucguggacgugagccuggggcucggcaccuacuacguccugaaccggguguaccugaacaccacgcuccuguucaccggguacuuccccaaguccggcgccaacuuccgcgaccuggcgcucaaggggagcaucuaccuguccacccugugguacaagccgcccuuccucagcgacuucaacaacggcaucuucuccaaggugaagaacaccaagcuguacgucaacaacacgcuguacagcgaguucuccaccaucgugaucggcagcguguucgucaacaccuccuacaccaucguggugcagccccacaacgggauccucgagaucacggccugccaguacaccaugugcgaguacccccacaccgucugcaagagcaagggcuccauccggaacgagagcuggcacaucgacuccagcgagccccugugccuguucaagaagaacuucaccuacaacguguccgccgacuggcucuacuuccacuucuaccaggagcgcgggguguucuacgccuacuacgccgacgucggcaugcccacgaccuuccuguucagccuguaccucgggaccauccugucccacuacuacgugaugccgcugaccugcaacgcgaucagcagcaacacggacaacgagacccucgaguacugggugacgccccugucccggcgccaguaccugcucaacuucgacgagcacggcgucaucaccaacgccguggacugcagcuccagcuuccuguccgagauccagugcaagacccagagcuucgcccccaacaccggcguguacgaccuguccggguucaccgucaagcccguggccaccguguaccggcgcaucccgaaccuccccgacugcgacaucgacaacuggcugaacaacgucagcgugcccagcccccugaacugggagcggcgcaucuucuccaacugcaacuucaaccucuccacgcugcugcggcucguccacguggacagcuucuccugcaacaaccuggacaagagcaagaucuucggcuccugcuucaacagcaucaccguggacaaguucgcgaucccgaaccgccggcgcgacgaccugcagcucggguccagcggcuuccugcaguccagcaacuacaagaucgacaucagcuccagcuccugccagcuguacuacagccucccccuggucaacgugaccaucaacaacuucaaccccuccagcuggaaccggcgcuacggcuucggguccuucaaccugagcuccuacgacguggucuacagcgaccacugcuucuccgugaacagcgacuucugccccugcgccgacccguccguggucaacagcugcgccaaguccaagccgcccagcgccaucugccccgccggcaccaaguaccggcacugcgaccucgacacgacccuguacgugaagaacuggugccgcugcuccugccugcccgaccccaucagcaccuacagccccaacacgugcccccagaagaagguggucguggggaucggcgagcacugcccggggcugggcaucaacgaggagaagugcggcacccagcucaaccacuccagcugcuucugcucccccgacgcguuccugggguggagcuucgacuccugcaucagcaacaaccggugcaacaucuucuccaacuucaucuucaacggcaucaacagcgggacgaccugcuccaacgaccugcucuacagcaacaccgagaucuccaccggcgugugcgucaacuacgaccuguacgggaucaccggccagggcaucuucaaggaggugagcgccgccuacuacaacaacuggcagaaccugcucuacgacuccaacgggaacaucaucggcuucaaggacuuccugaccaacaagaccuacaccauccugcccugcuacagcgggcgcguguccgccgccuucuaccagaacagcuccagcccggcgcuccuguaccggaaccugaagugcuccuacguccucaacaacaucagcuucaucagccagcccuucuacuucgacuccuaccugggcugcgugcugaacgccgugaaccucacgagcuacuccgucagcuccugcgaccugcgcauggggagcggcuucugcaucgacuacgcccugcccuccagccgccggaagcgccggggcaucuccagccccuaccgcuucgugaccuucgagccguucaacguguccuucgucaacgacagcguggagaccgucgggggccucuucgagauccagauccccaccaacuucacgaucgccgggcacgaggaguucauccagaccuccagccccaaggugaccaucgacugcuccgccuucgugugcagcaacuacgcggccugccacgaccugcuguccgaguacggcaccuucugcgacaacaucaacagcauccucaacgaggugaacgaccugcuggacaucacgcagcuccaggucgccaacgcccugaugcagggcgugacccuguccagcaaccucaacaccaaccugcacagcgacguggacaacaucgacuucaagucccugcucgggugccugggcagccagugcggguccagcucccggagccugcucgaggaccugcuguucaacaaggucaagcucuccgacgugggcuucguggaggccuacaacaacugcaccgggggcagcgagauccgcgaccugcugugcguccaguccuucaacggcaucaaggugcugcccccgauccucagcgagacgcagaucuccggguacaccaccgcggccaccguggccgccauguucccgcccuggagcgcggccgccggcguccccuucucccugaacgugcaguaccggaucaacgggcucggcgugacgauggacguccugaacaagaaccagaagcugaucgccaacgccuucaacaaggcgcuccugagcauccagaacggguucaccgccaccaacuccgcccuggccaagauccagagcguggugaacgccaacgcgcaggcccucaacucccugcugcagcagcuguucaacaaguucggcgccaucagcuccagccuccaggagauccugagccgccucgacaaccuggaggcccagguccagaucgaccggcugaucaacggccgccucaccgcccugaacgcguacgugucccagcagcugagcgacaucacgcucaucaaggccggggccucccgggccaucgagaaggugaacgagugcgucaagagccagagcccccgcaucaacuucugcggcaacgggaaccacauccugucccuggugcagaacgcgcccuacggccuccuguucauccacuucuccuacaagcccaccagcuucaagaccgugcuggucucccccgggcucugccugagcggcgaccggggcaucgccccgaagcagggguacuucaucaagcagaacgacuccuggauguucaccggcagcuccuacuacuaccccgagcccaucagcgacaagaacguggucuucaugaacuccugcagcgugaacuucacgaaggcccccuucaucuaccugaacaacuccaucccgaaccucagcgacuucgaggccgagcugucccugugguucaagaaccacaccagcaucgcccccaaccucaccuucaacagccacaucaacgcgaccuuccuggaccuguacuacgagaugaacgugauccaggaguccaucaagagccucaacuccagcuucaucaaccugaaggagaucgggacguacgagauguacgucaaguggcccugguacaucuggcugcucaucgugauccuguucaucaucuuccugaugauccucuucuucaucugcugcugcaccggcugcggguccgccugcuucagcaagugccacaacugcugcgacgaguacggcggccacaacgacuucgugaucaaggccucccacgacgacuga

SEQ ID NO: 14965 - RNA, 4056 nt, Artificial Sequence
  HCoV/HKU1/N5__Q0ZME7.1 spike protein CDS gc (1-1351)(N1067P_L1068P)
auguuccugaucaucuucauccuccccaccacccuggccgugaucggcgacuucaacugcacgaacagcuucaucaacgacuacaacaagaccaucccgcgcaucuccgaggacgucguggacgugagccuggggcucggcaccuacuacguccugaaccggguguaccugaacaccacgcuccuguucaccggguacuuccccaaguccggcgccaacuuccgcgaccuggcgcucaaggggagcaucuaccuguccacccugugguacaagccgcccuuccucagcgacuucaacaacggcaucuucuccaaggugaagaacaccaagcuguacgucaacaacacgcuguacagcgaguucuccaccaucgugaucggcagcguguucgucaacaccuccuacaccaucguggugcagccccacaacgggauccucgagaucacggccugccaguacaccaugugcgaguacccccacaccgucugcaagagcaagggcuccauccggaacgagagcuggcacaucgacuccagcgagccccugugccuguucaagaagaacuucaccuacaacguguccgccgacuggcucuacuuccacuucuaccaggagcgcgggguguucuacgccuacuacgccgacgucggcaugcccacgaccuuccuguucagccuguaccucgggaccauccugucccacuacuacgugaugccgcugaccugcaacgcgaucagcagcaacacggacaacgagacccucgaguacugggugacgccccugucccggcgccaguaccugcucaacuucgacgagcacggcgucaucaccaacgccguggacugcagcuccagcuuccuguccgagauccagugcaagacccagagcuucgcccccaacaccggcguguacgaccuguccggguucaccgucaagcccguggccaccguguaccggcgcaucccgaaccuccccgacugcgacaucgacaacuggcugaacaacgucagcgugcccagcccccugaacugggagcggcgcaucuucuccaacugcaacuucaaccucuccacgcugcugcggcucguccacguggacagcuucuccugcaacaaccuggacaagagcaagaucuucggcuccugcuucaacagcaucaccguggacaaguucgcgaucccgaaccgccggcgcgacgaccugcagcucggguccagcggcuuccugcaguccagcaacuacaagaucgacaucagcuccagcuccugccagcuguacuacagccucccccuggucaacgugaccaucaacaacuucaaccccuccagcuggaaccggcgcuacggcuucggguccuucaaccugagcuccuacgacguggucuacagcgaccacugcuucuccgugaacagcgacuucugccccugcgccgacccguccguggucaacagcugcgccaaguccaagccgcccagcgccaucugccccgccggcaccaaguaccggcacugcgaccucgacacgacccuguacgugaagaacuggugccgcugcuccugccugcccgaccccaucagcaccuacagccccaacacgugcccccagaagaagguggucguggggaucggcgagcacugcccggggcugggcaucaacgaggagaagugcggcacccagcucaaccacuccagcugcuucugcucccccgacgcguuccugggguggagcuucgacuccugcaucagcaacaaccggugcaacaucuucuccaacuucaucuucaacggcaucaacagcgggacgaccugcuccaacgaccugcucuacagcaacaccgagaucuccaccggcgugugcgucaacuacgaccuguacgggaucaccggccagggcaucuucaaggaggugagcgccgccuacuacaacaacuggcagaaccugcucuacgacuccaacgggaacaucaucggcuucaaggacuuccugaccaacaagaccuacaccauccugcccugcuacagcgggcgcguguccgccgccuucuaccagaacagcuccagcccggcgcuccuguaccggaaccugaagugcuccuacguccucaacaacaucagcuucaucagccagcccuucuacuucgacuccuaccugggcugcgugcugaacgccgugaaccucacgagcuacuccgucagcuccugcgaccugcgcauggggagcggcuucugcaucgacuacgcccugcccuccagccgccggaagcgccggggcaucuccagccccuaccgcuucgugaccuucgagccguucaacguguccuucgucaacgacagcguggagaccgucgggggccucuucgagauccagauccccaccaacuucacgaucgccgggcacgaggaguucauccagaccuccagccccaaggugaccaucgacugcuccgccuucgugugcagcaacuacgcggccugccacgaccugcuguccgaguacggcaccuucugcgacaacaucaacagcauccucaacgaggugaacgaccugcuggacaucacgcagcuccaggucgccaacgcccugaugcagggcgugacccuguccagcaaccucaacaccaaccugcacagcgacguggacaacaucgacuucaagucccugcucgggugccugggcagccagugcggguccagcucccggagccugcucgaggaccugcuguucaacaaggucaagcucuccgacgugggcuucguggaggccuacaacaacugcaccgggggcagcgagauccgcgaccugcugugcguccaguccuucaacggcaucaaggugcugcccccgauccugagcgagacgcagaucuccggguacaccaccgcggccaccguggccgccauguucccgcccuggagcgcggccgccggcguccccuucucccugaacgugcaguaccggaucaacgggcucggcgugacgauggacguccugaacaagaaccagaagcugaucgccaacgccuucaacaaggcgcuccugagcauccagaacggguucaccgccaccaacuccgcccuggccaagauccagagcguggugaacgccaacgcgcaggcccucaacucccugcugcagcagcuguucaacaaguucggcgccaucagcuccagccuccaggagauccugagccgccucgacccgcccgaggcccagguccagaucgaccggcugaucaacggccgccugaccgcccucaacgcguacgugucccagcagcugagcgacaucacgcugaucaaggccggggccucccgggccaucgagaaggugaacgagugcgucaagagccagagcccccgcaucaacuucugcggcaacgggaaccacauccucucccuggugcagaacgcgcccuacggccuccucuucauccacuucuccuacaagcccaccagcuucaagaccgugcuggucucccccgggcugugccucagcggcgaccggggcaucgcccccaagcagggguacuucaucaagcagaacgacuccuggauguucaccggcagcuccuacuacuaccccgagccgaucagcgacaagaacguggucuucaugaacuccugcagcgugaacuucacgaaggcccccuucaucuaccugaacaacuccauccccaaccugagcgacuucgaggccgagcucucccugugguucaagaaccacaccagcaucgcccccaaccugaccuucaacagccacaucaacgcgaccuuccucgaccuguacuacgagaugaacgugauccaggaguccaucaagagccugaacuccagcuucaucaaccucaaggagaucgggacguacgagauguacgucaaguggccgugguacaucuggcugcugaucgugauccucuucaucaucuuccugaugauccuguucuucaucugcugcugcaccggcugcggguccgccugcuucagcaagugccacaacugcugcgacgaguacggcggccacaacgacuucgugaucaaggccucccacgacgacuga

SEQ ID NO: 14966 - RNA, 3831 nt, Artificial Sequence
  HCoV/HKU1/N5__Q0ZME7.1 spike protein CDS gc (variant)
auguuccugaucaucuucauccuccccaccacccuggccgugaucggcgacuucaacugcacgaacagcuucaucaacgacuacaacaagaccaucccgcgcaucuccgaggacgucguggacgugagccuggggcucggcaccuacuacguccugaaccggguguaccugaacaccacgcuccuguucaccggguacuuccccaaguccggcgccaacuuccgcgaccuggcgcucaaggggagcaucuaccuguccacccugugguacaagccgcccuuccucagcgacuucaacaacggcaucuucuccaaggugaagaacaccaagcuguacgucaacaacacgcuguacagcgaguucuccaccaucgugaucggcagcguguucgucaacaccuccuacaccaucguggugcagccccacaacgggauccucgagaucacggccugccaguacaccaugugcgaguacccccacaccgucugcaagagcaagggcuccauccggaacgagagcuggcacaucgacuccagcgagccccugugccuguucaagaagaacuucaccuacaacguguccgccgacuggcucuacuuccacuucuaccaggagcgcgggguguucuacgccuacuacgccgacgucggcaugcccacgaccuuccuguucagccuguaccucgggaccauccugucccacuacuacgugaugccgcugaccugcaacgcgaucagcagcaacacggacaacgagacccucgaguacugggugacgccccugucccggcgccaguaccugcucaacuucgacgagcacggcgucaucaccaacgccguggacugcagcuccagcuuccuguccgagauccagugcaagacccagagcuucgcccccaacaccggcguguacgaccuguccggguucaccgucaagcccguggccaccguguaccggcgcaucccgaaccuccccgacugcgacaucgacaacuggcugaacaacgucagcgugcccagcccccugaacugggagcggcgcaucuucuccaacugcaacuucaaccucuccacgcugcugcggcucguccacguggacagcuucuccugcaacaaccuggacaagagcaagaucuucggcuccugcuucaacagcaucaccguggacaaguucgcgaucccgaaccgccggcgcgacgaccugcagcucggguccagcggcuuccugcaguccagcaacuacaagaucgacaucagcuccagcuccugccagcuguacuacagccucccccuggucaacgugaccaucaacaacuucaaccccuccagcuggaaccggcgcuacggcuucggguccuucaaccugagcuccuacgacguggucuacagcgaccacugcuucuccgugaacagcgacuucugccccugcgccgacccguccguggucaacagcugcgccaaguccaagccgcccagcgccaucugccccgccggcaccaaguaccggcacugcgaccucgacacgacccuguacgugaagaacuggugccgcugcuccugccugcccgaccccaucagcaccuacagccccaacacgugcccccagaagaagguggucguggggaucggcgagcacugcccggggcugggcaucaacgaggagaagugcggcacccagcucaaccacuccagcugcuucugcucccccgacgcguuccugggguggagcuucgacuccugcaucagcaacaaccggugcaacaucuucuccaacuucaucuucaacggcaucaacagcgggacgaccugcuccaacgaccugcucuacagcaacaccgagaucuccaccggcgugugcgucaacuacgaccuguacgggaucaccggccagggcaucuucaaggaggugagcgccgccuacuacaacaacuggcagaaccugcucuacgacuccaacgggaacaucaucggcuucaaggacuuccugaccaacaagaccuacaccauccugcccugcuacagcgggcgcguguccgccgccuucuaccagaacagcuccagcccggcgcuccuguaccggaaccugaagugcuccuacguccucaacaacaucagcuucaucagccagcccuucuacuucgacuccuaccugggcugcgugcugaacgccgugaaccucacgagcuacuccgucagcuccugcgaccugcgcauggggagcggcuucugcaucgacuacgcccugcccuccagcggcggguccggcagcgggaucuccagccccuaccgcuucgugaccuucgagccguucaacguguccuucgucaacgacagcguggagaccgugggcggccucuucgagauccagauccccaccaacuucacgaucgccgggcacgaggaguucauccagaccuccagccccaaggucaccaucgacugcuccgccuucgugugcagcaacuacgcggccugccacgaccugcuguccgaguacggcaccuucugcgacaacaucaacagcauccucaacgaggugaacgaccugcuggacaucacgcagcuccaggucgccaacgcccugaugcagggggugacccugagcuccaaccucaacaccaaccugcacagcgacguggacaacaucgacuucaagucccugcucggcugccuggggagccagugcggcuccagcucccggagccugcucgaggaccugcuguucaacaaggucaagcucuccgacgugggcuucguggaggccuacaacaacugcaccgggggcagcgagauccgcgaccugcugugcguccaguccuucaacgggaucaaggugcugcccccgauccugagcgagacgcagaucuccggcuacaccaccgcggccaccguggccgccauguucccgcccuggagcgcggccgccgggguccccuucucccugaacgugcaguaccggaucaacggccucggcgugacgauggacguccugaacaagaaccagaagcugaucgccaacgccuucaacaaggcgcuccugagcauccagaacggguucaccgccaccaacuccgcccuggccaagauccagagcguggugaacgccaacgcgcaggcccucaacucccugcugcagcagcuguucaacaaguucggcgccaucagcagcucccuccaggagauccugagccgccucgacccgcccgaggcccagguccagaucgaccggcugaucaacgggcgccugaccgcccucaacgcguacgugucccagcagcugagcgacaucacgcugaucaaggccggcgccucccgggccaucgagaaggugaacgagugcgucaagagccagagcccccgcaucaacuucugcgggaacggcaaccacauccucucccuggugcagaacgcgcccuacggccuccucuucauccacuucuccuacaagcccaccagcuucaagaccgugcuggucucccccgggcugugccucagcggcgaccgggggaucgcccccaagcagggcuacuucaucaagcagaacgacuccuggauguucaccgggagcuccuacuacuaccccgagccgaucagcgacaagaacguggucuucaugaacuccugcagcgugaacuucacgaaggcccccuucaucuaccugaacaacuccauccccaaccugagcgacuucgaggccgagcucagccugugguucaagaaccacaccuccaucgcccccaaccugaccuucaacagccacaucaacgcgaccuuccucgaccuguacuacgagaugaacgugauccaggaguccaucaagagccugaacuga

SEQ ID NO: 14967 - RNA, 3912 nt, Artificial Sequence
  HCoV/HKU1/N5__Q0ZME7.1 spike protein CDS gc (variant)
auguuccugaucaucuucauccuccccaccacccuggccgugaucggcgacuucaacugcacgaacagcuucaucaacgacuacaacaagaccaucccgcgcaucuccgaggacgucguggacgugagccuggggcucggcaccuacuacguccugaaccggguguaccugaacaccacgcuccuguucaccggguacuuccccaaguccggcgccaacuuccgcgaccuggcccucaaggggagcaucuaccuguccacccugugguacaagccgcccuuccucagcgacuucaacaacggcaucuucuccaaggugaagaacaccaagcuguacgucaacaacacgcuguacagcgaguucuccaccaucgugaucggcagcguguucgucaacaccuccuacaccaucguggugcagccccacaacgggauccucgagaucacggccugccaguacaccaugugcgaguacccccacaccgucugcaagagcaagggcuccauccggaacgagagcuggcacaucgacuccagcgagccccugugccuguucaagaagaacuucaccuacaacguguccgccgacuggcucuacuuccacuucuaccaggagcgcgggguguucuacgccuacuacgccgacgucggcaugcccacgaccuuccuguucagccuguaccucgggaccauccugucccacuacuacgugaugccgcugaccugcaacgcgaucagcagcaacacggacaacgagacccucgaguacugggugacgccccugucccggcgccaguaccugcucaacuucgacgagcacggcgucaucaccaacgccguggacugcagcuccagcuuccuguccgagauccagugcaagacccagagcuucgcccccaacaccggcguguacgaccuguccggguucaccgucaagcccguggccaccguguaccggcgcaucccgaaccuccccgacugcgacaucgacaacuggcugaacaacgucagcgugcccagcccccugaacugggagcggcgcaucuucuccaacugcaacuucaaccucuccacgcugcugcggcucguccacguggacagcuucuccugcaacaaccuggacaagagcaagaucuucggcuccugcuucaacagcaucaccguggacaaguucgcgaucccgaaccgccggcgcgacgaccugcagcucggguccagcggcuuccugcaguccagcaacuacaagaucgacaucagcuccagcuccugccagcuguacuacagccucccccuggucaacgugaccaucaacaacuucaaccccuccagcuggaaccggcgcuacggcuucggguccuucaaccugagcuccuacgacguggucuacagcgaccacugcuucuccgugaacagcgacuucugccccugcgccgacccguccguggucaacagcugcgccaaguccaagccgcccagcgccaucugccccgccggcaccaaguaccggcacugcgaccucgacacgacccuguacgugaagaacuggugccgcugcuccugccugcccgaccccaucagcaccuacagccccaacacgugcccccagaagaagguggucguggggaucggcgagcacugcccggggcugggcaucaacgaggagaagugcggcacccagcucaaccacuccagcugcuucugcucccccgacgcguuccugggguggagcuucgacuccugcaucagcaacaaccggugcaacaucuucuccaacuucaucuucaacggcaucaacagcgggacgaccugcuccaacgaccugcucuacagcaacaccgagaucuccaccggcgugugcgucaacuacgaccuguacgggaucaccggccagggcaucuucaaggaggugagcgccgccuacuacaacaacuggcagaaccugcucuacgacuccaacgggaacaucaucggcuucaaggacuuccugaccaacaagaccuacaccauccugcccugcuacagcgggcgcguguccgccgccuucuaccagaacagcuccagcccggcgcuccuguaccggaaccugaagugcuccuacguccucaacaacaucagcuucaucagccagcccuucuacuucgacuccuaccugggcugcgugcugaacgccgugaaccucacgagcuacuccgucagcuccugcgaccugcgcauggggagcggcuucugcaucgacuacgcccugcccuccagcggcggguccggcagcgggaucuccagccccuaccgcuucgugaccuucgagccguucaacguguccuucgucaacgacagcguggagaccgugggcggccucuucgagauccagauccccaccaacuucacgaucgccgggcacgaggaguucauccagaccuccagccccaaggucaccaucgacugcuccgccuucgugugcagcaacuacgcggccugccacgaccugcuguccgaguacggcaccuucugcgacaacaucaacagcauccucaacgaggugaacgaccugcuggacaucacgcagcuccaggucgccaacgcccugaugcagggggugacccugagcuccaaccucaacaccaaccugcacagcgacguggacaacaucgacuucaagucccugcucggcugccuggggagccagugcggcuccagcucccggagccugcucgaggaccugcuguucaacaaggucaagcucuccgacgugggcuucguggaggccuacaacaacugcaccgggggcagcgagauccgcgaccugcugugcguccaguccuucaacgggaucaaggugcugcccccgauccugagcgagacgcagaucuccggcuacaccaccgcggccaccguggccgccauguucccgcccuggagcgcggccgccgggguccccuucucccugaacgugcaguaccggaucaacggccucggcgugacgauggacguccugaacaagaaccagaagcugaucgccaacgccuucaacaaggcgcuccugagcauccagaacggguucaccgccaccaacuccgcccuggccaagauccagagcguggugaacgccaacgcgcaggcccucaacucccugcugcagcagcuguucaacaaguucggcgccaucagcagcucccuccaggagauccugagccgccucgacccgcccgaggcccagguccagaucgaccggcugaucaacgggcgccugaccgcccucaacgcguacgugucccagcagcugagcgacaucacgcugaucaaggccggcgccucccgggccaucgagaaggugaacgagugcgucaagagccagagcccccgcaucaacuucugcgggaacggcaaccacauccucucccuggugcagaacgcgcccuacggccuccucuucauccacuucuccuacaagcccaccagcuucaagaccgugcuggucucccccgggcugugccucagcggcgaccgggggaucgcccccaagcagggcuacuucaucaagcagaacgacuccuggauguucaccgggagcuccuacuacuaccccgagccgaucagcgacaagaacguggucuucaugaacuccugcagcgugaacuucacgaaggcccccuucaucuaccugaacaacuccauccccaaccugagcgacuucgaggccgagcucagccugugguucaagaaccacaccuccaucgcccccaaccugaccuucaacagccacaucaacgcgaccuuccucgaccuguacuacgagaugaacgugauccaggaguccaucaagagccugaacggcggcuacaucccggaggcgccccgcgacgggcaggccuacguccggaaggacggcgagugggugcuccuguccacguucuga

SEQ ID NO: 14968 - RNA, 3516 nt, Artificial Sequence
  HCoV/229E/BN1/GER/2015__AOG74783.1 spike protein CDS gc (1-1171)
auguucgugcugcucgucgccuacgcccugcugcacaucgcgggcugccagaccaccaacgggacgaacaccagccacuccgugugcaacggcugcguggggcacagcgagaacgucuucgccguggaguccggcggguacauccccagcaacuucgccuucaacaacugguuccuccugaccaacaccuccagcguggucgacggcguggugcgcuccuuccagccgcugcuccugaacugccuguggagcgucuccggcagccaguucacgaccggguucguguacuucaacggcaccgggcggggcgccugcaagggguucuacuccaacgccagcuccgacgugauccgcuacaacaucaacuucgaggagaaccuccggcgcggcaccauccuguucaagacgagcuacggcgcggucguguucuacugcaccaacaacacccugguguccggggacgcccacauccccagcggcaccguccucgggaacuucuacugcuucgugaacacgaccaucggcaacgagaccaccuccgccuucgugggcgcccugcccaagacgguccgggaguucgugaucagccgcaccgggcacuucuacaucaacggcuaccgguacuucucccugggggacguggaggcggucaacuucaacgugaccaacgccgccaccacggugugcaccgucgcccucgccagcuacgcggacgugcuggucaacgugagccagaccgccaucgccaacaucaucuacugcaacuccgugaucaaccgccugcggugcgaccagcucagcuucgacguccccgacggcuucuacuccaccagcccgauccagcccguggagcugcccguguccaucgucagccugcccguguaccacaagcacacguucaucgugcucuacgucaacuucgagcaccgccgggggccgggcaagugcuacaacugccgccccgccgugaucaacaucacccuggccaacuucaacgagaccaagggcccccugugcguggacaccucccacuucacgacccaguucgucgacaacgugaagcucgcgcgguggagcgccuccaucaacaccgggaacugccccuucagcuucggcaaggugaacaacuucgucaaguucggguccgugugcuucagccugaaggacaucccgggcgggugcgccaugcccaucauggccaaccuggugaacuccaagagccacaacaucggcucccucuacgucagcugguccgacggcgacgugaucaccggggugcccaagcccgucgagggcgugagcuccuucaugaacgugacgcugaacaagugcaccaaguacaacaucuacgacgucagcggggugggcgugauccgcaucagcaacgacaccuuccugaacgggaucaccuacacguccaccagcggcaaccuccugggcuucaaggacgucaccaacgggaccaucuacuccaucaccccgugcaacccgcccgaccagcuggugguguaccagcaggccgucgugggcgcgaugcucagcgagaacuucacguccuacggguucagcaacguggucgagaugcccaaguucuucuacgccuccaacggcaccuacaacugcaccgacgccgugcugaccuacagcuccuucggcgugugcgccgacgggagcaucaucgccguccagccccggaacguguccuacgacagcguguccgcgaucgucacggccaaccugagcauccccuucaacuggaccaccuccguccagguggaguaccuccagaucaccagcacgcccaucgugguggacugcuccaccuacgugugcaacggcaacguccgcugcguggagcugcugaagcaguacaccagcgccugcaagaccaucgaggacgcccuccggaacagcgcgaugcuggaguccgccgacgugagcgagaugcugacguucgacaagaaggccuucacccucgccaacgucuccagcuucggggacuacaaccuguccagcgugauccccucccugccgcgcagcggcucccggguggccgggcgcagcgcgaucgaggacauccucuucuccaagcuggucaccagcggccugggcaccguggacgccgacuacaagaagugcacgaaggggcuguccaucgccgaccucgccugcgcccaguacuacaacggcaucaugguccugcccgggguggcggacgccgagcggauggccauguacaccggcagccugaucgggggcaucgcccucggcgggcugaccuccgccgcgagcauccccuucucccuggccauccagagccgccucaacuacguggcccugcagaccgacguccugcaggagaaccagcgcauccucgccgcguccuucaacaaggccaugacgaacaucguggacgccuucaccggcgugaacgacgccaucacccagaccagccaggcccugcagacggucgcgaccgcccugaacaagauccaggacguggugaaccagcaggggaacagccucaaccaccugaccucccagcugcggcagaacuuccaggccaucagcuccagcauccaggccaucuacgaccgccucgacaucauccaggccgaccagcaggucgaccggcugaucaccggccgccuggcggcccucaacguguucgugucccacacgcugaccaaguacaccgagguccgggccagccgccagcuggcccagcagaaggugaacgagugcgugaagucccagagcaagcgguacggguucugcggcaacggcacccacaucuucucccucgucaacgccgcgcccgaggggcugguguuccugcacacggugcuccugccgacccaguacaaggacgucgaggccuggagcggccugugcguggacgggaucaacggcuacgugcuccgccagcccaaccuggcccuguacaaggaggggaacuacuaccggaucaccucccgcaucauguucgagccccggaucccgaccaucgccgacuucguccagaucgagaacugcaacgugacguucgugaacaucagccgcuccgagcuccagaccaucguccccgaguacaucgacgugaacaagacccugcaggagcugagcuacaagcuccccaacuacaccgugcccgaccuggucguggagcaguacaaccagaccauccugaaccucacguccgagaucagcacccuggagaacaaguccgcggagcugaacuacaccgugcagaagcuccagacccugaucgacaacaucaacagcacgcuggucgaccucaaguggcugaaccggguggagaccuacaucaaguggccgugguggguguggcugugcaucuccgucgugcucaucuucguggucagcaugcugcugcucugcugcugcagcaccggcugcugcggcuucuucuccugcuucgccagcuccauccgcgggugcugcgagagcaccaagcugcccuacuacgacguggagaagauccacauccaguga

SEQ ID NO: 14969 - RNA, 3516 nt, Artificial Sequence
  HCoV/229E/BN1/GER/2015__AOG74783.1 spike protein CDS gc (1-1171)(I869P_I870P)
auguucgugcugcucgucgccuacgcccugcugcacaucgcgggcugccagaccaccaacgggacgaacaccagccacuccgugugcaacggcugcguggggcacagcgagaacgucuucgccguggaguccggcggguacauccccagcaacuucgccuucaacaacugguuccuccugaccaacaccuccagcguggucgacggcguggugcgcuccuuccagccgcugcuccugaacugccuguggagcgucuccggcagccaguucacgaccggguucguguacuucaacggcaccgggcggggcgccugcaagggguucuacuccaacgccagcuccgacgugauccgcuacaacaucaacuucgaggagaaccuccggcgcggcaccauccuguucaagacgagcuacggcgcggucguguucuacugcaccaacaacacccugguguccggggacgcccacauccccagcggcaccguccucgggaacuucuacugcuucgugaacacgaccaucggcaacgagaccaccuccgccuucgugggcgcccugcccaagacgguccgggaguucgugaucagccgcaccgggcacuucuacaucaacggcuaccgguacuucucccugggggacguggaggcggucaacuucaacgugaccaacgccgccaccacggugugcaccgucgcccucgccagcuacgcggacgugcuggucaacgugagccagaccgccaucgccaacaucaucuacugcaacuccgugaucaaccgccugcggugcgaccagcucagcuucgacguccccgacggcuucuacuccaccagcccgauccagcccguggagcugcccguguccaucgucagccugcccguguaccacaagcacacguucaucgugcucuacgucaacuucgagcaccgccgggggccgggcaagugcuacaacugccgccccgccgugaucaacaucacccuggccaacuucaacgagaccaagggcccccugugcguggacaccucccacuucacgacccaguucgucgacaacgugaagcucgcgcgguggagcgccuccaucaacaccgggaacugccccuucagcuucggcaaggugaacaacuucgucaaguucggguccgugugcuucagccugaaggacaucccgggcgggugcgccaugcccaucauggccaaccuggugaacuccaagagccacaacaucggcucccucuacgucagcugguccgacggcgacgugaucaccggggugcccaagcccgucgagggcgugagcuccuucaugaacgugacgcugaacaagugcaccaaguacaacaucuacgacgucagcggggugggcgugauccgcaucagcaacgacaccuuccugaacgggaucaccuacacguccaccagcggcaaccuccugggcuucaaggacgucaccaacgggaccaucuacuccaucaccccgugcaacccgcccgaccagcuggugguguaccagcaggccgucgugggcgcgaugcucagcgagaacuucacguccuacggguucagcaacguggucgagaugcccaaguucuucuacgccuccaacggcaccuacaacugcaccgacgccgugcugaccuacagcuccuucggcgugugcgccgacgggagcaucaucgccguccagccccggaacguguccuacgacagcguguccgcgaucgucacggccaaccugagcauccccuucaacuggaccaccuccguccagguggaguaccuccagaucaccagcacgcccaucgugguggacugcuccaccuacgugugcaacggcaacguccgcugcguggagcugcugaagcaguacaccagcgccugcaagaccaucgaggacgcccuccggaacagcgcgaugcuggaguccgccgacgugagcgagaugcugacguucgacaagaaggccuucacccucgccaacgucuccagcuucggggacuacaaccuguccagcgugauccccucccugccgcgcagcggcucccggguggccgggcgcagcgcgaucgaggacauccucuucuccaagcuggucaccagcggccugggcaccguggacgccgacuacaagaagugcacgaaggggcuguccaucgccgaccucgccugcgcccaguacuacaacggcaucaugguccugcccgggguggcggacgccgagcggauggccauguacaccggcagccugaucgggggcaucgcccucggcgggcugaccuccgccgcgagcauccccuucucccuggccauccagagccgccucaacuacguggcccugcagaccgacguccugcaggagaaccagcgcauccucgccgcguccuucaacaaggccaugacgaacaucguggacgccuucaccggcgugaacgacgccaucacccagaccagccaggcccugcagacggucgcgaccgcccugaacaagauccaggacguggugaaccagcaggggaacagccucaaccaccugaccucccagcugcggcagaacuuccaggccaucagcuccagcauccaggccaucuacgaccgccucgacccgccccaggccgaccagcaggucgaccggcugaucaccggccgccuggcggcccucaacguguucgugucccacacgcugaccaaguacaccgagguccgggccagccgccagcuggcccagcagaaggugaacgagugcgugaagucccagagcaagcgguacggguucugcggcaacggcacccacaucuucucccucgucaacgccgcgcccgaggggcugguguuccugcacacggugcuccugcccacccaguacaaggacgucgaggccuggagcggccugugcguggacgggaucaacggcuacgugcuccgccagccgaaccuggcccuguacaaggaggggaacuacuaccggaucaccucccgcaucauguucgagccccggauccccaccaucgccgacuucguccagaucgagaacugcaacgugacguucgugaacaucagccgcuccgagcuccagaccaucguccccgaguacaucgacgugaacaagacccugcaggagcugagcuacaagcucccgaacuacaccgugcccgaccuggucguggagcaguacaaccagaccauccugaaccucacguccgagaucagcacccuggagaacaaguccgcggagcugaacuacaccgugcagaagcuccagacccugaucgacaacaucaacagcacgcuggucgaccucaaguggcugaaccggguggagaccuacaucaaguggcccugguggguguggcugugcaucuccgucgugcucaucuucguggucagcaugcugcugcucugcugcugcagcaccggcugcugcggcuucuucuccugcuucgccagcuccauccgcgggugcugcgagagcaccaagcugcccuacuacgacguggagaagauccacauccaguga

SEQ ID NO: 14970 - RNA, 3327 nt, Artificial Sequence
  HCoV/229E/BN1/GER/2015__AOG74783.1 spike protein CDS gc (variant)
auguucgugcugcucgucgccuacgcccugcugcacaucgcgggcugccagaccaccaacgggacgaacaccagccacuccgugugcaacggcugcguggggcacagcgagaacgucuucgccguggaguccggcggguacauccccagcaacuucgccuucaacaacugguuccuccugaccaacaccuccagcguggucgacggcguggugcgcuccuuccagccgcugcuccugaacugccuguggagcgucuccggcagccaguucacgaccggguucguguacuucaacggcaccgggcggggcgccugcaagggguucuacuccaacgccagcuccgacgugauccgcuacaacaucaacuucgaggagaaccuccggcgcggcaccauccuguucaagacgagcuacggcgcggucguguucuacugcaccaacaacacccugguguccggggacgcccacauccccagcggcaccguccucgggaacuucuacugcuucgugaacacgaccaucggcaacgagaccaccuccgccuucgugggcgcccugcccaagacgguccgggaguucgugaucagccgcaccgggcacuucuacaucaacggcuaccgguacuucucccugggggacguggaggcggucaacuucaacgugaccaacgccgccaccacggugugcaccgucgcccucgccagcuacgcggacgugcuggucaacgugagccagaccgccaucgccaacaucaucuacugcaacuccgugaucaaccgccugcggugcgaccagcucagcuucgacguccccgacggcuucuacuccaccagcccgauccagcccguggagcugcccguguccaucgucagccugcccguguaccacaagcacacguucaucgugcucuacgucaacuucgagcaccgccgggggccgggcaagugcuacaacugccgccccgccgugaucaacaucacccuggccaacuucaacgagaccaagggcccccugugcguggacaccucccacuucacgacccaguucgucgacaacgugaagcucgcgcgguggagcgccuccaucaacaccgggaacugccccuucagcuucggcaaggugaacaacuucgucaaguucggguccgugugcuucagccugaaggacaucccgggcgggugcgccaugcccaucauggccaaccuggugaacuccaagagccacaacaucggcucccucuacgucagcugguccgacggcgacgugaucaccggggugcccaagcccgucgagggcgugagcuccuucaugaacgugacgcugaacaagugcaccaaguacaacaucuacgacgucagcggggugggcgugauccgcaucagcaacgacaccuuccugaacgggaucaccuacacguccaccagcggcaaccuccugggcuucaaggacgucaccaacgggaccaucuacuccaucaccccgugcaacccgcccgaccagcuggugguguaccagcaggccgucgugggcgcgaugcucagcgagaacuucacguccuacggguucagcaacguggucgagaugcccaaguucuucuacgccuccaacggcaccuacaacugcaccgacgccgugcugaccuacagcuccuucggcgugugcgccgacgggagcaucaucgccguccagccccggaacguguccuacgacagcguguccgcgaucgucacggccaaccugagcauccccuucaacuggaccaccuccguccagguggaguaccuccagaucaccagcacgcccaucgugguggacugcuccaccuacgugugcaacggcaacguccgcugcguggagcugcugaagcaguacaccagcgccugcaagaccaucgaggacgcccuccggaacagcgcgaugcuggaguccgccgacgugagcgagaugcugacguucgacaagaaggccuucacccucgccaacgucuccagcuucggggacuacaaccuguccagcgugauccccucccugccgcgcagcggcucccggguggccgggcgcagcgcgaucgaggacauccucuucuccaagcuggucaccagcggccugggcaccguggacgccgacuacaagaagugcacgaaggggcuguccaucgccgaccucgccugcgcccaguacuacaacggcaucaugguccugcccgggguggcggacgccgagcggauggccauguacaccggcagccugaucgggggcaucgcccucggcgggcugaccuccgccgcgagcauccccuucucccuggccauccagagccgccucaacuacguggcccugcagaccgacguccugcaggagaaccagcgcauccucgccgcguccuucaacaaggccaugacgaacaucguggacgccuucaccggcgugaacgacgccaucacccagaccagccaggcccugcagacggucgcgaccgcccugaacaagauccaggacguggugaaccagcaggggaacagccucaaccaccugaccucccagcugcggcagaacuuccaggccaucagcuccagcauccaggccaucuacgaccgccucgacccgccccaggccgaccagcaggucgaccggcugaucaccggccgccuggcggcccucaacguguucgugucccacacgcugaccaaguacaccgagguccgggccagccgccagcuggcccagcagaaggugaacgagugcgugaagucccagagcaagcgguacggguucugcggcaacggcacccacaucuucucccucgucaacgccgcgcccgaggggcugguguuccugcacacggugcuccugcccacccaguacaaggacgucgaggccuggagcggccugugcguggacgggaucaacggcuacgugcuccgccagccgaaccuggcccuguacaaggaggggaacuacuaccggaucaccucccgcaucauguucgagccccggauccccaccaucgccgacuucguccagaucgagaacugcaacgugacguucgugaacaucagccgcuccgagcuccagaccaucguccccgaguacaucgacgugaacaagacccugcaggagcugagcuacaagcucccgaacuacaccgugcccgaccuggucguggagcaguacaaccagaccauccugaaccucacguccgagaucagcacccuggagaacaaguccgcggagcugaacuacaccgugcagaagcuccagacccugaucgacaacaucaacagcacgcuggucgaccucaaguggcugaaccggguggagaccuga

SEQ ID NO: 14971 - RNA, 3408 nt, Artificial Sequence
  HCoV/229E/BN1/GER/2015__AOG74783.1 spike protein CDS gc (variant)
auguucgugcugcucgucgccuacgcccugcugcacaucgccggcugccagaccaccaacgggacgaacaccagccacuccgugugcaacggcugcguggggcacagcgagaacgucuucgccguggaguccggcggguacauccccagcaacuucgccuucaacaacugguuccuccugaccaacaccuccagcguggucgacggcguggugcgcuccuuccagccgcugcuccugaacugccuguggagcgucuccggcagccaguucacgaccggguucguguacuucaacggcaccgggcggggcgccugcaagggguucuacuccaacgccagcuccgacgugauccgcuacaacaucaacuucgaggagaaccuccggcgcggcaccauccuguucaagacgagcuacggcgcggucguguucuacugcaccaacaacacccugguguccggggacgcccacauccccagcggcaccguccucgggaacuucuacugcuucgugaacacgaccaucggcaacgagaccaccuccgccuucgugggcgcccugcccaagacgguccgggaguucgugaucagccgcaccgggcacuucuacaucaacggcuaccgguacuucucccugggggacguggaggcggucaacuucaacgugaccaacgccgccaccacggugugcaccgucgcccucgccagcuacgcggacgugcuggucaacgugagccagaccgccaucgccaacaucaucuacugcaacuccgugaucaaccgccugcggugcgaccagcucagcuucgacguccccgacggcuucuacuccaccagcccgauccagcccguggagcugcccguguccaucgucagccugcccguguaccacaagcacacguucaucgugcucuacgucaacuucgagcaccgccgggggccgggcaagugcuacaacugccgccccgccgugaucaacaucacccuggccaacuucaacgagaccaagggcccccugugcguggacaccucccacuucacgacccaguucgucgacaacgugaagcucgcgcgguggagcgccuccaucaacaccgggaacugccccuucagcuucggcaaggugaacaacuucgucaaguucggguccgugugcuucagccugaaggacaucccgggcgggugcgccaugcccaucauggccaaccuggugaacuccaagagccacaacaucggcucccucuacgucagcugguccgacggcgacgugaucaccggggugcccaagcccgucgagggcgugagcuccuucaugaacgugacgcugaacaagugcaccaaguacaacaucuacgacgucagcggggugggcgugauccgcaucagcaacgacaccuuccugaacgggaucaccuacacguccaccagcggcaaccuccugggcuucaaggacgucaccaacgggaccaucuacuccaucaccccgugcaacccgcccgaccagcuggugguguaccagcaggccgucgugggcgcgaugcucagcgagaacuucacguccuacggguucagcaacguggucgagaugcccaaguucuucuacgccuccaacggcaccuacaacugcaccgacgccgugcugaccuacagcuccuucggcgugugcgccgacgggagcaucaucgccguccagccccggaacguguccuacgacagcguguccgcgaucgucacggccaaccugagcauccccuucaacuggaccaccuccguccagguggaguaccuccagaucaccagcacgcccaucgugguggacugcuccaccuacgugugcaacggcaacguccgcugcguggagcugcugaagcaguacaccagcgccugcaagaccaucgaggacgcccuccggaacagcgcgaugcuggaguccgccgacgugagcgagaugcugacguucgacaagaaggccuucacccucgccaacgucuccagcuucggggacuacaaccuguccagcgugauccccucccugccgcgcagcggcucccggguggccgggcgcagcgcgaucgaggacauccucuucuccaagcuggucaccagcggccugggcaccguggacgccgacuacaagaagugcacgaaggggcuguccaucgccgaccucgccugcgcccaguacuacaacggcaucaugguccugcccgggguggcggacgccgagcggauggccauguacaccggcagccugaucgggggcaucgcccucggcgggcugaccuccgccgcgagcauccccuucucccuggccauccagagccgccucaacuacguggcccugcagaccgacguccugcaggagaaccagcgcauccucgccgcguccuucaacaaggccaugacgaacaucguggacgccuucaccggcgugaacgacgccaucacccagaccagccaggcccugcagacggucgcgaccgcccugaacaagauccaggacguggugaaccagcaggggaacagccucaaccaccugaccucccagcugcggcagaacuuccaggccaucagcuccagcauccaggccaucuacgaccgccucgacccgccccaggccgaccagcaggucgaccggcugaucaccggccgccuggcggcccucaacguguucgugucccacacgcugaccaaguacaccgagguccgggccagccgccagcuggcccagcagaaggugaacgagugcgugaagucccagagcaagcgguacggguucugcggcaacggcacccacaucuucucccucgucaacgccgcgcccgaggggcugguguuccugcacacggugcuccugcccacccaguacaaggacgucgaggccuggagcggccugugcguggacgggaucaacggcuacgugcuccgccagccgaaccuggcccuguacaaggaggggaacuacuaccggaucaccucccgcaucauguucgagccccggauccccaccaucgccgacuucguccagaucgagaacugcaacgugacguucgugaacaucagccgcuccgagcuccagaccaucguccccgaguacaucgacgugaacaagacccugcaggagcugagcuacaagcucccgaacuacaccgugcccgaccuggucguggagcaguacaaccagaccauccugaaccucacguccgagaucagcacccuggagaacaaguccgcggagcugaacuacaccgugcagaagcuccagacccugaucgacaacaucaacagcacgcuggucgaccucaaguggcugaaccggguggagaccggcggcuacauccccgaggcgccccgcgacgggcaggccuacgugcggaaggacggcgaguggguccugcucuccaccuucuga

SEQ ID NO: 14972 - RNA, 4071 nt, Artificial Sequence
  HCoV/NL63/RPTEC/2004__AFV53148.1 spike protein CDS gc (1-1356)
augaagcuguuccucauccugcuggugcucccccuggccagcugcuucuucacgugcaacuccaacgccaaccugagcaugcuccagcugggcgucccggacaacuccagcaccaucgugaccgggcugcuccccacccacugguucugcgcgaaccaguccaccagcguguacuccgccaacggcuucuucuacaucgacgucgggaaccaccgcagcgccuucgcccugcacaccggcuacuacgacgccaaccaguacuacaucuacgugacgaacgagaucgggcugaacgcguccgugacccucaagaucugcaaguucagccggaacaccaccuucgacuuccuguccaacgccagcuccagcuucgacugcaucgucaaccuccucuucacggagcagcugggcgcgccccugggcaucaccaucuccggggagaccgugcgccuccaccuguacaacgugacccggacguucuacguccccgccgccuacaagcugaccaagcucagcgugaagugcuacuucaacuacuccugcguguucagcgucgugaacgccaccgugaccgucaacgugacgacccacaacggccgcguggucaacuacaccgugugcgacgacugcaacggguacaccgacaacaucuucuccgugcagcaggacggccggaucccgaacggguuccccuucaacaacugguuccugcugacgaacggcagcacccucgucgacggcgugagccgccuguaccagccccugcggcugaccugccuguggcccgugccggggcugaaguccagcaccggcuucgucuacuucaacgccacgggguccgacgugaacugcaacggcuaccagcacaacagcgucguggacgugaugcgcuacaaccucaacuucuccgccaacagccuggacaaccugaaguccggcgucaucguguucaagacccuccaguacgacgugcuguucuacugcagcaacuccagcuccgggguccuggacaccaccauccccuucggccccagcucccagcccuacuacugcuucaucaacagcacgaucaacaccacccacguguccaccuucguggggauccucccgcccacgguccgggagaucgugguggcccgcaccggccaguucuacaucaacggguucaaguacuucgaccugggcuucaucgaggcggucaacuucaacgugaccaccgccagcgccacggacuucuggaccguggccuucgccaccuucgucgacgugcuggugaacgucuccgcgaccaacauccagaaccuccuguacugcgacagccccuucgagaagcugcagugcgagcaccuccaguucggccugcaggacggguucuacuccgccaacuuccuggacgacaacgugcuccccgagaccuacguggcccugccgaucuacuaccagcacacggacaucaacuucaccgccaccgccagcuucggcgggagcugcuacgucugcaagccccaccaggugaacaucucccugaacggcaacaccagcgugugcguccggacgucccacuucagcauccgcuacaucuacaaccgggugaaguccgggagccccggcgacuccagcuggcacaucuaccugaaguccgggaccugccccuucagcuucuccaagcucaacaacuuccagaaguucaagaccaucugcuucagcaccguggaggucccgggguccugcaacuucccccuggaggcgacguggcacuacaccagcuacaccaucgugggcgcccuguacgugaccugguccgaggggaacagcaucacgggcguccccuaccccguguccgggauccgcgaguucagcaaccucgugcugaacaacugcaccaaguacaacaucuacgacuacgucggcaccggcaucauccggagcuccaaccagagccuggccgggggcaucaccuacguguccaacagcgggaaccuccugggcuucaagaacguguccacgggcaacaucuucaucgucaccccgugcaaccagcccgaccagguggccguguaccagcagagcaucaucggggccaugaccgcggucaacgagucccgcuacggccugcagaaccuccugcagcugcccaacuucuacuacgugagcaacgggggcaacaacugcaccacggccgugaugaccuacuccaacuucgggaucugcgccgacggcagccucauccccguccggccgcgcaacuccagcgacaacggcaucuccgccaucaucaccgcgaaccugagcauccccuccaacuggaccacgagcguccagguggaguaccugcagaucaccuccacccccaucgugguggacugcgccaccuacgugugcaacgggaacccgcggugcaagaaccuccugaagcaguacacgagcgccugcaagaccaucgaggacgcccugcgccucuccgcccaccuggagaccaacgacgucagcagcaugcugaccuucgacuccaacgcguucagccucgccaacgugacguccuucggcgacuacaaccugagcuccgugcugccccagcggaacauccgcagcucccgcaucgccgggcggagcgcccucgaggaccugcuguucuccaaggucgugaccagcggccucgggaccgucgacguggacuacaaguccugcaccaagggccugagcaucgccgaccuggcgugcgcccaguacuacaacggcaucauggugcuccccggggucgccgacgccgagcgcauggccauguacacgggcucccugaucgggggcauggugcugggcggccucaccagcgcggccgccauccccuucucccuggcccugcaggcgcggcucaacuacguggcccugcagaccgacguccugcaggagaaccagaagauccucgccgccagcuucaacaaggccaucaacaacaucguggcguccuucagcuccgugaacgacgccaucacccagaccgccgaggccauccacacggucaccaucgcccugaacaagauccaggacguggugaaccagcagggcagcgcgcugaaccaccucaccagccagcugcgccacaacuuccaggccaucuccaacagcauccaggccaucuacgaccggcuggacuccauccaggccgaccagcaggucgaccgccucaucaccgggcggcuggccgcgcugaacgccuucgugagccaggugcucaacaaguacacggagguccgcggcucccggcgccuggcccagcagaagaucaacgagugcgucaagagccaguccaaccgguacggguucugcggcaacgggacccacaucuucagcaucgugaacuccgccccggacggccuccuguuccugcacaccgugcugcuccccaccgacuacaagaacgugaaggcguggagcggcaucugcguggacgggaucuacggcuacguccugcgccagcccaaccuggugcucuacuccgacaacgggguguuccgggucacgagccgcaucauguuccagccccggcugccggugcuguccgacuucgugcagaucuacaacugcaacgucaccuucgugaacaucagccgcguggagcuccacaccgucauccccgacuacguggacgugaacaagacccugcaggaguucgcccagaaccugcccaaguacgucaagcccaacuucgaccucacgccguucaaccugaccuaccugaaccucuccagcgagcugaagcagcuggaggccaagaccgccucccucuuccagaccacgguggagcugcagggccugaucgaccagaucaacagcaccuacguggaccucaagcugcugaaccgguucgagaacuacaucaaguggcccuggugggucuggcucaucaucuccgugguguucgucgugcugcugagccuccugguguucugcugccugagcaccggcugcugcgggugcugcaacugccucaccuccagcaugcgcggcugcugcgacugcggguccacgaagcugcccuacuacgaguucgagaagguccacgugcaguga

SEQ ID NO: 14973 - RNA, 4071 nt, Artificial Sequence
  HCoV/NL63/RPTEC/2004__AFV53148.1 spike protein CDS gc (1-1356)(S1052P_I1053P)
augaagcuguuccucauccugcuggugcucccccuggccagcugcuucuucacgugcaacuccaacgccaaccugagcaugcuccagcugggcgucccggacaacuccagcaccaucgugaccgggcugcuccccacccacugguucugcgcgaaccaguccaccagcguguacuccgccaacggcuucuucuacaucgacgucgggaaccaccgcagcgccuucgcccugcacaccggcuacuacgacgccaaccaguacuacaucuacgugacgaacgagaucgggcugaacgcguccgugacccucaagaucugcaaguucagccggaacaccaccuucgacuuccuguccaacgccagcuccagcuucgacugcaucgucaaccuccucuucacggagcagcugggcgcgccccugggcaucaccaucuccggggagaccgugcgccuccaccuguacaacgugacccggacguucuacguccccgccgccuacaagcugaccaagcucagcgugaagugcuacuucaacuacuccugcguguucagcgucgugaacgccaccgugaccgucaacgugacgacccacaacggccgcguggucaacuacaccgugugcgacgacugcaacggguacaccgacaacaucuucuccgugcagcaggacggccggaucccgaacggguuccccuucaacaacugguuccugcugacgaacggcagcacccucgucgacggcgugagccgccuguaccagccccugcggcugaccugccuguggcccgugccggggcugaaguccagcaccggcuucgucuacuucaacgccacgggguccgacgugaacugcaacggcuaccagcacaacagcgucguggacgugaugcgcuacaaccucaacuucuccgccaacagccuggacaaccugaaguccggcgucaucguguucaagacccuccaguacgacgugcuguucuacugcagcaacuccagcuccgggguccuggacaccaccauccccuucggccccagcucccagcccuacuacugcuucaucaacagcacgaucaacaccacccacguguccaccuucguggggauccucccgcccacgguccgggagaucgugguggcccgcaccggccaguucuacaucaacggguucaaguacuucgaccugggcuucaucgaggcggucaacuucaacgugaccaccgccagcgccacggacuucuggaccguggccuucgccaccuucgucgacgugcuggugaacgucuccgcgaccaacauccagaaccuccuguacugcgacagccccuucgagaagcugcagugcgagcaccuccaguucggccugcaggacggguucuacuccgccaacuuccuggacgacaacgugcuccccgagaccuacguggcccugccgaucuacuaccagcacacggacaucaacuucaccgccaccgccagcuucggcgggagcugcuacgucugcaagccccaccaggugaacaucucccugaacggcaacaccagcgugugcguccggacgucccacuucagcauccgcuacaucuacaaccgggugaaguccgggagccccggcgacuccagcuggcacaucuaccugaaguccgggaccugccccuucagcuucuccaagcucaacaacuuccagaaguucaagaccaucugcuucagcaccguggaggucccgggguccugcaacuucccccuggaggcgacguggcacuacaccagcuacaccaucgugggcgcccuguacgugaccugguccgaggggaacagcaucacgggcguccccuaccccguguccgggauccgcgaguucagcaaccucgugcugaacaacugcaccaaguacaacaucuacgacuacgucggcaccggcaucauccggagcuccaaccagagccuggccgggggcaucaccuacguguccaacagcgggaaccuccugggcuucaagaacguguccacgggcaacaucuucaucgucaccccgugcaaccagcccgaccagguggccguguaccagcagagcaucaucggggccaugaccgcggucaacgagucccgcuacggccugcagaaccuccugcagcugcccaacuucuacuacgugagcaacgggggcaacaacugcaccacggccgugaugaccuacuccaacuucgggaucugcgccgacggcagccucauccccguccggccgcgcaacuccagcgacaacggcaucuccgccaucaucaccgcgaaccugagcauccccuccaacuggaccacgagcguccagguggaguaccugcagaucaccuccacccccaucgugguggacugcgccaccuacgugugcaacgggaacccgcggugcaagaaccuccugaagcaguacacgagcgccugcaagaccaucgaggacgcccugcgccucuccgcccaccuggagaccaacgacgucagcagcaugcugaccuucgacuccaacgcguucagccucgccaacgugacguccuucggcgacuacaaccugagcuccgugcugccccagcggaacauccgcagcucccgcaucgccgggcggagcgcccucgaggaccugcuguucuccaaggucgugaccagcggccucgggaccgucgacguggacuacaaguccugcaccaagggccugagcaucgccgaccuggcgugcgcccaguacuacaacggcaucauggugcuccccggggucgccgacgccgagcgcauggccauguacacgggcucccugaucgggggcauggugcugggcggccucaccagcgcggccgccauccccuucucccuggcccugcaggcgcggcucaacuacguggcccugcagaccgacguccugcaggagaaccagaagauccucgccgccagcuucaacaaggccaucaacaacaucguggcguccuucagcuccgugaacgacgccaucacccagaccgccgaggccauccacacggucaccaucgcccugaacaagauccaggacguggugaaccagcagggcagcgcgcugaaccaccucaccagccagcugcgccacaacuuccaggccaucuccaacagcauccaggccaucuacgaccggcuggacccgccccaggccgaccagcaggucgaccgccucaucaccgggcggcuggccgcgcugaacgccuucgugucccaggugcucaacaaguacacggagguccgcggcagccggcgccuggcccagcagaagaucaacgagugcgugaagucccagagcaaccgguacggguucugcggcaacgggacccacaucuucuccaucgugaacagcgcccccgacggccuccuguuccugcacaccguccugcuccccaccgacuacaagaacgugaaggcgugguccggcaucugcguggacgggaucuacggcuacguccugcgccagccgaaccuggugcucuacagcgacaacgggguguuccgggucacgucccgcaucauguuccagccccggcugcccgugcugagcgacuucgugcagaucuacaacugcaacgucaccuucgugaacaucucccgcguggagcuccacaccgucauccccgacuacguggacgugaacaagacccugcaggaguucgcccagaaccugccgaaguacgucaagcccaacuucgaccucacgcccuucaaccugaccuaccugaaccucagcuccgagcugaagcagcuggaggccaagaccgccagccucuuccagaccacgguggagcugcagggccugaucgaccagaucaacuccaccuacguggaccucaagcugcugaaccgguucgagaacuacaucaaguggcccuggugggucuggcucaucaucagcgugguguucgucgugcugcugucccuccugguguucugcugccugagcaccggcugcugcgggugcugcaacugccucaccagcuccaugcgcggcugcugcgacugcgggagcacgaagcugccguacuacgaguucgagaagguccacgugcaguga

SEQ ID NO: 14974 - RNA, 3876 nt, Artificial Sequence
  HCoV/NL63/RPTEC/2004__AFV53148.1 spike protein CDS gc (variant)
augaagcuguuccucauccugcuggugcucccccuggccagcugcuucuucacgugcaacuccaacgccaaccugagcaugcuccagcugggcgucccggacaacuccagcaccaucgugaccgggcugcuccccacccacugguucugcgcgaaccaguccaccagcguguacuccgccaacggcuucuucuacaucgacgucgggaaccaccgcagcgccuucgcccugcacaccggcuacuacgacgccaaccaguacuacaucuacgugacgaacgagaucgggcugaacgcguccgugacccucaagaucugcaaguucagccggaacaccaccuucgacuuccuguccaacgccagcuccagcuucgacugcaucgucaaccuccucuucacggagcagcugggcgcgccccugggcaucaccaucuccggggagaccgugcgccuccaccuguacaacgugacccggacguucuacguccccgccgccuacaagcugaccaagcucagcgugaagugcuacuucaacuacuccugcguguucagcgucgugaacgccaccgugaccgucaacgugacgacccacaacggccgcguggucaacuacaccgugugcgacgacugcaacggguacaccgacaacaucuucuccgugcagcaggacggccggaucccgaacggguuccccuucaacaacugguuccugcugacgaacggcagcacccucgucgacggcgugagccgccuguaccagccccugcggcugaccugccuguggcccgugccggggcugaaguccagcaccggcuucgucuacuucaacgccacgggguccgacgugaacugcaacggcuaccagcacaacagcgucguggacgugaugcgcuacaaccucaacuucuccgccaacagccuggacaaccugaaguccggcgucaucguguucaagacccuccaguacgacgugcuguucuacugcagcaacuccagcuccgggguccuggacaccaccauccccuucggccccagcucccagcccuacuacugcuucaucaacagcacgaucaacaccacccacguguccaccuucguggggauccucccgcccacgguccgggagaucgugguggcccgcaccggccaguucuacaucaacggguucaaguacuucgaccugggcuucaucgaggcggucaacuucaacgugaccaccgccagcgccacggacuucuggaccguggccuucgccaccuucgucgacgugcuggugaacgucuccgcgaccaacauccagaaccuccuguacugcgacagccccuucgagaagcugcagugcgagcaccuccaguucggccugcaggacggguucuacuccgccaacuuccuggacgacaacgugcuccccgagaccuacguggcccugccgaucuacuaccagcacacggacaucaacuucaccgccaccgccagcuucggcgggagcugcuacgucugcaagccccaccaggugaacaucucccugaacggcaacaccagcgugugcguccggacgucccacuucagcauccgcuacaucuacaaccgggugaaguccgggagccccggcgacuccagcuggcacaucuaccugaaguccgggaccugccccuucagcuucuccaagcucaacaacuuccagaaguucaagaccaucugcuucagcaccguggaggucccgggguccugcaacuucccccuggaggcgacguggcacuacaccagcuacaccaucgugggcgcccuguacgugaccugguccgaggggaacagcaucacgggcguccccuaccccguguccgggauccgcgaguucagcaaccucgugcugaacaacugcaccaaguacaacaucuacgacuacgucggcaccggcaucauccggagcuccaaccagagccuggccgggggcaucaccuacguguccaacagcgggaaccuccugggcuucaagaacguguccacgggcaacaucuucaucgucaccccgugcaaccagcccgaccagguggccguguaccagcagagcaucaucggggccaugaccgcggucaacgagucccgcuacggccugcagaaccuccugcagcugcccaacuucuacuacgugagcaacgggggcaacaacugcaccacggccgugaugaccuacuccaacuucgggaucugcgccgacggcagccucauccccguccggccgcgcaacuccagcgacaacggcaucuccgccaucaucaccgcgaaccugagcauccccuccaacuggaccacgagcguccagguggaguaccugcagaucaccuccacccccaucgugguggacugcgccaccuacgugugcaacgggaacccgcggugcaagaaccuccugaagcaguacacgagcgccugcaagaccaucgaggacgcccugcgccucuccgcccaccuggagaccaacgacgucagcagcaugcugaccuucgacuccaacgcguucagccucgccaacgugacguccuucggcgacuacaaccugagcuccgugcugccccagcggaacauccgcagcucccgcaucgccgggcggagcgcccucgaggaccugcuguucuccaaggucgugaccagcggccucgggaccgucgacguggacuacaaguccugcaccaagggccugagcaucgccgaccuggcgugcgcccaguacuacaacggcaucauggugcuccccggggucgccgacgccgagcgcauggccauguacacgggcucccugaucgggggcauggugcugggcggccucaccagcgcggccgccauccccuucucccuggcccugcaggcgcggcucaacuacguggcccugcagaccgacguccugcaggagaaccagaagauccucgccgccagcuucaacaaggccaucaacaacaucguggcguccuucagcuccgugaacgacgccaucacccagaccgccgaggccauccacacggucaccaucgcccugaacaagauccaggacguggugaaccagcagggcagcgcgcugaaccaccucaccagccagcugcgccacaacuuccaggccaucuccaacagcauccaggccaucuacgaccggcuggacccgccccaggccgaccagcaggucgaccgccucaucaccgggcggcuggccgcgcugaacgccuucgugucccaggugcucaacaaguacacggagguccgcggcagccggcgccuggcccagcagaagaucaacgagugcgugaagucccagagcaaccgguacggguucugcggcaacgggacccacaucuucuccaucgugaacagcgcccccgacggccuccuguuccugcacaccguccugcuccccaccgacuacaagaacgugaaggcgugguccggcaucugcguggacgggaucuacggcuacguccugcgccagccgaaccuggugcucuacagcgacaacgggguguuccgggucacgucccgcaucauguuccagccccggcugcccgugcugagcgacuucgugcagaucuacaacugcaacgucaccuucgugaacaucucccgcguggagcuccacaccgucauccccgacuacguggacgugaacaagacccugcaggaguucgcccagaaccugccgaaguacgucaagcccaacuucgaccucacgcccuucaaccugaccuaccugaaccucagcuccgagcugaagcagcuggaggccaagaccgccagccucuuccagaccacgguggagcugcagggccugaucgaccagaucaacuccaccuacguggaccucaagcugcugaaccgguucgagaacuga

SEQ ID NO: 14975 - RNA, 3957 nt, Artificial Sequence
  HCoV/NL63/RPTEC/2004__AFV53148.1 spike protein CDS gc (variant)
augaagcuguuccucauccugcuggugcucccccuggccagcugcuucuucacgugcaacuccaacgccaaccugagcaugcuccagcugggcgucccggacaacuccagcaccaucgugaccgggcugcuccccacccacugguucugcgcgaaccaguccaccagcguguacuccgccaacggcuucuucuacaucgacgucgggaaccaccgcagcgccuucgcccugcacaccggcuacuacgacgccaaccaguacuacaucuacgugacgaacgagaucgggcugaacgcguccgugacccucaagaucugcaaguucagccggaacaccaccuucgacuuccuguccaacgccagcuccagcuucgacugcaucgucaaccuccucuucacggagcagcugggcgcgccccugggcaucaccaucuccggggagaccgugcgccuccaccuguacaacgugacccggacguucuacguccccgccgccuacaagcugaccaagcucagcgugaagugcuacuucaacuacuccugcguguucagcgucgugaacgccaccgugaccgucaacgugacgacccacaacggccgcguggucaacuacaccgugugcgacgacugcaacggguacaccgacaacaucuucuccgugcagcaggacggccggaucccgaacggguuccccuucaacaacugguuccugcugacgaacggcagcacccucgucgacggcgugagccgccuguaccagccccugcggcugaccugccuguggcccgugccggggcugaaguccagcaccggcuucgucuacuucaacgccacgggguccgacgugaacugcaacggcuaccagcacaacagcgucguggacgugaugcgcuacaaccucaacuucuccgccaacagccuggacaaccugaaguccggcgucaucguguucaagacccuccaguacgacgugcuguucuacugcagcaacuccagcuccgggguccuggacaccaccauccccuucggccccagcucccagcccuacuacugcuucaucaacagcacgaucaacaccacccacguguccaccuucguggggauccucccgcccacgguccgggagaucgugguggcccgcaccggccaguucuacaucaacggguucaaguacuucgaccugggcuucaucgaggcggucaacuucaacgugaccaccgccagcgccacggacuucuggaccguggccuucgccaccuucgucgacgugcuggugaacgucuccgcgaccaacauccagaaccuccuguacugcgacagccccuucgagaagcugcagugcgagcaccuccaguucggccugcaggacggguucuacuccgccaacuuccuggacgacaacgugcuccccgagaccuacguggcccugccgaucuacuaccagcacacggacaucaacuucaccgccaccgccagcuucggcgggagcugcuacgucugcaagccccaccaggugaacaucucccugaacggcaacaccagcgugugcguccggacgucccacuucagcauccgcuacaucuacaaccgggugaaguccgggagccccggcgacuccagcuggcacaucuaccugaaguccgggaccugccccuucagcuucuccaagcucaacaacuuccagaaguucaagaccaucugcuucagcaccguggaggucccgggguccugcaacuucccccuggaggcgacguggcacuacaccagcuacaccaucgugggcgcccuguacgugaccugguccgaggggaacagcaucacgggcguccccuaccccguguccgggauccgcgaguucagcaaccucgugcugaacaacugcaccaaguacaacaucuacgacuacgucggcaccggcaucauccggagcuccaaccagagccuggccgggggcaucaccuacguguccaacagcgggaaccuccugggcuucaagaacguguccacgggcaacaucuucaucgucaccccgugcaaccagcccgaccagguggccguguaccagcagagcaucaucggggccaugaccgcggucaacgagucccgcuacggccugcagaaccuccugcagcugcccaacuucuacuacgugagcaacgggggcaacaacugcaccacggccgugaugaccuacuccaacuucgggaucugcgccgacggcagccucauccccguccggccgcgcaacuccagcgacaacggcaucuccgccaucaucaccgcgaaccugagcauccccuccaacuggaccacgagcguccagguggaguaccugcagaucaccuccacccccaucgugguggacugcgccaccuacgugugcaacgggaacccgcggugcaagaaccuccugaagcaguacacgagcgccugcaagaccaucgaggacgcccugcgccucuccgcccaccuggagaccaacgacgucagcagcaugcugaccuucgacuccaacgcguucagccucgccaacgugacguccuucggcgacuacaaccugagcuccgugcugccccagcggaacauccgcagcucccgcaucgccgggcggagcgcccucgaggaccugcuguucuccaaggucgugaccagcggccucgggaccgucgacguggacuacaaguccugcaccaagggccugagcaucgccgaccuggcgugcgcccaguacuacaacggcaucauggugcuccccggggucgccgacgccgagcgcauggccauguacacgggcucccugaucgggggcauggugcugggcggccucaccagcgcggccgccauccccuucucccuggcccugcaggcgcggcucaacuacguggcccugcagaccgacguccugcaggagaaccagaagauccucgccgccagcuucaacaaggccaucaacaacaucguggcguccuucagcuccgugaacgacgccaucacccagaccgccgaggccauccacacggucaccaucgcccugaacaagauccaggacguggugaaccagcagggcagcgcgcugaaccaccucaccagccagcugcgccacaacuuccaggccaucuccaacagcauccaggccaucuacgaccggcuggacccgccccaggccgaccagcaggucgaccgccucaucaccgggcggcuggccgcgcugaacgccuucgugucccaggugcucaacaaguacacggagguccgcggcagccggcgccuggcccagcagaagaucaacgagugcgugaagucccagagcaaccgguacggguucugcggcaacgggacccacaucuucuccaucgugaacagcgcccccgacggccuccuguuccugcacaccguccugcuccccaccgacuacaagaacgugaaggcgugguccggcaucugcguggacgggaucuacggcuacguccugcgccagccgaaccuggugcucuacagcgacaacgggguguuccgggucacgucccgcaucauguuccagccccggcugcccgugcugagcgacuucgugcagaucuacaacugcaacgucaccuucgugaacaucucccgcguggagcuccacaccgucauccccgacuacguggacgugaacaagacccugcaggaguucgcccagaaccugccgaaguacgucaagcccaacuucgaccucacgcccuucaaccugaccuaccugaaccucagcuccgagcugaagcagcuggaggccaagaccgccagccucuuccagaccacgguggagcugcagggccugaucgaccagaucaacuccaccuacguggaccucaagcugcugaaccgguucgagaacggcggguacauccccgaggccccgcgcgacggccaggcguacguccggaaggacggggagugggugcuccugagcaccuucuga

SEQ ID NO: 14976 - RNA, 3771 nt, Artificial Sequence
  Bat SARS-like CoV/WIV1__AGZ48828.1 spike protein CDS gc (1-1256)
augaagcugcucgugcuggucuucgccacccuggugagcuccuacaccaucgagaagugccucgacuucgacgaccgcacgcccccggccaacacccaguuccugagcucccaccggggcguguacuaccccgacgacaucuuccgcagcaacguccugcaccucgugcaggaccacuuccugcccuucgacuccaacgugacccgguucaucaccuucgggcugaacuucgacaaccccaucaucccguucaaggacggcaucuacuucgcggccacggagaaguccaacgucauccgcggguggguguucggcagcaccaugaacaacaagagccaguccgugaucaucaugaacaacagcaccaaccucgucauccgggccugcaacuucgagcugugcgacaaccccuucuucguggugcugaaguccaacaacacccagauccccagcuacaucuucaacaacgccuucaacugcacguucgaguacgucuccaaggacuucaaccucgaccugggggagaagcccggcaacuucaaggaccugcgcgaguucguguuccggaacaaggacggcuuccuccacguguacagcggguaccagccgaucuccgccgcgagcggccugcccaccggguucaacgcccugaagcccaucuucaagcucccccugggcaucaacaucaccaacuuccgcacccugcucacggccuucccgccccggcccgacuacugggggaccuccgccgcggccuacuucgucggcuaccugaagcccaccaccuucaugcugaaguacgacgagaacggcacgaucaccgacgccguggacugcagccagaacccgcucgccgagcugaagugcuccgucaagagcuucgagaucgacaaggggaucuaccagaccagcaacuuccgcguggcccccuccaaggagguggugcgguuccccaacaucaccaaccugugccccuucggcgaggucuucaacgcgacgaccuucccgagcguguacgccugggagcgcaagcggaucuccaacugcguggccgacuacagcguccucuacaacuccaccagcuucuccaccuucaagugcuacggggugagcgccacgaagcugaacgaccugugcuucuccaacgucuacgccgacagcuucguggugaagggcgacgacguccgccagaucgcgcccggccagaccggggugaucgccgacuacaacuacaagcuccccgacgacuucaccggcugcgugcuggccuggaacacccggaacaucgacgccacgcagaccgggaacuacaacuacaaguaccgcucccugcggcacggcaagcuccgccccuucgagcgggacaucagcaacgucccguucucccccgacgggaagcccugcacgcccccggccuucaacugcuacuggccccugaacgacuacggcuucuacaucaccaacggcaucggguaccagcccuaccgcguggugguccugagcuucgagcuccugaacgcgccggccaccgugugcggccccaagcuguccaccgaccucaucaagaaccagugcgugaacuucaacuucaacgggcugaccggcaccgggguccugacgcccagcuccaagcgguuccagcccuuccagcaguucggccgcgacgugagcgacuucaccgacuccgugcgcgacccgaagaccagcgagauccucgacaucagccccugcuccuucggcggggucagcgugaucacccccggcaccaacacguccagcgagguggccguccuguaccaggacgugaacugcaccgacgugcccgucgccauccacgccgaccagcugaccccguccuggcgggugcacagcaccgggaacaacguguuccagacgcaggcgggcugccucaucggggccgagcacgucgacaccuccuacgagugcgacauccccaucggcgccggcaucugcgccagcuaccacaccguguccagccugcgcuccaccagccagaaguccaucguggcguacacgaugagccugggggccgacuccagcaucgccuacuccaacaacaccaucgccauccccaccaacuucagcaucagcaucaccacggaggucaugcccguguccauggccaagaccagcguggacugcaacauguacaucugcggcgacuccaccgagugcgcgaaccugcuccugcaguacgggagcuucugcacccagcugaaccgggcccucuccggcaucgccgucgagcaggaccgcaacacgcgggagguguucgcccaggugaagcagauguacaagaccccgacccugaaggacuucggcggguucaacuucagccagauccugcccgacccccucaagcccaccaagcgcuccuucaucgaggaccugcuguucaacaaggucacgcucgccgacgcgggcuucaugaagcaguacggggagugccugggcgacaucaacgcccgggaccugaucugcgcccagaaguucaacgggcucaccgugcugccgccccugcucaccgacgacaugaucgccgccuacaccgcggcccuggugagcggcacggccaccgccggcuggaccuucggggcgggcgccgcccugcagauccccuucgccaugcagauggccuaccgcuucaacgggaucggcgucacccagaacgugcucuacgagaaccagaagcagaucgcgaaccaguucaacaaggccaucucccagauccaggagagccugacgaccaccuccaccgcccuggggaagcuccaggacguggucaaccagaacgcccaggcccugaacacgcuggugaagcagcucagcuccaacuucggcgcgaucagcuccgugcugaacgacauccugagccggcucgacaaggucgaggccgaggugcagaucgaccgccugaucaccggccggcugcagucccuccagaccuacgugacccagcagcugauccgcgccgccgagauccgggccagcgcgaaccuggccgccacgaagauguccgagugcguccucgggcagagcaagcgcguggacuucugcggcaagggguaccaccugaugagcuucccccaggccgcgccgcacggcguggucuuccugcacgugaccuacgugcccucccaggagcggaacuucaccaccgcccccgccaucugccacgaggggaaggccuacuucccccgcgagggcgucuucguguucaacggcaccagcugguucaucacgcagcggaacuucuucuccccgcagaucaucaccaccgacaacaccuucgucagcggguccugcgacguggugaucggcaucaucaacaacacggucuacgacccccuccagcccgagcuggacagcuucaaggaggagcuggacaaguacuucaagaaccacaccuccccggacguggaccucggggacaucagcggcaucaacgccuccguggucaacauccagaaggagaucgaccgccugaacgagguggcgaagaaccugaacgagagccucaucgaccugcaggagcuggggaaguacgagcaguacaucaaguggcccugguacguguggcucggcuucaucgccggccugaucgccaucgucauggugaccauccugcucugcugcaugaccuccugcugcagcugccugaagggggccugcuccugcggcagcugcugcaaguucgacgaggacgacuccgagcccgugcugaagggggucaagcuccacuacacguga

SEQ ID NO: 14977 - RNA, 3771 nt, Artificial Sequence
  Bat SARS-like CoV/WIV1__AGZ48828.1 spike protein CDS gc (1-1256)(K969P_V970P)
augaagcugcucgugcuggucuucgccacccuggugagcuccuacaccaucgagaagugccucgacuucgacgaccgcacgcccccggccaacacccaguuccugagcucccaccggggcguguacuaccccgacgacaucuuccgcagcaacguccugcaccucgugcaggaccacuuccugcccuucgacuccaacgugacccgguucaucaccuucgggcugaacuucgacaaccccaucaucccguucaaggacggcaucuacuucgcggccacggagaaguccaacgucauccgcggguggguguucggcuccaccaugaacaacaagagccaguccgugaucaucaugaacaacagcaccaaccucgucauccgggccugcaacuucgagcugugcgacaaccccuucuucguggugcugaaguccaacaacacccagauccccagcuacaucuucaacaacgccuucaacugcacguucgaguacgucuccaaggacuucaaccucgaccugggggagaagcccggcaacuucaaggaccugcgcgaguucguguuccggaacaaggacggcuuccuccacguguacagcggguaccagccgaucuccgccgcgagcggccugcccaccggguucaacgcccugaagcccaucuucaagcucccccugggcaucaacaucaccaacuuccgcacccugcucacggccuucccgccccggcccgacuacugggggaccuccgccgcggccuacuucgucggcuaccugaagcccaccaccuucaugcugaaguacgacgagaacggcacgaucaccgacgccguggacugcagccagaacccgcucgccgagcugaagugcuccgucaagagcuucgagaucgacaaggggaucuaccagaccagcaacuuccgcguggcccccuccaaggagguggugcgguuccccaacaucaccaaccugugccccuucggcgaggucuucaacgcgacgaccuucccgagcguguacgccugggagcgcaagcggaucuccaacugcguggccgacuacagcguccucuacaacuccaccagcuucuccaccuucaagugcuacggggugagcgccacgaagcugaacgaccugugcuucuccaacgucuacgccgacagcuucguggugaagggcgacgacguccgccagaucgcgcccggccagaccggggugaucgccgacuacaacuacaagcuccccgacgacuucaccggcugcgugcuggccuggaacacccggaacaucgacgccacgcagaccgggaacuacaacuacaaguaccgcucccugcggcacggcaagcuccgccccuucgagcgggacaucagcaacgucccguucucccccgacgggaagcccugcacgcccccggccuucaacugcuacuggccccugaacgacuacggcuucuacaucaccaacggcaucggguaccagcccuaccgcguggugguccugagcuucgagcuccugaacgcgccggccaccgugugcggccccaagcuguccaccgaccucaucaagaaccagugcgugaacuucaacuucaacgggcugaccggcaccgggguccugacgcccagcuccaagcgguuccagcccuuccagcaguucggccgcgacgugagcgacuucaccgacuccgugcgcgacccgaagaccagcgagauccucgacaucagccccugcuccuucggcggggucagcgugaucacccccggcaccaacacguccagcgagguggccguccuguaccaggacgugaacugcaccgacgugcccgucgccauccacgccgaccagcugaccccguccuggcgggugcacagcaccgggaacaacguguuccagacgcaggcgggcugccucaucggggccgagcacgucgacaccuccuacgagugcgacauccccaucggcgccggcaucugcgccagcuaccacaccguguccagccugcgcuccaccagccagaaguccaucguggcguacacgaugagccugggggccgacuccagcaucgccuacuccaacaacaccaucgccauccccaccaacuucagcaucagcaucaccacggaggucaugcccguguccauggccaagaccagcguggacugcaacauguacaucugcggcgacuccaccgagugcgcgaaccugcuccugcaguacgggagcuucugcacccagcugaaccgggcccucuccggcaucgccgucgagcaggaccgcaacacgcgggagguguucgcccaggugaagcagauguacaagaccccgacccugaaggacuucggcggguucaacuucagccagauccugcccgacccccucaagcccaccaagcgcuccuucaucgaggaccugcuguucaacaaggucacgcucgccgacgcgggcuucaugaagcaguacggggagugccugggcgacaucaacgcccgggaccugaucugcgcccagaaguucaacgggcucaccgugcugccgccccugcucaccgacgacaugaucgccgccuacaccgcggcccuggugagcggcacggccaccgccggcuggaccuucggggcgggcgccgcccugcagauccccuucgccaugcagauggccuaccgcuucaacgggaucggcgucacccagaacgugcucuacgagaaccagaagcagaucgcgaaccaguucaacaaggccaucucccagauccaggagagccugacgaccaccuccaccgcccuggggaagcuccaggacguggucaaccagaacgcccaggcccugaacacgcuggugaagcagcucagcuccaacuucggcgcgaucagcuccgugcugaacgacauccugagccggcucgacccgcccgaggccgagguccagaucgaccgccugaucaccggccggcugcagucccuccagaccuacgugacccagcagcugauccgcgccgccgagauccgggccagcgcgaaccuggccgccacgaagauguccgagugcgugcucgggcagagcaagcgcgucgacuucugcggcaagggguaccaccugaugagcuucccccaggccgcgccccacggcgugguguuccugcacgucaccuacgugcccucccaggagcggaacuucaccaccgccccggccaucugccacgaggggaaggccuacuucccccgcgagggcguguucgucuucaacggcaccagcugguucaucacgcagcggaacuucuucagcccccagaucaucaccaccgacaacaccuucgugagcggguccugcgacgucgugaucggcaucaucaacaacacgguguacgacccgcuccagcccgagcuggacagcuucaaggaggagcuggacaaguacuucaagaaccacaccucccccgacgucgaccucggggacaucagcggcaucaacgccuccguggugaacauccagaaggagaucgaccgccugaacgaggucgcgaagaaccugaacgagagccucaucgaccugcaggagcuggggaaguacgagcaguacaucaaguggcccugguacguguggcucggcuucaucgccggccugaucgccaucgugauggucaccauccugcucugcugcaugaccuccugcugcagcugccugaagggggccugcuccugcggcagcugcugcaaguucgacgaggacgacuccgagccggugcugaagggggugaagcuccacuacacguga

SEQ ID NO: 14978 - RNA, 3576 nt, Artificial Sequence
  Bat SARS-like CoV/WIV1__AGZ48828.1 spike protein CDS gc (variant)
augaagcugcucgugcuggucuucgccacccuggugagcuccuacaccaucgagaagugccucgacuucgacgaccgcacgcccccggccaacacccaguuccugagcucccaccggggcguguacuaccccgacgacaucuuccgcagcaacguccugcaccucgugcaggaccacuuccugcccuucgacuccaacgugacccgguucaucaccuucgggcugaacuucgacaaccccaucaucccguucaaggacggcaucuacuucgcggccacggagaaguccaacgucauccgcggguggguguucggcuccaccaugaacaacaagagccaguccgugaucaucaugaacaacagcaccaaccucgucauccgggccugcaacuucgagcugugcgacaaccccuucuucguggugcugaaguccaacaacacccagauccccagcuacaucuucaacaacgccuucaacugcacguucgaguacgucuccaaggacuucaaccucgaccugggggagaagcccggcaacuucaaggaccugcgcgaguucguguuccggaacaaggacggcuuccuccacguguacagcggguaccagccgaucuccgccgcgagcggccugcccaccggguucaacgcccugaagcccaucuucaagcucccccugggcaucaacaucaccaacuuccgcacccugcucacggccuucccgccccggcccgacuacugggggaccuccgccgcggccuacuucgucggcuaccugaagcccaccaccuucaugcugaaguacgacgagaacggcacgaucaccgacgccguggacugcagccagaacccgcucgccgagcugaagugcuccgucaagagcuucgagaucgacaaggggaucuaccagaccagcaacuuccgcguggcccccuccaaggagguggugcgguuccccaacaucaccaaccugugccccuucggcgaggucuucaacgcgacgaccuucccgagcguguacgccugggagcgcaagcggaucuccaacugcguggccgacuacagcguccucuacaacuccaccagcuucuccaccuucaagugcuacggggugagcgccacgaagcugaacgaccugugcuucuccaacgucuacgccgacagcuucguggugaagggcgacgacguccgccagaucgcgcccggccagaccggggugaucgccgacuacaacuacaagcuccccgacgacuucaccggcugcgugcuggccuggaacacccggaacaucgacgccacgcagaccgggaacuacaacuacaaguaccgcucccugcggcacggcaagcuccgccccuucgagcgggacaucagcaacgucccguucucccccgacgggaagcccugcacgcccccggccuucaacugcuacuggccccugaacgacuacggcuucuacaucaccaacggcaucggguaccagcccuaccgcguggugguccugagcuucgagcuccugaacgcgccggccaccgugugcggccccaagcuguccaccgaccucaucaagaaccagugcgugaacuucaacuucaacgggcugaccggcaccgggguccugacgcccagcuccaagcgguuccagcccuuccagcaguucggccgcgacgugagcgacuucaccgacuccgugcgcgacccgaagaccagcgagauccucgacaucagccccugcuccuucggcggggucagcgugaucacccccggcaccaacacguccagcgagguggccguccuguaccaggacgugaacugcaccgacgugcccgucgccauccacgccgaccagcugaccccguccuggcgggugcacagcaccgggaacaacguguuccagacgcaggcgggcugccucaucggggccgagcacgucgacaccuccuacgagugcgacauccccaucggcgccggcaucugcgccagcuaccacaccguguccagccugcgcuccaccagccagaaguccaucguggcguacacgaugagccugggggccgacuccagcaucgccuacuccaacaacaccaucgccauccccaccaacuucagcaucagcaucaccacggaggucaugcccguguccauggccaagaccagcguggacugcaacauguacaucugcggcgacuccaccgagugcgcgaaccugcuccugcaguacgggagcuucugcacccagcugaaccgggcccucuccggcaucgccgucgagcaggaccgcaacacgcgggagguguucgcccaggugaagcagauguacaagaccccgacccugaaggacuucggcggguucaacuucagccagauccugcccgacccccucaagcccaccaagcgcuccuucaucgaggaccugcuguucaacaaggucacgcucgccgacgcgggcuucaugaagcaguacggggagugccugggcgacaucaacgcccgggaccugaucugcgcccagaaguucaacgggcucaccgugcugccgccccugcucaccgacgacaugaucgccgccuacaccgcggcccuggugagcggcacggccaccgccggcuggaccuucggggcgggcgccgcccugcagauccccuucgccaugcagauggccuaccgcuucaacgggaucggcgucacccagaacgugcucuacgagaaccagaagcagaucgcgaaccaguucaacaaggccaucucccagauccaggagagccugacgaccaccuccaccgcccuggggaagcuccaggacguggucaaccagaacgcccaggcccugaacacgcuggugaagcagcucagcuccaacuucggcgcgaucagcuccgugcugaacgacauccugagccggcucgacccgcccgaggccgagguccagaucgaccgccugaucaccggccggcugcagucccuccagaccuacgugacccagcagcugauccgcgccgccgagauccgggccagcgcgaaccuggccgccacgaagauguccgagugcgugcucgggcagagcaagcgcgucgacuucugcggcaagggguaccaccugaugagcuucccccaggccgcgccccacggcgugguguuccugcacgucaccuacgugcccucccaggagcggaacuucaccaccgccccggccaucugccacgaggggaaggccuacuucccccgcgagggcguguucgucuucaacggcaccagcugguucaucacgcagcggaacuucuucagcccccagaucaucaccaccgacaacaccuucgugagcggguccugcgacgucgugaucggcaucaucaacaacacgguguacgacccgcuccagcccgagcuggacagcuucaaggaggagcuggacaaguacuucaagaaccacaccucccccgacgucgaccucggggacaucagcggcaucaacgccuccguggugaacauccagaaggagaucgaccgccugaacgaggucgcgaagaaccugaacgagagccucaucgaccugcaggagcuggggaaguacgagcaguga

SEQ ID NO: 14979 - RNA, 3657 nt, Artificial Sequence
  Bat SARS-like CoV/WIV1__AGZ48828.1 spike protein CDS gc (variant)
augaagcugcucgugcuggucuucgccacccuggugagcuccuacaccaucgagaagugccucgacuucgacgaccgcacgcccccggccaacacccaguuccugagcucccaccggggcguguacuaccccgacgacaucuuccgcagcaacguccugcaccucgugcaggaccacuuccugcccuucgacuccaacgugacccgguucaucaccuucgggcugaacuucgacaaccccaucaucccguucaaggacggcaucuacuucgcggccacggagaaguccaacgucauccgcggguggguguucggcuccaccaugaacaacaagagccaguccgugaucaucaugaacaacagcaccaaccucgucauccgggccugcaacuucgagcugugcgacaaccccuucuucguggugcugaaguccaacaacacccagauccccagcuacaucuucaacaacgccuucaacugcacguucgaguacgucuccaaggacuucaaccucgaccugggggagaagcccggcaacuucaaggaccugcgcgaguucguguuccggaacaaggacggcuuccuccacguguacagcggguaccagccgaucuccgccgcgagcggccugcccaccggguucaacgcccugaagcccaucuucaagcucccccugggcaucaacaucaccaacuuccgcacccugcucacggccuucccgccccggcccgacuacugggggaccuccgccgcggccuacuucgucggcuaccugaagcccaccaccuucaugcugaaguacgacgagaacggcacgaucaccgacgccguggacugcagccagaacccgcucgccgagcugaagugcuccgucaagagcuucgagaucgacaaggggaucuaccagaccagcaacuuccgcguggcccccuccaaggagguggugcgguuccccaacaucaccaaccugugccccuucggcgaggucuucaacgcgacgaccuucccgagcguguacgccugggagcgcaagcggaucuccaacugcguggccgacuacagcguccucuacaacuccaccagcuucuccaccuucaagugcuacggggugagcgccacgaagcugaacgaccugugcuucuccaacgucuacgccgacagcuucguggugaagggcgacgacguccgccagaucgcgcccggccagaccggggugaucgccgacuacaacuacaagcuccccgacgacuucaccggcugcgugcuggccuggaacacccggaacaucgacgccacgcagaccgggaacuacaacuacaaguaccgcucccugcggcacggcaagcuccgccccuucgagcgggacaucagcaacgucccguucucccccgacgggaagcccugcacgcccccggccuucaacugcuacuggccccugaacgacuacggcuucuacaucaccaacggcaucggguaccagcccuaccgcguggugguccugagcuucgagcuccugaacgcgccggccaccgugugcggccccaagcuguccaccgaccucaucaagaaccagugcgugaacuucaacuucaacgggcugaccggcaccgggguccugacgcccagcuccaagcgguuccagcccuuccagcaguucggccgcgacgugagcgacuucaccgacuccgugcgcgacccgaagaccagcgagauccucgacaucagccccugcuccuucggcggggucagcgugaucacccccggcaccaacacguccagcgagguggccguccuguaccaggacgugaacugcaccgacgugcccgucgccauccacgccgaccagcugaccccguccuggcgggugcacagcaccgggaacaacguguuccagacgcaggcgggcugccucaucggggccgagcacgucgacaccuccuacgagugcgacauccccaucggcgccggcaucugcgccagcuaccacaccguguccagccugcgcuccaccagccagaaguccaucguggcguacacgaugagccugggggccgacuccagcaucgccuacuccaacaacaccaucgccauccccaccaacuucagcaucagcaucaccacggaggucaugcccguguccauggccaagaccagcguggacugcaacauguacaucugcggcgacuccaccgagugcgcgaaccugcuccugcaguacgggagcuucugcacccagcugaaccgggcccucuccggcaucgccgucgagcaggaccgcaacacgcgggagguguucgcccaggugaagcagauguacaagaccccgacccugaaggacuucggcggguucaacuucagccagauccugcccgacccccucaagcccaccaagcgcuccuucaucgaggaccugcuguucaacaaggucacgcucgccgacgcgggcuucaugaagcaguacggggagugccugggcgacaucaacgcccgggaccugaucugcgcccagaaguucaacgggcucaccgugcugccgccccugcucaccgacgacaugaucgccgccuacaccgcggcccuggugagcggcacggccaccgccggcuggaccuucggggcgggcgccgcccugcagauccccuucgccaugcagauggccuaccgcuucaacgggaucggcgucacccagaacgugcucuacgagaaccagaagcagaucgcgaaccaguucaacaaggccaucucccagauccaggagagccugacgaccaccuccaccgcccuggggaagcuccaggacguggucaaccagaacgcccaggcccugaacacgcuggugaagcagcucagcuccaacuucggcgcgaucagcuccgugcugaacgacauccugagccggcucgacccgcccgaggccgagguccagaucgaccgccugaucaccggccggcugcagucccuccagaccuacgugacccagcagcugauccgcgccgccgagauccgggccagcgcgaaccuggccgccacgaagauguccgagugcgugcucgggcagagcaagcgcgucgacuucugcggcaagggguaccaccugaugagcuucccccaggccgcgccccacggcgugguguuccugcacgucaccuacgugcccucccaggagcggaacuucaccaccgccccggccaucugccacgaggggaaggccuacuucccccgcgagggcguguucgucuucaacggcaccagcugguucaucacgcagcggaacuucuucagcccccagaucaucaccaccgacaacaccuucgugagcggguccugcgacgucgugaucggcaucaucaacaacacgguguacgacccgcuccagcccgagcuggacagcuucaaggaggagcuggacaaguacuucaagaaccacaccucccccgacgucgaccucggggacaucagcggcaucaacgccuccguggugaacauccagaaggagaucgaccgccugaacgaggucgcgaagaaccugaacgagagccucaucgaccugcaggagcuggggaaguacgagcagggcggcuacauccccgaggccccgcgggacgggcaggccuacgugcgcaaggacggcgagugggugcuccuguccaccuucuga

SEQ ID NO: 14980 - RNA, 3825 nt, Artificial Sequence
  BatCoV/HKU9-1 BF_005I__YP_001039971.1 spike protein CDS gc (1-1274)
augcugcucauccuggugcugggcgucagccucgccgccgcgucccgccccgagugcuucaacccgcgguucacccugacgccccugaaccacacccucaacuacaccagcaucaaggccaagguguccaacgugcugcugcccgaccccuacaucgccuacagcgggcagacccuccgccagaaccuguucauggccgacauguccaacaccauccuguacccggucacgccgcccgccaacggcgcgaacgggggcuucaucuacaacaccagcaucauccccguguccgccggccucuucgugaacaccuggauguaccggcagcccgccagcucccgcgccuacugccaggagcccuucggggucgcguucggcgacaccuucgagaacgaccggaucgccauccugaucauggcccccgacaaccuggggagcugguccgccguggcgccccgcaaccagacgaacaucuaccuccuggugugcagcaacgccacccugugcaucaacccgggcuucaaccggugggggcccgccggcuccuucaucgcccccgacgcccucgucgaccacagcaacuccugcuucgugaacaacaccuucagcgugaacaucuccaccagccgcaucucccuggccuuccuguucaaggacggggaccuccugaucuaccacagcggcuggcugcccacgagcaacuucgagcacggcuucucccgggggagccacccgaugaccuacuucaugucccuccccgucggcgggaaccugccccgcgcgcaguucuuccagagcaucgugcgguccaacgccaucgacaagggcgacggcaugugcaccaacuucgacgugaaccugcacgucgcccaccucaucaaccgcgaccugcuggugagcuacuucaacaacggguccguggccaacgccgcggacugcgccgacagcgccgccgaggagcucuacugcgucaccggcuccuucgacccgcccacggggguguacccccugagccgguaccgcgcccagguggcgggcuucguccgggugacccagcgcggguccuacugcaccccgcccuacagcgugcugcaggacccgccccagcccgucguguggcggcgcuacaugcucuacgacugcgucuucgacuucaccgugguggucgacucccugcccacgcaccagcugcagugcuacggcgugagcccccggcgccucgccuccaugugcuacggcagcgugacccuggacgucaugcggaucaacgagacccaccugaacaaccucuucaaccgcgugcccgacaccuucucccuguacaacuacgcccugcccgacaacuucuacgggugccuccacgccuucuaccugaacagcacggcgccguacgccguggccaaccgcuuccccaucaagcccggcgggcggcaguccaacagcgccuucaucgacaccgucaucaacgccgcgcacuacagccccuucuccuacguguacggccuggccgugaucacccucaagccggccgccgggagcaagcuggucugccccguggccaacgacaccguggucaucacggaccgcugcgugcaguacaaccuguacggcuacaccggcaccggggugcuguccaagaacaccagccucgucauccccgacggcaagguguucacggcguccagcaccgggaccaucaucggcguguccaucaacagcaccacguacuccaucaugcccugcgucaccgugccggugagcgucggguaccaccccaacuucgagcgggcccugcuguucaacggccucuccugcagccagcgcucccgggccgugaccgagcccgugagcguccugugguccgccagcgccaccgcgcaggacgccuucgacacccccuccggcugcguggugaacgucgagcugcgcaacacgaccaucgugaacacgugcgccaugccgaucgggaacagccucugcuucaucaacggcagcaucgccaccgcgaacgccgacucccugccccggcugcagcucgugaacuacgacccccuguacgacaacagcaccgccacccccaugaccccggucuacugggugaaggugcccaccaacuucacgcuguccgccaccgaggaguacauccagaccaccgcccccaagaucacgaucgacugcgcgcgcuaccucugcggggacagcucccggugccugaacguccugcuccacuacggcaccuucugcaacgacaucaacaaggcccugagccgcguguccaccauccuggacagcgcccuccugucccuggugaaggagcucagcaucaacacccgggacgaggucacgaccuucuccuucgacggcgacuacaacuucaccgggcugaugggcugccuggggcccaacugcggcgccaccacguaccgcagcgccuucuccgaccuccuguacgacaaggugcggaucaccgacccgggguucaugcagagcuaccagaagugcaucgacucccaguggggcggcagcauccgcgaccugcucugcacccagaccuacaacgggaucgcggugcugccgcccaucgucucccccgccaugcaggcccuguacacgagccuccuggugggcgccguggccuccagcggguacaccuucggcaucaccagcgcgggggucauccccuucgccacccagcugcaguuccggcucaacggcaucggcgugacgacccaggugcuggucgagaaccagaagcugaucgccuccagcuucaacaacgcccucgugaacauccagaagggguucaccgagaccuccaucgcgcugagcaagaugcaggacgugaucaaccagcacgccgcccagcugcacacgcucgucgugcagcugggcaacuccuucggggccaucagcuccagcaucaacgagaucuucucccgccuggagggccucgccgcgaacgccgaggucgaccggcugaucaacgggcgcaugauggugcugaacaccuacgugacccagcuccugauccaggccagcgaggccaaggcccagaacgcgcuggccgcccagaagaucuccgagugcgucaaggcccagagccuccggaacgacuucugcggcaacggcacccacgugcuguccaucccccagcuggcccccaacgggguccucuucauccacuacgcguacacgccgaccgaguacgccuucgugcagaccagcgccggccugugccacaacgggaccggcuacgcgccccgccaggggauguucgugcugcccaacaacaccaacauguggcacuucacgaccaugcaguucuacaaccccgugaacaucuccgccagcaacacccagguccucaccuccugcagcgugaacuacacguccgugaacuacaccguccuggagccgagcgugcccggcgacuacgacuuccagaaggaguucgacaaguucuacaagaaccugagcaccaucuucaacaacaccuucaaccccaacgacuucaacuucuccacgguggacgucaccgcccagaucaagagccuccacgacguggugaaccagcugaaccaguccuucaucgaccugaagaagcucaacgucuacgagaagaccaucaaguggcccugguacguguggcuggccaugaucgccggcaucguggggcugguccucgccgugaucaugcugaugugcaugaccaacugcugcagcugcuucaagggcaugugcgacugccgccggugcugcggguccuacgacagcuacgacgacguguacccggcgguccgcgugaacaagaagcggacgguguga

SEQ ID NO: 14981 - RNA, 3825 nt, Artificial Sequence
  BatCoV/HKU9-1 BF_005I__YP_001039971.1 spike protein CDS gc (1-1274)(G983P_L984P)
augcugcucauccuggugcugggcgucagccucgccgccgcgucccgccccgagugcuucaacccgcgguucacccugacgccccugaaccacacccucaacuacaccagcaucaaggccaagguguccaacgugcugcugcccgaccccuacaucgccuacagcgggcagacccuccgccagaaccuguucauggccgacauguccaacaccauccuguacccggucacgccgcccgccaacggcgcgaacgggggcuucaucuacaacaccagcaucauccccguguccgccggccucuucgugaacaccuggauguaccggcagcccgccagcucccgcgccuacugccaggagcccuucggggucgcguucggcgacaccuucgagaacgaccggaucgccauccugaucauggcccccgacaaccuggggagcugguccgccguggcgccccgcaaccagacgaacaucuaccuccuggugugcagcaacgccacccugugcaucaacccgggcuucaaccggugggggcccgccggcuccuucaucgcccccgacgcccucgucgaccacagcaacuccugcuucgugaacaacaccuucagcgugaacaucuccaccagccgcaucucccuggccuuccuguucaaggacggggaccuccugaucuaccacagcggcuggcugcccacgagcaacuucgagcacggcuucucccgggggagccacccgaugaccuacuucaugucccuccccgucggcgggaaccugccccgcgcgcaguucuuccagagcaucgugcgguccaacgccaucgacaagggcgacggcaugugcaccaacuucgacgugaaccugcacgucgcccaccucaucaaccgcgaccugcuggugagcuacuucaacaacggguccguggccaacgccgcggacugcgccgacagcgccgccgaggagcucuacugcgucaccggcuccuucgacccgcccacggggguguacccccugagccgguaccgcgcccagguggcgggcuucguccgggugacccagcgcggguccuacugcaccccgcccuacagcgugcugcaggacccgccccagcccgucguguggcggcgcuacaugcucuacgacugcgucuucgacuucaccgugguggucgacucccugcccacgcaccagcugcagugcuacggcgugagcccccggcgccucgccuccaugugcuacggcagcgugacccuggacgucaugcggaucaacgagacccaccugaacaaccucuucaaccgcgugcccgacaccuucucccuguacaacuacgcccugcccgacaacuucuacgggugccuccacgccuucuaccugaacagcacggcgccguacgccguggccaaccgcuuccccaucaagcccggcgggcggcaguccaacagcgccuucaucgacaccgucaucaacgccgcgcacuacagccccuucuccuacguguacggccuggccgugaucacccucaagccggccgccgggagcaagcuggucugccccguggccaacgacaccguggucaucacggaccgcugcgugcaguacaaccuguacggcuacaccggcaccggggugcuguccaagaacaccagccucgucauccccgacggcaagguguucacggcguccagcaccgggaccaucaucggcguguccaucaacagcaccacguacuccaucaugcccugcgucaccgugccggugagcgucggguaccaccccaacuucgagcgggcccugcuguucaacggccucuccugcagccagcgcucccgggccgugaccgagcccgugagcguccugugguccgccagcgccaccgcgcaggacgccuucgacacccccuccggcugcguggugaacgucgagcugcgcaacacgaccaucgugaacacgugcgccaugccgaucgggaacagccucugcuucaucaacggcagcaucgccaccgcgaacgccgacucccugccccggcugcagcucgugaacuacgacccccuguacgacaacagcaccgccacccccaugaccccggucuacugggugaaggugcccaccaacuucacgcuguccgccaccgaggaguacauccagaccaccgcccccaagaucacgaucgacugcgcgcgcuaccucugcggggacagcucccggugccugaacguccugcuccacuacggcaccuucugcaacgacaucaacaaggcccugagccgcguguccaccauccuggacagcgcccuccugucccuggugaaggagcucagcaucaacacccgggacgaggucacgaccuucuccuucgacggcgacuacaacuucaccgggcugaugggcugccuggggcccaacugcggcgccaccacguaccgcagcgccuucuccgaccuccuguacgacaaggugcggaucaccgacccgggguucaugcagagcuaccagaagugcaucgacucccaguggggcggcagcauccgcgaccugcucugcacccagaccuacaacgggaucgcggugcugccgcccaucgucucccccgccaugcaggcccuguacacgagccuccuggugggcgccguggccuccagcggguacaccuucggcaucaccagcgcgggggucauccccuucgccacccagcugcaguuccggcucaacggcaucggcgugacgacccaggugcuggucgagaaccagaagcugaucgccuccagcuucaacaacgcccucgugaacauccagaagggguucaccgagaccuccaucgcgcugagcaagaugcaggacgugaucaaccagcacgccgcccagcugcacacgcucgucgugcagcugggcaacuccuucggggccaucagcuccagcaucaacgagaucuucucccgccuggagccgcccgccgcgaacgccgaggucgaccggcucaucaacggccgcaugauggugcugaacaccuacgugacccagcugcucauccaggccagcgaggccaaggcccagaacgcgcuggccgcccagaagaucuccgagugcgucaaggcccagagccugcggaacgacuucugcgggaacggcacccacgugcucuccaucccccagcuggcccccaacggcgugcuguucauccacuacgcguacacgcccaccgaguacgccuucguccagaccagcgccgggcucugccacaacggcaccggguacgcgccccgccagggcauguucgugcugccgaacaacaccaacauguggcacuucacgaccaugcaguucuacaaccccgugaacaucuccgccagcaacacccagguccugaccuccugcagcgugaacuacacguccgugaacuacaccguccucgagcccagcgugcccggggacuacgacuuccagaaggaguucgacaaguucuacaagaaccugagcaccaucuucaacaacaccuucaacccgaacgacuucaacuucuccacgguggacgucaccgcccagaucaagagccugcacgacguggugaaccagcucaaccaguccuucaucgaccugaagaagcugaacgucuacgagaagaccaucaaguggcccugguacguguggcucgccaugaucgccggcaucgugggccugguccuggccgugaucaugcucaugugcaugaccaacugcugcagcugcuucaaggggaugugcgacugccgccggugcugcggcuccuacgacagcuacgacgacguguaccccgcgguccgcgugaacaagaagcggacgguguga

SEQ ID NO: 14982 - RNA, 3624 nt, Artificial Sequence
  BatCoV/HKU9-1 BF_005I__YP_001039971.1 spike protein CDS gc (variant)
augcugcucauccuggugcugggcgucagccucgccgccgcgucccgccccgagugcuucaacccgcgguucacccugacgccccugaaccacacccucaacuacaccagcaucaaggccaagguguccaacgugcugcugcccgaccccuacaucgccuacagcgggcagacccuccgccagaaccuguucauggccgacauguccaacaccauccuguacccggucacgccgcccgccaacggcgcgaacgggggcuucaucuacaacaccagcaucauccccguguccgccggccucuucgugaacaccuggauguaccggcagcccgccagcucccgcgccuacugccaggagcccuucggggucgcguucggcgacaccuucgagaacgaccggaucgccauccugaucauggcccccgacaaccuggggagcugguccgccguggcgccccgcaaccagacgaacaucuaccuccuggugugcagcaacgccacccugugcaucaacccgggcuucaaccggugggggcccgccggcuccuucaucgcccccgacgcccucgucgaccacagcaacuccugcuucgugaacaacaccuucagcgugaacaucuccaccagccgcaucucccuggccuuccuguucaaggacggggaccuccugaucuaccacagcggcuggcugcccacgagcaacuucgagcacggcuucucccgggggagccacccgaugaccuacuucaugucccuccccgucggcgggaaccugccccgcgcgcaguucuuccagagcaucgugcgguccaacgccaucgacaagggcgacggcaugugcaccaacuucgacgugaaccugcacgucgcccaccucaucaaccgcgaccugcuggugagcuacuucaacaacggguccguggccaacgccgcggacugcgccgacagcgccgccgaggagcucuacugcgucaccggcuccuucgacccgcccacggggguguacccccugagccgguaccgcgcccagguggcgggcuucguccgggugacccagcgcggguccuacugcaccccgcccuacagcgugcugcaggacccgccccagcccgucguguggcggcgcuacaugcucuacgacugcgucuucgacuucaccgugguggucgacucccugcccacgcaccagcugcagugcuacggcgugagcccccggcgccucgccuccaugugcuacggcagcgugacccuggacgucaugcggaucaacgagacccaccugaacaaccucuucaaccgcgugcccgacaccuucucccuguacaacuacgcccugcccgacaacuucuacgggugccuccacgccuucuaccugaacagcacggcgccguacgccguggccaaccgcuuccccaucaagcccggcgggcggcaguccaacagcgccuucaucgacaccgucaucaacgccgcgcacuacagccccuucuccuacguguacggccuggccgugaucacccucaagccggccgccgggagcaagcuggucugccccguggccaacgacaccguggucaucacggaccgcugcgugcaguacaaccuguacggcuacaccggcaccggggugcuguccaagaacaccagccucgucauccccgacggcaagguguucacggcguccagcaccgggaccaucaucggcguguccaucaacagcaccacguacuccaucaugcccugcgucaccgugccggugagcgucggguaccaccccaacuucgagcgggcccugcuguucaacggccucuccugcagccagcgcucccgggccgugaccgagcccgugagcguccugugguccgccagcgccaccgcgcaggacgccuucgacacccccuccggcugcguggugaacgucgagcugcgcaacacgaccaucgugaacacgugcgccaugccgaucgggaacagccucugcuucaucaacggcagcaucgccaccgcgaacgccgacucccugccccggcugcagcucgugaacuacgacccccuguacgacaacagcaccgccacccccaugaccccggucuacugggugaaggugcccaccaacuucacgcuguccgccaccgaggaguacauccagaccaccgcccccaagaucacgaucgacugcgcgcgcuaccucugcggggacagcucccggugccugaacguccugcuccacuacggcaccuucugcaacgacaucaacaaggcccugagccgcguguccaccauccuggacagcgcccuccugucccuggugaaggagcucagcaucaacacccgggacgaggucacgaccuucuccuucgacggcgacuacaacuucaccgggcugaugggcugccuggggcccaacugcggcgccaccacguaccgcagcgccuucuccgaccuccuguacgacaaggugcggaucaccgacccgggguucaugcagagcuaccagaagugcaucgacucccaguggggcggcagcauccgcgaccugcucugcacccagaccuacaacgggaucgcggugcugccgcccaucgucucccccgccaugcaggcccuguacacgagccuccuggugggcgccguggccuccagcggguacaccuucggcaucaccagcgcgggggucauccccuucgccacccagcugcaguuccggcucaacggcaucggcgugacgacccaggugcuggucgagaaccagaagcugaucgccuccagcuucaacaacgcccucgugaacauccagaagggguucaccgagaccuccaucgcgcugagcaagaugcaggacgugaucaaccagcacgccgcccagcugcacacgcucgucgugcagcugggcaacuccuucggggccaucagcuccagcaucaacgagaucuucucccgccuggagccgcccgccgcgaacgccgaggucgaccggcucaucaacggccgcaugauggugcugaacaccuacgugacccagcugcucauccaggccagcgaggccaaggcccagaacgcgcuggccgcccagaagaucuccgagugcgucaaggcccagagccugcggaacgacuucugcgggaacggcacccacgugcucuccaucccccagcuggcccccaacggcgugcuguucauccacuacgcguacacgcccaccgaguacgccuucguccagaccagcgccgggcucugccacaacggcaccggguacgcgccccgccagggcauguucgugcugccgaacaacaccaacauguggcacuucacgaccaugcaguucuacaaccccgugaacaucuccgccagcaacacccagguccugaccuccugcagcgugaacuacacguccgugaacuacaccguccucgagcccagcgugcccggggacuacgacuuccagaaggaguucgacaaguucuacaagaaccugagcaccaucuucaacaacaccuucaacccgaacgacuucaacuucuccacgguggacgucaccgcccagaucaagagccugcacgacguggugaaccagcucaaccaguccuucaucgaccugaagaagcugaacgucuacgagaaguga

SEQ ID NO: 14983 - RNA, 3705 nt, Artificial Sequence
  BatCoV/HKU9-1 BF_005I__YP_001039971.1 spike protein CDS gc (variant)
augcugcucauccuggugcugggcgucagccucgccgccgccucccgccccgagugcuucaacccgcgguucacccugacgccccugaaccacacccucaacuacaccagcaucaaggccaagguguccaacgugcugcugcccgaccccuacaucgccuacagcgggcagacccuccgccagaaccuguucauggccgacauguccaacaccauccuguacccggucacgccgcccgccaacggcgcgaacgggggcuucaucuacaacaccagcaucauccccguguccgccggccucuucgugaacaccuggauguaccggcagcccgccagcucccgcgccuacugccaggagcccuucggggucgcguucggcgacaccuucgagaacgaccggaucgccauccugaucauggcccccgacaaccuggggagcugguccgccguggcgccccgcaaccagacgaacaucuaccuccuggugugcagcaacgccacccugugcaucaacccgggcuucaaccggugggggcccgccggcuccuucaucgcccccgacgcccucgucgaccacagcaacuccugcuucgugaacaacaccuucagcgugaacaucuccaccagccgcaucucccuggccuuccuguucaaggacggggaccuccugaucuaccacagcggcuggcugcccacgagcaacuucgagcacggcuucucccgggggagccacccgaugaccuacuucaugucccuccccgucggcgggaaccugccccgcgcgcaguucuuccagagcaucgugcgguccaacgccaucgacaagggcgacggcaugugcaccaacuucgacgugaaccugcacgucgcccaccucaucaaccgcgaccugcuggugagcuacuucaacaacggguccguggccaacgccgcggacugcgccgacagcgccgccgaggagcucuacugcgucaccggcuccuucgacccgcccacggggguguacccccugagccgguaccgcgcccagguggcgggcuucguccgggugacccagcgcggguccuacugcaccccgcccuacagcgugcugcaggacccgccccagcccgucguguggcggcgcuacaugcucuacgacugcgucuucgacuucaccgugguggucgacucccugcccacgcaccagcugcagugcuacggcgugagcccccggcgccucgccuccaugugcuacggcagcgugacccuggacgucaugcggaucaacgagacccaccugaacaaccucuucaaccgcgugcccgacaccuucucccuguacaacuacgcccugcccgacaacuucuacgggugccuccacgccuucuaccugaacagcacggcgccguacgccguggccaaccgcuuccccaucaagcccggcgggcggcaguccaacagcgccuucaucgacaccgucaucaacgccgcgcacuacagccccuucuccuacguguacggccuggccgugaucacccucaagccggccgccgggagcaagcuggucugccccguggccaacgacaccguggucaucacggaccgcugcgugcaguacaaccuguacggcuacaccggcaccggggugcuguccaagaacaccagccucgucauccccgacggcaagguguucacggcguccagcaccgggaccaucaucggcguguccaucaacagcaccacguacuccaucaugcccugcgucaccgugccggugagcgucggguaccaccccaacuucgagcgggcccugcuguucaacggccucuccugcagccagcgcucccgggccgugaccgagcccgugagcguccugugguccgccagcgccaccgcgcaggacgccuucgacacccccuccggcugcguggugaacgucgagcugcgcaacacgaccaucgugaacacgugcgccaugccgaucgggaacagccucugcuucaucaacggcagcaucgccaccgcgaacgccgacucccugccccggcugcagcucgugaacuacgacccccuguacgacaacagcaccgccacccccaugaccccggucuacugggugaaggugcccaccaacuucacgcuguccgccaccgaggaguacauccagaccaccgcccccaagaucacgaucgacugcgcgcgcuaccucugcggggacagcucccggugccugaacguccugcuccacuacggcaccuucugcaacgacaucaacaaggcccugagccgcguguccaccauccuggacagcgcccuccugucccuggugaaggagcucagcaucaacacccgggacgaggucacgaccuucuccuucgacggcgacuacaacuucaccgggcugaugggcugccuggggcccaacugcggcgccaccacguaccgcagcgccuucuccgaccuccuguacgacaaggugcggaucaccgacccgggguucaugcagagcuaccagaagugcaucgacucccaguggggcggcagcauccgcgaccugcucugcacccagaccuacaacgggaucgcggugcugccgcccaucgucucccccgccaugcaggcccuguacacgagccuccuggugggcgccguggccuccagcggguacaccuucggcaucaccagcgcgggggucauccccuucgccacccagcugcaguuccggcucaacggcaucggcgugacgacccaggugcuggucgagaaccagaagcugaucgccuccagcuucaacaacgcccucgugaacauccagaagggguucaccgagaccuccaucgcgcugagcaagaugcaggacgugaucaaccagcacgccgcccagcugcacacgcucgucgugcagcugggcaacuccuucggggccaucagcuccagcaucaacgagaucuucucccgccuggagccgcccgccgcgaacgccgaggucgaccggcucaucaacggccgcaugauggugcugaacaccuacgugacccagcugcucauccaggccagcgaggccaaggcccagaacgcgcuggccgcccagaagaucuccgagugcgucaaggcccagagccugcggaacgacuucugcgggaacggcacccacgugcucuccaucccccagcuggcccccaacggcgugcuguucauccacuacgcguacacgcccaccgaguacgccuucguccagaccagcgccgggcucugccacaacggcaccggguacgcgccccgccagggcauguucgugcugccgaacaacaccaacauguggcacuucacgaccaugcaguucuacaaccccgugaacaucuccgccagcaacacccagguccugaccuccugcagcgugaacuacacguccgugaacuacaccguccucgagcccagcgugcccggggacuacgacuuccagaaggaguucgacaaguucuacaagaaccugagcaccaucuucaacaacaccuucaacccgaacgacuucaacuucuccacgguggacgucaccgcccagaucaagagccugcacgacguggugaaccagcucaaccaguccuucaucgaccugaagaagcugaacgucuacgagaagggcggcuacauccccgaggcgccccgcgacgggcaggccuacgugcggaaggacggcgagugggugcuccugagcaccuucuga

SEQ ID NO: 14984 - RNA, 3483 nt, Artificial Sequence
  PDCoV/Swine/Thailand/S5011/2015__AMN91621.1 spike protein CDS gc (1-1160)
augcagcgcgcccugcucaucaugacccugcugugccucgcccgggcgaaguucgccgacgaccugcuggaccuccugaccuuccccggcgcccaccgcuuccugcacaagccgacgcggaacgacagcauccucuacucccgcgccaacaacaacuucgacguggggguccugcccggcuaccccaccaagaacgugaaccuguucagcccccucaccaacuccacccugccgaucaacgggcugcaccggagcuaccagccccucaugcugaacugccugacgaagaucaccaaccagacccucuccauguaccugcagcccagcgagauccagaccuacuccugcggcggggccauggugaaguaccagacgcacgacgcgguccgcaucauccuggaccucaucgccaccgaccggaucagcguggagguggucggccaggccggcgagaacuacguguucgugugcuccgaccaguucaacuacaccaccgcccugcacaacagcacguucuucucccugaacagccagcucuacugcuucaccaacaacaccuaccuggggauccugcccccggaccucaccgacuucacggucuaccgcaccggccaguucuacgcgaacggguaccugcugggcacccuccccaucaccgugaacuacgugcggcuguaccgcgggcagcuguccgccaacagcgcccacuucgcccucgccaaccugacggacacccugaucacccucaccaacacgaccaucucccagaucaccuacugcgacaagagcgucguggacuccaucgcgugccagcggagcucccaccagguggaggacggcuucuacagcgaccccaagagcgccguccgcgcccggcagcgcaccaucgugacgcugcccaagcugccggagcucgaggugguccagcugaacaucuccgcccacauggacuucggcgaggcccggcuggacagcgugaccaucaacgggaacaccuccuacugcgugaccaagcccuacuuccgccucgagacgaacuuccugugccggggcugcaccaugaaccugcgcaccgacacgugcagcuucgaccucuccgcggucaacaacgggaugagcuucucccaguucugccugagcaccgaguccggcgccugcgagaugaagaucaucgugaccuacguguggaacuaccugcugcggcagcgccucuacgucaccgccguggagggccagacccacaccgggacgaccagcguccacgccaccgacaccuccagcgugaucacggacgugugcaccgacuacaccaucuacggcgucuccgggaccggcaucaucaagcccagcgaccugcugcuccacaacgggaucgccuucacgucccccaccggcgagcuguacgcguucaagaacaucaccaccggcaagacgcuccaggugcugccgugcgagacccccagccagcugaucgugaucaacaacaccgucgugggggccaucaccuccagcaacuccacggagaacaaccgguucaccaccaccaucgugacgcccaccuucuucuacagcaccaacgccaccacgcugaacugcaccaagcccguccucagcuacggcccgaucuccgugugcagcgacggggccaucgccggcaccuccacccugcagaacacgcgccccagcaucgugucccuguacgacggggagaucgagauccccagcgcguucucccucagcguccagaccgaguaccuccaggugcaggccgagcaggucaucguggacugcccccaguacgugugcaacggcaacucccgcugccugcagcugcuggcccaguacaccagcgccugcuccaacaucgagguggcgcugcacagcuccgcccagcucgacagccgggagaucaucuccauguucaagaccagcacgcagucccugcagcuggccaacaucaccaacuucaagggcgacuacaacuucagcagcauccucaccucccgcgucgggggccggagcgccaucgaggaccugcuguucaacaagguggugaccuccgggcucggcacggucgaccaggacuacaagagcugcucccgcaacauggccaucgcggaccuggugugcagccaguacuacaacgggaucauggugcugccgggcgucguggacgccgagaagauggccauguacaccggcucccucaccggggccaugguguucggcgggcugaccgccgcggccgccauccccuucgccaccgccguccaggcgcggcugaacuacguggcccuccagacgaacgugcugcaggagaaccagaagauccuggccgagagcuucaaccaggccgucggcaacaucucccucgcgcugagcuccgugaacgacgccauccagcagaccagcgaggcccugaacaccguggccaucgccaucaagaagauccagaccgucgugaaccagcagggcgaggcgcucucccaccugacggcccagcugagcaacaacuuccaggccaucuccaccagcauccaggacaucuacaaccgccucgaggagguggaggccaaccagcaggucgaccggcugaucaacgggcgccuggccgcgcucaacgccuacgugacccagcugcugaaccagaugucccagauccggcagagccgccuccuggcccagcagaagaucaacgagugcgugaagucccagagcccccgguacggcuucugcgggaacggcacccacaucuucagccugacgcagaccgcccccaacgggaucuucuucaugcacgccguccucgugccgaacaaguucacccgcgugaacgcguccgccggcaucugcgucgacaacacccggggcuacagccugcagccccagcugauccucuaccaguucaacaacuccuggcgcgugacgccccggaacauguacgagccgcgccugccccggcaggccgacuucauccagcugaccgacugcagcgugaccuucuacaacaccacggccgcgaaccuccccaacaucauccccgacgucaucgacgugaaccagaccguguccgacaucaucgacaaccugccgaccgccaccccgccccagugggacgucgggaucuacaacaacacgauccugaaccucaccguggagaucaacgaccugcaggagcgcagcaagaaccugucccagaucgccgaccggcuccagaacuacaucgacaaccugaacaacacccugguggaccucgaguggcugaaccgcgucgagaccuaccugaaguggcccugguacaucuggcucgccaucgcccuggcgcugaucgccuucgugacgauccucaucaccaucuuccugugcaccggcugcugcgggggcugcuucgggugcugcggcggcugcuucgggcuguucagcaagaagaagcgcuacaccgacgaccagcccacgcccuccuucaaguucaaggagugguga

SEQ ID NO: 14985 - RNA, 3483 nt, Artificial Sequence
  PDCoV/Swine/Thailand/S5011/2015__AMN91621.1 spike protein CDS gc (1-1160)(E855P_V856P)
augcagcgcgcccugcucaucaugacccugcugugccucgcccgggcgaaguucgccgacgaccugcuggaccuccugaccuuccccggcgcccaccgcuuccugcacaagccgacgcggaacgacagcauccucuacucccgcgccaacaacaacuucgacguggggguccugcccggcuaccccaccaagaacgugaaccuguucagcccccucaccaacuccacccugccgaucaacgggcugcaccggagcuaccagccccucaugcugaacugccugacgaagaucaccaaccagacccucuccauguaccugcagcccagcgagauccagaccuacuccugcggcggggccauggugaaguaccagacgcacgacgcgguccgcaucauccuggaccucaucgccaccgaccggaucagcguggagguggucggccaggccggcgagaacuacguguucgugugcuccgaccaguucaacuacaccaccgcccugcacaacagcacguucuucucccugaacagccagcucuacugcuucaccaacaacaccuaccuggggauccugcccccggaccucaccgacuucacggucuaccgcaccggccaguucuacgcgaacggguaccugcugggcacccuccccaucaccgugaacuacgugcggcuguaccgcgggcagcuguccgccaacagcgcccacuucgcccucgccaaccugacggacacccugaucacccucaccaacacgaccaucucccagaucaccuacugcgacaagagcgucguggacuccaucgcgugccagcggagcucccaccagguggaggacggcuucuacagcgaccccaagagcgccguccgcgcccggcagcgcaccaucgugacgcugcccaagcugccggagcucgaggugguccagcugaacaucuccgcccacauggacuucggcgaggcccggcuggacagcgugaccaucaacgggaacaccuccuacugcgugaccaagcccuacuuccgccucgagacgaacuuccugugccggggcugcaccaugaaccugcgcaccgacacgugcagcuucgaccucuccgcggucaacaacgggaugagcuucucccaguucugccugagcaccgaguccggcgccugcgagaugaagaucaucgugaccuacguguggaacuaccugcugcggcagcgccucuacgucaccgccguggagggccagacccacaccgggacgaccagcguccacgccaccgacaccuccagcgugaucacggacgugugcaccgacuacaccaucuacggcgucuccgggaccggcaucaucaagcccagcgaccugcugcuccacaacgggaucgccuucacgucccccaccggcgagcuguacgcguucaagaacaucaccaccggcaagacgcuccaggugcugccgugcgagacccccagccagcugaucgugaucaacaacaccgucgugggggccaucaccuccagcaacuccacggagaacaaccgguucaccaccaccaucgugacgcccaccuucuucuacagcaccaacgccaccacgcugaacugcaccaagcccguccucagcuacggcccgaucuccgugugcagcgacggggccaucgccggcaccuccacccugcagaacacgcgccccagcaucgugucccuguacgacggggagaucgagauccccagcgcguucucccucagcguccagaccgaguaccuccaggugcaggccgagcaggucaucguggacugcccccaguacgugugcaacggcaacucccgcugccugcagcugcuggcccaguacaccagcgccugcuccaacaucgagguggcgcugcacagcuccgcccagcucgacagccgggagaucaucuccauguucaagaccagcacgcagucccugcagcuggccaacaucaccaacuucaagggcgacuacaacuucagcagcauccucaccucccgcgucgggggccggagcgccaucgaggaccugcuguucaacaagguggugaccuccgggcucggcacggucgaccaggacuacaagagcugcucccgcaacauggccaucgcggaccuggugugcagccaguacuacaacgggaucauggugcugccgggcgucguggacgccgagaagauggccauguacaccggcucccucaccggggccaugguguucggcgggcugaccgccgcggccgccauccccuucgccaccgccguccaggcgcggcugaacuacguggcccuccagacgaacgugcugcaggagaaccagaagauccuggccgagagcuucaaccaggccgucggcaacaucucccucgcgcugagcuccgugaacgacgccauccagcagaccagcgaggcccugaacaccguggccaucgccaucaagaagauccagaccgucgugaaccagcagggcgaggcgcucucccaccugacggcccagcugagcaacaacuuccaggccaucuccaccagcauccaggacaucuacaaccgccucgagccgcccgaggccaaccagcaggucgaccggcugaucaacgggcgccuggccgcgcucaacgccuacgugacccagcugcugaaccagaugucccagauccggcagagccgccuccuggcccagcagaagaucaacgagugcgugaagucccagagcccccgguacggcuucugcgggaacggcacccacaucuucagccugacgcagaccgcccccaacgggaucuucuucaugcacgccgugcucguccccaacaaguucacccgcgugaacgcguccgccggcaucugcguggacaacacccggggcuacagccugcagccgcagcugauccucuaccaguucaacaacuccuggcgcgucacgccccggaacauguacgagccccgccugccccggcaggccgacuucauccagcugaccgacugcagcgugaccuucuacaacaccacggccgcgaaccucccgaacaucauccccgacgugaucgacgucaaccagaccguguccgacaucaucgacaaccugcccaccgccacgcccccgcagugggacguggggaucuacaacaacaccauccugaaccucaccgucgagaucaacgaccugcaggagcgcagcaagaaccugucccagaucgccgaccggcuccagaacuacaucgacaaccugaacaacacccugguggaccucgaguggcugaaccgcguggagaccuaccugaaguggcccugguacaucuggcucgccaucgcccuggcgcugaucgccuucgucacgauccucaucaccaucuuccugugcaccggcugcugcgggggcugcuucgggugcugcggcggcugcuucgggcuguucagcaagaagaagcgcuacaccgacgaccagcccacgcccuccuucaaguucaaggagugguga

SEQ ID NO: 14986 - RNA, 3282 nt, Artificial Sequence
  PDCoV/Swine/Thailand/S5011/2015__AMN91621.1 spike protein CDS gc (variant)
augcagcgcgcccugcucaucaugacccugcugugccucgcccgggcgaaguucgccgacgaccugcuggaccuccugaccuuccccggcgcccaccgcuuccugcacaagccgacgcggaacgacagcauccucuacucccgcgccaacaacaacuucgacguggggguccugcccggcuaccccaccaagaacgugaaccuguucagcccccucaccaacuccacccugccgaucaacgggcugcaccggagcuaccagccccucaugcugaacugccugacgaagaucaccaaccagacccucuccauguaccugcagcccagcgagauccagaccuacuccugcggcggggccauggugaaguaccagacgcacgacgcgguccgcaucauccuggaccucaucgccaccgaccggaucagcguggagguggucggccaggccggcgagaacuacguguucgugugcuccgaccaguucaacuacaccaccgcccugcacaacagcacguucuucucccugaacagccagcucuacugcuucaccaacaacaccuaccuggggauccugcccccggaccucaccgacuucacggucuaccgcaccggccaguucuacgcgaacggguaccugcugggcacccuccccaucaccgugaacuacgugcggcuguaccgcgggcagcuguccgccaacagcgcccacuucgcccucgccaaccugacggacacccugaucacccucaccaacacgaccaucucccagaucaccuacugcgacaagagcgucguggacuccaucgcgugccagcggagcucccaccagguggaggacggcuucuacagcgaccccaagagcgccguccgcgcccggcagcgcaccaucgugacgcugcccaagcugccggagcucgaggugguccagcugaacaucuccgcccacauggacuucggcgaggcccggcuggacagcgugaccaucaacgggaacaccuccuacugcgugaccaagcccuacuuccgccucgagacgaacuuccugugccggggcugcaccaugaaccugcgcaccgacacgugcagcuucgaccucuccgcggucaacaacgggaugagcuucucccaguucugccugagcaccgaguccggcgccugcgagaugaagaucaucgugaccuacguguggaacuaccugcugcggcagcgccucuacgucaccgccguggagggccagacccacaccgggacgaccagcguccacgccaccgacaccuccagcgugaucacggacgugugcaccgacuacaccaucuacggcgucuccgggaccggcaucaucaagcccagcgaccugcugcuccacaacgggaucgccuucacgucccccaccggcgagcuguacgcguucaagaacaucaccaccggcaagacgcuccaggugcugccgugcgagacccccagccagcugaucgugaucaacaacaccgucgugggggccaucaccuccagcaacuccacggagaacaaccgguucaccaccaccaucgugacgcccaccuucuucuacagcaccaacgccaccacgcugaacugcaccaagcccguccucagcuacggcccgaucuccgugugcagcgacggggccaucgccggcaccuccacccugcagaacacgcgccccagcaucgugucccuguacgacggggagaucgagauccccagcgcguucucccucagcguccagaccgaguaccuccaggugcaggccgagcaggucaucguggacugcccccaguacgugugcaacggcaacucccgcugccugcagcugcuggcccaguacaccagcgccugcuccaacaucgagguggcgcugcacagcuccgcccagcucgacagccgggagaucaucuccauguucaagaccagcacgcagucccugcagcuggccaacaucaccaacuucaagggcgacuacaacuucagcagcauccucaccucccgcgucgggggccggagcgccaucgaggaccugcuguucaacaagguggugaccuccgggcucggcacggucgaccaggacuacaagagcugcucccgcaacauggccaucgcggaccuggugugcagccaguacuacaacgggaucauggugcugccgggcgucguggacgccgagaagauggccauguacaccggcucccucaccggggccaugguguucggcgggcugaccgccgcggccgccauccccuucgccaccgccguccaggcgcggcugaacuacguggcccuccagacgaacgugcugcaggagaaccagaagauccuggccgagagcuucaaccaggccgucggcaacaucucccucgcgcugagcuccgugaacgacgccauccagcagaccagcgaggcccugaacaccguggccaucgccaucaagaagauccagaccgucgugaaccagcagggcgaggcgcucucccaccugacggcccagcugagcaacaacuuccaggccaucuccaccagcauccaggacaucuacaaccgccucgagccgcccgaggccaaccagcaggucgaccggcugaucaacgggcgccuggccgcgcucaacgccuacgugacccagcugcugaaccagaugucccagauccggcagagccgccuccuggcccagcagaagaucaacgagugcgugaagucccagagcccccgguacggcuucugcgggaacggcacccacaucuucagccugacgcagaccgcccccaacgggaucuucuucaugcacgccgugcucguccccaacaaguucacccgcgugaacgcguccgccggcaucugcguggacaacacccggggcuacagccugcagccgcagcugauccucuaccaguucaacaacuccuggcgcgucacgccccggaacauguacgagccccgccugccccggcaggccgacuucauccagcugaccgacugcagcgugaccuucuacaacaccacggccgcgaaccucccgaacaucauccccgacgugaucgacgucaaccagaccguguccgacaucaucgacaaccugcccaccgccacgcccccgcagugggacguggggaucuacaacaacaccauccugaaccucaccgucgagaucaacgaccugcaggagcgcagcaagaaccugucccagaucgccgaccggcuccagaacuacaucgacaaccugaacaacacccugguggaccucgaguggcugaaccgcguggagaccuga

SEQ ID NO: 14987 - RNA, 3363 nt, Artificial Sequence
  PDCoV/Swine/Thailand/S5011/2015__AMN91621.1 spike protein CDS gc (variant)
augcagcgcgcccugcucaucaugacccugcugugccucgcccgggccaaguucgccgacgaccugcuggaccuccugaccuuccccggcgcccaccgcuuccugcacaagccgacgcggaacgacagcauccucuacucccgcgccaacaacaacuucgacguggggguccugcccggcuaccccaccaagaacgugaaccuguucagcccccucaccaacuccacccugccgaucaacgggcugcaccggagcuaccagccccucaugcugaacugccugacgaagaucaccaaccagacccucuccauguaccugcagcccagcgagauccagaccuacuccugcggcggggccauggugaaguaccagacgcacgacgcgguccgcaucauccuggaccucaucgccaccgaccggaucagcguggagguggucggccaggccggcgagaacuacguguucgugugcuccgaccaguucaacuacaccaccgcccugcacaacagcacguucuucucccugaacagccagcucuacugcuucaccaacaacaccuaccuggggauccugcccccggaccucaccgacuucacggucuaccgcaccggccaguucuacgcgaacggguaccugcugggcacccuccccaucaccgugaacuacgugcggcuguaccgcgggcagcuguccgccaacagcgcccacuucgcccucgccaaccugacggacacccugaucacccucaccaacacgaccaucucccagaucaccuacugcgacaagagcgucguggacuccaucgcgugccagcggagcucccaccagguggaggacggcuucuacagcgaccccaagagcgccguccgcgcccggcagcgcaccaucgugacgcugcccaagcugccggagcucgaggugguccagcugaacaucuccgcccacauggacuucggcgaggcccggcuggacagcgugaccaucaacgggaacaccuccuacugcgugaccaagcccuacuuccgccucgagacgaacuuccugugccggggcugcaccaugaaccugcgcaccgacacgugcagcuucgaccucuccgcggucaacaacgggaugagcuucucccaguucugccugagcaccgaguccggcgccugcgagaugaagaucaucgugaccuacguguggaacuaccugcugcggcagcgccucuacgucaccgccguggagggccagacccacaccgggacgaccagcguccacgccaccgacaccuccagcgugaucacggacgugugcaccgacuacaccaucuacggcgucuccgggaccggcaucaucaagcccagcgaccugcugcuccacaacgggaucgccuucacgucccccaccggcgagcuguacgcguucaagaacaucaccaccggcaagacgcuccaggugcugccgugcgagacccccagccagcugaucgugaucaacaacaccgucgugggggccaucaccuccagcaacuccacggagaacaaccgguucaccaccaccaucgugacgcccaccuucuucuacagcaccaacgccaccacgcugaacugcaccaagcccguccucagcuacggcccgaucuccgugugcagcgacggggccaucgccggcaccuccacccugcagaacacgcgccccagcaucgugucccuguacgacggggagaucgagauccccagcgcguucucccucagcguccagaccgaguaccuccaggugcaggccgagcaggucaucguggacugcccccaguacgugugcaacggcaacucccgcugccugcagcugcuggcccaguacaccagcgccugcuccaacaucgagguggcgcugcacagcuccgcccagcucgacagccgggagaucaucuccauguucaagaccagcacgcagucccugcagcuggccaacaucaccaacuucaagggcgacuacaacuucagcagcauccucaccucccgcgucgggggccggagcgccaucgaggaccugcuguucaacaagguggugaccuccgggcucggcacggucgaccaggacuacaagagcugcucccgcaacauggccaucgcggaccuggugugcagccaguacuacaacgggaucauggugcugccgggcgucguggacgccgagaagauggccauguacaccggcucccucaccggggccaugguguucggcgggcugaccgccgcggccgccauccccuucgccaccgccguccaggcgcggcugaacuacguggcccuccagacgaacgugcugcaggagaaccagaagauccuggccgagagcuucaaccaggccgucggcaacaucucccucgcgcugagcuccgugaacgacgccauccagcagaccagcgaggcccugaacaccguggccaucgccaucaagaagauccagaccgucgugaaccagcagggcgaggcgcucucccaccugacggcccagcugagcaacaacuuccaggccaucuccaccagcauccaggacaucuacaaccgccucgagccgcccgaggccaaccagcaggucgaccggcugaucaacgggcgccuggccgcgcucaacgccuacgugacccagcugcugaaccagaugucccagauccggcagagccgccuccuggcccagcagaagaucaacgagugcgugaagucccagagcccccgguacggcuucugcgggaacggcacccacaucuucagccugacgcagaccgcccccaacgggaucuucuucaugcacgccgugcucguccccaacaaguucacccgcgugaacgcguccgccggcaucugcguggacaacacccggggcuacagccugcagccgcagcugauccucuaccaguucaacaacuccuggcgcgucacgccccggaacauguacgagccccgccugccccggcaggccgacuucauccagcugaccgacugcagcgugaccuucuacaacaccacggccgcgaaccucccgaacaucauccccgacgugaucgacgucaaccagaccguguccgacaucaucgacaaccugcccaccgccacgcccccgcagugggacguggggaucuacaacaacaccauccugaaccucaccgucgagaucaacgaccugcaggagcgcagcaagaaccugucccagaucgccgaccggcuccagaacuacaucgacaaccugaacaacacccugguggaccucgaguggcugaaccgcguggagaccggcggguacauccccgaggcgccccgcgacggccaggccuacguccggaaggacggggagugggugcugcucagcacguucuga

SEQ ID NO: 14988 - RNA, 4161 nt, Artificial Sequence
  PEDV/NPL-PEDv/2013/P10__AHZ94887.1 spike protein CDS gc (1-1386)
augaagucccugaccuacuucuggcuguuccugcccgugcugagcacccucagccugccgcaggacgucacgcgcugcuccgccaacaccaacuuccggcgcuucuucagcaaguucaacgugcaggcccccgcgguggucgugcugggcggguaccuccccaucggcgagaaccagggggugaacuccaccugguacugcgccggccagcaccccaccgccagcgggguccacggcaucuucgugucccacauccggggcgggcacggcuucgagaucgggaucagccaggagccguucgaccccuccggcuaccagcuguaccugcacaaggccacgaacgggaacaccaacgccaccgcgcgccuccggaucugccaguuccccagcaucaagacccugggccccacggccaacaacgacgugaccaccggccgcaacugccuguucaacaaggccaucccggcccacauguccgagcacagcgucguggggaucaccugggacaacgaccgggugacggucuucuccgacaagaucuacuacuucuacuucaagaacgacuggagccgcguggcgaccaagugcuacaacuccggcgggugcgccaugcaguacguguacgagcccaccuacuacaugcucaacgucaccagcgccggcgaggacggcaucuccuaccagcccugcacggccaacugcaucggguacgccgcgaacguguucgccaccgagcccaacggccacaucccggagggguucagcuucaacaacugguuccugcuguccaacgacagcacccucgugcacggcaaggucgugagcaaccagccccugcuggugaacugccuccuggccauccccaagaucuacgggcugggccaguucuucuccuucaaccagaccaucgacggcgucugcaacggggccgccgugcagcgggcgcccgaggcccuccgcuucaacaucaacgacaucagcgugauccuggccgagggcuccaucguccugcacacggcccucgggaccaacuucagcuucgugugcuccaacagcuccaacccgcaccuggccaccuucgcgaucccccugggcgccacccagguccccuacuacugcuucuucaagguggacacguacaacagcaccguguacaaguuccucgccguccugcccccgaccgugcgggagaucgugaucaccaaguacggggacgucuacgugaacggcuucggcuaccugcaccucgggcugcuggacgccgugacgaucaacuucaccggccacgggaccgacgacgacgucuccggcuucuggaccaucgccagcacgaacuucguggacgcgcucaucgaggugcaggggaccgccauccagcgcauccuguacugcgacgaccccgucucccagcugaagugcagccagguggccuucgaccucgacgacggcuucuacaccaucuccagccggaaccugcugucccacgagcagcccaucagcuucgugacccuccccuccuucaacgaccacagcuucgucaacaucacgguguccgccagcuucggcgggcacagcggcgcgaaccugaucgccuccgacaccaccaucaacggguucagcuccuucugcguggacacccgccaguucaccaucagccuguucuacaacgucacgaacuccuacggcuacgugagcaagucccaggacagcaacugcccguucacccuccaguccgugaacgacuaccugagcuucuccaaguucugcgucagcaccucccugcucgccagcgccugcaccaucgaccuguucggcuaccccgaguucggguccggcgugaaguucacgagccuguacuuccaguucaccaagggggagcugaucaccggcacccccaagccccucgagggggugacggacgucuccuucaugacccuggacgugugcaccaaguacaccaucuacggcuucaagggcgaggggaucaucacgcugaccaacagcagcuuccucgccggcguguacuacaccuccgacagcgggcagcugcuggcguucaagaacgucaccuccggcgccguguacagcgugacgccgugcuccuucagcgagcaggccgccuacgucgacgacgacaucgugggggugaucuccagccucuccagcuccaccuucaacagcacccgggagcugcccggcuucuucuaccacuccaacgacggcagcaacugcaccgagcccguccugguguacuccaacaucggggugugcaagagcggcuccaucggguacgucccgagccaguccggccaggugaagaucgcccccacggugaccgggaacaucagcauccccaccaacuucagcauguccauccgcaccgaguaccuccagcuguacaacacgcccgucagcguggacugcgcgaccuacgugugcaacggcaacucccggugcaagcagcugcucacccaguacaccgccgccugcaagacgaucgagagcgcccugcagcuguccgcccgccucgagagcgucgaggugaacuccaugcugaccaucagcgacgaggcgcugcagcucgccaccaucuccagcuucaacggcgacggguacaacuucaccaacgugcugggcgucuccguguacgacccggccagccggcgcgugguccagaagcgguccuucaucgaggaccuccucuucaacaagguggugacgaacgggcugggcaccgucgacgaggacuacaagcgcugcagcaacgggcgcuccguggccgaccuggucugcgcgcaguacuacagcggcgugauggugcuccccggcgucguggacgccgagaagcugcacauguacuccgccagccugaucgggggcauggugcucgggggcuucaccuccgccgccgcgcugcccuucagcuacgccguccaggcccggcugaacuaccucgcccugcagaccgacgugcugcagcgcaaccagcagcuccuggccgagagcuucaacuccgcgaucggcaacaucacgagcgccuucgaguccgugaaggaggccaucagccagaccuccaaggggcugaacaccgucgcccacgcccucaccaaggugcaggagguggucaacagccagggcgcggcccugacccagcugacggugcagcuccagcacaacuuccaggccaucuccagcuccaucgacgacaucuacagccggcuggacauccuguccgccgacgcccagguggaccgccucaucaccgggcggcugagcgcccugaacgccuucgucgcccagacccucaccaaguacacggaggugcaggccucccgcaagcuggcgcagcagaaggugaacgagugcgucaagagccagucccagcgguacggcuucugcgggggcgacggcgagcacaucuucagccuggugcaggccgcgccccaggggcuccuguuccugcacaccgugcucgucccguccgacuucguggacgugaucgccaucgccggccugugcgucaacgacgagaucgcgcugacccuccgcgagcccgggcuggugcuguucacccacgagcuccagaaccacacggccaccgaguacuucgugagcucccggcgcauguucgagccccggaagcccaccgucagcgacuucgugcagaucgagagcugcguggucaccuacgugaaccugacgcgcgaccagcugccggacgugauccccgacuacaucgacgucaacaagacccucuacgagauccuggccucccugcccaaccggaccggccccagccucccgcuggacguguucaacgccaccuaccugaaccucacgggggagaucgccgaccuggagcagcgcuccgagagccugcggaacaccaccgaggagcuccagucccugaucuacaacaucaacaacacccugguggaccucgaguggcugaaccgcgucgagacguacaucaaguggcccugguggguguggcugaucaucuucaucgugcucaucuucgucgugagccugcugguguucugcugcaucuccaccggcugcugcggcugcugcgggugcugcugcgcgugcuucagcggcugcugccgggggccccgccuccagcccuacgaggucuucgagaaggugcacgugcaguga

SEQ ID NO: 14989 - RNA, 4161 nt, Artificial Sequence
  PEDV/NPL-PEDv/2013/P10__AHZ94887.1 spike protein CDS gc (1-1386)(I1076P_L1077P)
augaagucccugaccuacuucuggcuguuccugcccgugcugagcacccucagccugccgcaggacgucacgcgcugcuccgccaacaccaacuuccggcgcuucuucagcaaguucaacgugcaggcccccgcgguggucgugcugggcggguaccuccccaucggcgagaaccagggggugaacuccaccugguacugcgccggccagcaccccaccgccagcgggguccacggcaucuucgugucccacauccggggcgggcacggcuucgagaucgggaucagccaggagccguucgaccccuccggcuaccagcuguaccugcacaaggccacgaacgggaacaccaacgccaccgcgcgccuccggaucugccaguuccccagcaucaagacccugggccccacggccaacaacgacgugaccaccggccgcaacugccuguucaacaaggccaucccggcccacauguccgagcacagcgucguggggaucaccugggacaacgaccgggugacggucuucuccgacaagaucuacuacuucuacuucaagaacgacuggagccgcguggcgaccaagugcuacaacuccggcgggugcgccaugcaguacguguacgagcccaccuacuacaugcucaacgucaccagcgccggcgaggacggcaucuccuaccagcccugcacggccaacugcaucggguacgccgcgaacguguucgccaccgagcccaacggccacaucccggagggguucagcuucaacaacugguuccugcuguccaacgacagcacccucgugcacggcaaggucgugagcaaccagccccugcuggugaacugccuccuggccauccccaagaucuacgggcugggccaguucuucuccuucaaccagaccaucgacggcgucugcaacggggccgccgugcagcgggcgcccgaggcccuccgcuucaacaucaacgacaucagcgugauccuggccgagggcuccaucguccugcacacggcccucgggaccaacuucagcuucgugugcuccaacagcuccaacccgcaccuggccaccuucgcgaucccccugggcgccacccagguccccuacuacugcuucuucaagguggacacguacaacagcaccguguacaaguuccucgccguccugcccccgaccgugcgggagaucgugaucaccaaguacggggacgucuacgugaacggcuucggcuaccugcaccucgggcugcuggacgccgugacgaucaacuucaccggccacgggaccgacgacgacgucuccggcuucuggaccaucgccagcacgaacuucguggacgcgcucaucgaggugcaggggaccgccauccagcgcauccuguacugcgacgaccccgucucccagcugaagugcagccagguggccuucgaccucgacgacggcuucuacaccaucuccagccggaaccugcugucccacgagcagcccaucagcuucgugacccuccccuccuucaacgaccacagcuucgucaacaucacgguguccgccagcuucggcgggcacagcggcgcgaaccugaucgccuccgacaccaccaucaacggguucagcuccuucugcguggacacccgccaguucaccaucagccuguucuacaacgucacgaacuccuacggcuacgugagcaagucccaggacagcaacugcccguucacccuccaguccgugaacgacuaccugagcuucuccaaguucugcgucagcaccucccugcucgccagcgccugcaccaucgaccuguucggcuaccccgaguucggguccggcgugaaguucacgagccuguacuuccaguucaccaagggggagcugaucaccggcacccccaagccccucgagggggugacggacgucuccuucaugacccuggacgugugcaccaaguacaccaucuacggcuucaagggcgaggggaucaucacgcugaccaacagcagcuuccucgccggcguguacuacaccuccgacagcgggcagcugcuggcguucaagaacgucaccuccggcgccguguacagcgugacgccgugcuccuucagcgagcaggccgccuacgucgacgacgacaucgugggggugaucuccagccucuccagcuccaccuucaacagcacccgggagcugcccggcuucuucuaccacuccaacgacggcagcaacugcaccgagcccguccugguguacuccaacaucggggugugcaagagcggcuccaucggguacgucccgagccaguccggccaggugaagaucgcccccacggugaccgggaacaucagcauccccaccaacuucagcauguccauccgcaccgaguaccuccagcuguacaacacgcccgucagcguggacugcgcgaccuacgugugcaacggcaacucccggugcaagcagcugcucacccaguacaccgccgccugcaagacgaucgagagcgcccugcagcuguccgcccgccucgagagcgucgaggugaacuccaugcugaccaucagcgacgaggcgcugcagcucgccaccaucuccagcuucaacggcgacggguacaacuucaccaacgugcugggcgucuccguguacgacccggccagccggcgcgugguccagaagcgguccuucaucgaggaccuccucuucaacaagguggugacgaacgggcugggcaccgucgacgaggacuacaagcgcugcagcaacgggcgcuccguggccgaccuggucugcgcgcaguacuacagcggcgugauggugcuccccggcgucguggacgccgagaagcugcacauguacuccgccagccugaucgggggcauggugcucgggggcuucaccuccgccgccgcgcugcccuucagcuacgccguccaggcccggcugaacuaccucgcccugcagaccgacgugcugcagcgcaaccagcagcuccuggccgagagcuucaacuccgcgaucggcaacaucacgagcgccuucgaguccgugaaggaggccaucagccagaccuccaaggggcugaacaccgucgcccacgcccucaccaaggugcaggagguggucaacagccagggcgcggcccugacccagcugacggugcagcuccagcacaacuuccaggccaucuccagcuccaucgacgacaucuacagccggcuggacccgcccuccgccgacgcccagguggaccgccugaucaccgggcggcucagcgcccugaacgccuucgucgcccagacccugaccaaguacacggaggugcaggccucccgcaagcucgcgcagcagaaggugaacgagugcgucaagagccagucccagcgguacggcuucugcgggggcgacggcgagcacaucuucagccuggugcaggccgcgccccaggggcuccuguuccugcacaccgugcugguccccuccgacuucguggacgugaucgccaucgccggccucugcgucaacgacgagaucgcgcugacccugcgcgagcccgggcucgugcuguucacccacgagcugcagaaccacacggccaccgaguacuucgugagcucccggcgcauguucgagccgcggaagcccaccgucagcgacuucgugcagaucgagagcugcguggucaccuacgugaaccucacgcgcgaccagcugcccgacgugauccccgacuacaucgacgucaacaagacccuguacgagauccucgccucccugccgaaccggaccggccccagccugccccucgacguguucaacgccaccuaccugaaccugacgggggagaucgccgaccucgagcagcgcuccgagagccugcggaacaccaccgaggagcugcagucccucaucuacaacaucaacaacacccugguggaccuggaguggcucaaccgcgucgagacguacaucaaguggcccugguggguguggcugaucaucuucaucgugcugaucuucgucgugagccuccugguguucugcugcaucuccaccggcugcugcggcugcugcgggugcugcugcgcgugcuucagcggcugcugccgggggccgcgccugcagcccuacgaggucuucgagaaggugcacgugcaguga

SEQ ID NO: 14990 - RNA, 3969 nt, Artificial Sequence
  PEDV/NPL-PEDv/2013/P10__AHZ94887.1 spike protein CDS gc (variant)
augaagucccugaccuacuucuggcuguuccugcccgugcugagcacccucagccugccgcaggacgucacgcgcugcuccgccaacaccaacuuccggcgcuucuucagcaaguucaacgugcaggcccccgcgguggucgugcugggcggguaccuccccaucggcgagaaccagggggugaacuccaccugguacugcgccggccagcaccccaccgccagcgggguccacggcaucuucgugucccacauccggggcgggcacggcuucgagaucgggaucagccaggagccguucgaccccuccggcuaccagcuguaccugcacaaggccacgaacgggaacaccaacgccaccgcgcgccuccggaucugccaguuccccagcaucaagacccugggccccacggccaacaacgacgugaccaccggccgcaacugccuguucaacaaggccaucccggcccacauguccgagcacagcgucguggggaucaccugggacaacgaccgggugacggucuucuccgacaagaucuacuacuucuacuucaagaacgacuggagccgcguggcgaccaagugcuacaacuccggcgggugcgccaugcaguacguguacgagcccaccuacuacaugcucaacgucaccagcgccggcgaggacggcaucuccuaccagcccugcacggccaacugcaucggguacgccgcgaacguguucgccaccgagcccaacggccacaucccggagggguucagcuucaacaacugguuccugcuguccaacgacagcacccucgugcacggcaaggucgugagcaaccagccccugcuggugaacugccuccuggccauccccaagaucuacgggcugggccaguucuucuccuucaaccagaccaucgacggcgucugcaacggggccgccgugcagcgggcgcccgaggcccuccgcuucaacaucaacgacaucagcgugauccuggccgagggcuccaucguccugcacacggcccucgggaccaacuucagcuucgugugcuccaacagcuccaacccgcaccuggccaccuucgcgaucccccugggcgccacccagguccccuacuacugcuucuucaagguggacacguacaacagcaccguguacaaguuccucgccguccugcccccgaccgugcgggagaucgugaucaccaaguacggggacgucuacgugaacggcuucggcuaccugcaccucgggcugcuggacgccgugacgaucaacuucaccggccacgggaccgacgacgacgucuccggcuucuggaccaucgccagcacgaacuucguggacgcgcucaucgaggugcaggggaccgccauccagcgcauccuguacugcgacgaccccgucucccagcugaagugcagccagguggccuucgaccucgacgacggcuucuacaccaucuccagccggaaccugcugucccacgagcagcccaucagcuucgugacccuccccuccuucaacgaccacagcuucgucaacaucacgguguccgccagcuucggcgggcacagcggcgcgaaccugaucgccuccgacaccaccaucaacggguucagcuccuucugcguggacacccgccaguucaccaucagccuguucuacaacgucacgaacuccuacggcuacgugagcaagucccaggacagcaacugcccguucacccuccaguccgugaacgacuaccugagcuucuccaaguucugcgucagcaccucccugcucgccagcgccugcaccaucgaccuguucggcuaccccgaguucggguccggcgugaaguucacgagccuguacuuccaguucaccaagggggagcugaucaccggcacccccaagccccucgagggggugacggacgucuccuucaugacccuggacgugugcaccaaguacaccaucuacggcuucaagggcgaggggaucaucacgcugaccaacagcagcuuccucgccggcguguacuacaccuccgacagcgggcagcugcuggcguucaagaacgucaccuccggcgccguguacagcgugacgccgugcuccuucagcgagcaggccgccuacgucgacgacgacaucgugggggugaucuccagccucuccagcuccaccuucaacagcacccgggagcugcccggcuucuucuaccacuccaacgacggcagcaacugcaccgagcccguccugguguacuccaacaucggggugugcaagagcggcuccaucggguacgucccgagccaguccggccaggugaagaucgcccccacggugaccgggaacaucagcauccccaccaacuucagcauguccauccgcaccgaguaccuccagcuguacaacacgcccgucagcguggacugcgcgaccuacgugugcaacggcaacucccggugcaagcagcugcucacccaguacaccgccgccugcaagacgaucgagagcgcccugcagcuguccgcccgccucgagagcgucgaggugaacuccaugcugaccaucagcgacgaggcgcugcagcucgccaccaucuccagcuucaacggcgacggguacaacuucaccaacgugcugggcgucuccguguacgacccggccagccggcgcgugguccagaagcgguccuucaucgaggaccuccucuucaacaagguggugacgaacgggcugggcaccgucgacgaggacuacaagcgcugcagcaacgggcgcuccguggccgaccuggucugcgcgcaguacuacagcggcgugauggugcuccccggcgucguggacgccgagaagcugcacauguacuccgccagccugaucgggggcauggugcucgggggcuucaccuccgccgccgcgcugcccuucagcuacgccguccaggcccggcugaacuaccucgcccugcagaccgacgugcugcagcgcaaccagcagcuccuggccgagagcuucaacuccgcgaucggcaacaucacgagcgccuucgaguccgugaaggaggccaucagccagaccuccaaggggcugaacaccgucgcccacgcccucaccaaggugcaggagguggucaacagccagggcgcggcccugacccagcugacggugcagcuccagcacaacuuccaggccaucuccagcuccaucgacgacaucuacagccggcuggacccgcccuccgccgacgcccagguggaccgccugaucaccgggcggcucagcgcccugaacgccuucgucgcccagacccugaccaaguacacggaggugcaggccucccgcaagcucgcgcagcagaaggugaacgagugcgucaagagccagucccagcgguacggcuucugcgggggcgacggcgagcacaucuucagccuggugcaggccgcgccccaggggcuccuguuccugcacaccgugcugguccccuccgacuucguggacgugaucgccaucgccggccucugcgucaacgacgagaucgcgcugacccugcgcgagcccgggcucgugcuguucacccacgagcugcagaaccacacggccaccgaguacuucgugagcucccggcgcauguucgagccgcggaagcccaccgucagcgacuucgugcagaucgagagcugcguggucaccuacgugaaccucacgcgcgaccagcugcccgacgugauccccgacuacaucgacgucaacaagacccuguacgagauccucgccucccugccgaaccggaccggccccagccugccccucgacguguucaacgccaccuaccugaaccugacgggggagaucgccgaccucgagcagcgcuccgagagccugcggaacaccaccgaggagcugcagucccucaucuacaacaucaacaacacccugguggaccuggaguggcucaaccgcgucgagacguga

SEQ ID NO: 14991 - RNA, 4050 nt, Artificial Sequence
  PEDV/NPL-PEDv/2013/P10__AHZ94887.1 spike protein CDS gc (variant)
augaagucccugaccuacuucuggcuguuccugcccgugcugagcacccucagccugccgcaggacgucacgcgcugcuccgccaacaccaacuuccggcgcuucuucagcaaguucaacgugcaggcccccgcgguggucgugcugggcggguaccuccccaucggcgagaaccagggggugaacuccaccugguacugcgccggccagcaccccaccgccagcgggguccacggcaucuucgugucccacauccggggcgggcacggcuucgagaucgggaucagccaggagccguucgaccccuccggcuaccagcuguaccugcacaaggccacgaacgggaacaccaacgccaccgcgcgccuccggaucugccaguuccccagcaucaagacccugggccccacggccaacaacgacgugaccaccggccgcaacugccuguucaacaaggccaucccggcccacauguccgagcacagcgucguggggaucaccugggacaacgaccgggugacggucuucuccgacaagaucuacuacuucuacuucaagaacgacuggagccgcguggcgaccaagugcuacaacuccggcgggugcgccaugcaguacguguacgagcccaccuacuacaugcucaacgucaccagcgccggcgaggacggcaucuccuaccagcccugcacggccaacugcaucggguacgccgcgaacguguucgccaccgagcccaacggccacaucccggagggguucagcuucaacaacugguuccugcuguccaacgacagcacccucgugcacggcaaggucgugagcaaccagccccugcuggugaacugccuccuggccauccccaagaucuacgggcugggccaguucuucuccuucaaccagaccaucgacggcgucugcaacggggccgccgugcagcgggcgcccgaggcccuccgcuucaacaucaacgacaucagcgugauccuggccgagggcuccaucguccugcacacggcccucgggaccaacuucagcuucgugugcuccaacagcuccaacccgcaccuggccaccuucgcgaucccccugggcgccacccagguccccuacuacugcuucuucaagguggacacguacaacagcaccguguacaaguuccucgccguccugcccccgaccgugcgggagaucgugaucaccaaguacggggacgucuacgugaacggcuucggcuaccugcaccucgggcugcuggacgccgugacgaucaacuucaccggccacgggaccgacgacgacgucuccggcuucuggaccaucgccagcacgaacuucguggacgcgcucaucgaggugcaggggaccgccauccagcgcauccuguacugcgacgaccccgucucccagcugaagugcagccagguggccuucgaccucgacgacggcuucuacaccaucuccagccggaaccugcugucccacgagcagcccaucagcuucgugacccuccccuccuucaacgaccacagcuucgucaacaucacgguguccgccagcuucggcgggcacagcggcgcgaaccugaucgccuccgacaccaccaucaacggguucagcuccuucugcguggacacccgccaguucaccaucagccuguucuacaacgucacgaacuccuacggcuacgugagcaagucccaggacagcaacugcccguucacccuccaguccgugaacgacuaccugagcuucuccaaguucugcgucagcaccucccugcucgccagcgccugcaccaucgaccuguucggcuaccccgaguucggguccggcgugaaguucacgagccuguacuuccaguucaccaagggggagcugaucaccggcacccccaagccccucgagggggugacggacgucuccuucaugacccuggacgugugcaccaaguacaccaucuacggcuucaagggcgaggggaucaucacgcugaccaacagcagcuuccucgccggcguguacuacaccuccgacagcgggcagcugcuggcguucaagaacgucaccuccggcgccguguacagcgugacgccgugcuccuucagcgagcaggccgccuacgucgacgacgacaucgugggggugaucuccagccucuccagcuccaccuucaacagcacccgggagcugcccggcuucuucuaccacuccaacgacggcagcaacugcaccgagcccguccugguguacuccaacaucggggugugcaagagcggcuccaucggguacgucccgagccaguccggccaggugaagaucgcccccacggugaccgggaacaucagcauccccaccaacuucagcauguccauccgcaccgaguaccuccagcuguacaacacgcccgucagcguggacugcgcgaccuacgugugcaacggcaacucccggugcaagcagcugcucacccaguacaccgccgccugcaagacgaucgagagcgcccugcagcuguccgcccgccucgagagcgucgaggugaacuccaugcugaccaucagcgacgaggcgcugcagcucgccaccaucuccagcuucaacggcgacggguacaacuucaccaacgugcugggcgucuccguguacgacccggccagccggcgcgugguccagaagcgguccuucaucgaggaccuccucuucaacaagguggugacgaacgggcugggcaccgucgacgaggacuacaagcgcugcagcaacgggcgcuccguggccgaccuggucugcgcgcaguacuacagcggcgugauggugcuccccggcgucguggacgccgagaagcugcacauguacuccgccagccugaucgggggcauggugcucgggggcuucaccuccgccgccgcgcugcccuucagcuacgccguccaggcccggcugaacuaccucgcccugcagaccgacgugcugcagcgcaaccagcagcuccuggccgagagcuucaacuccgcgaucggcaacaucacgagcgccuucgaguccgugaaggaggccaucagccagaccuccaaggggcugaacaccgucgcccacgcccucaccaaggugcaggagguggucaacagccagggcgcggcccugacccagcugacggugcagcuccagcacaacuuccaggccaucuccagcuccaucgacgacaucuacagccggcuggacccgcccuccgccgacgcccagguggaccgccugaucaccgggcggcucagcgcccugaacgccuucgucgcccagacccugaccaaguacacggaggugcaggccucccgcaagcucgcgcagcagaaggugaacgagugcgucaagagccagucccagcgguacggcuucugcgggggcgacggcgagcacaucuucagccuggugcaggccgcgccccaggggcuccuguuccugcacaccgugcugguccccuccgacuucguggacgugaucgccaucgccggccucugcgucaacgacgagaucgcgcugacccugcgcgagcccgggcucgugcuguucacccacgagcugcagaaccacacggccaccgaguacuucgugagcucccggcgcauguucgagccgcggaagcccaccgucagcgacuucgugcagaucgagagcugcguggucaccuacgugaaccucacgcgcgaccagcugcccgacgugauccccgacuacaucgacgucaacaagacccuguacgagauccucgccucccugccgaaccggaccggccccagccugccccucgacguguucaacgccaccuaccugaaccugacgggggagaucgccgaccucgagcagcgcuccgagagccugcggaacaccaccgaggagcugcagucccucaucuacaacaucaacaacacccugguggaccuggaguggcucaaccgcgucgagacgggcggcuacauccccgaggcgccgcgggacgggcaggccuacgugcgcaaggacggcgagugggugcugcugagcaccuucuga

SEQ ID NO: 14992 - RNA, 4086 nt, Artificial Sequence
  MHV/S__BAK18575.1 spike protein CDS gc (1-1361)
augcugagcguguucauccucuuccugcccuccugccugggcuacaucggggacuuccgcugcaucaaccucgucaacaccgacaccagcaacgccuccgccccgagcguguccacggagguggucgacgugagcaagggcaucgggaccuacuacgugcuggaccgggucuaccugaacgcgacccuccugcugaccggcuacuaccccguggacggguccaacuaccgcaaccucgcccugacgggcaccaacacccugagccucaacugguacaagccgcccuuccuguccgaguucaacgacggcaucuucgccaaggugaagaaccugaaggccagccuccccaaggacuccaccagcuacuuccccacgaucgucaucggguccaacuucgugaccaccagcuacaccgugguccuggagcccuacaacggcaucaucauggccuccaucugccaguacacgaucugccugcuccccuacaccgacugcaagccgaacaccgggggcaacaagcugaucggguucuggcacaucgaccugaagucccccgugugcauccucaagcggaacuucaccuucaacgugaacgcggacuggcuguacuuccacuucuaccagcagggcggcacguucuacgccuacuacgccgacgccggguccgcgaccaccuuccuguucagcuccuacaucggcgacguccucacccaguacuucgugcugcccuucgugugcacgcccaccaccaccggggucuucagcccgcaguacugggugacgccccuggugaagcgccaguaccucuucaacuucaaccagaagggcaccaucaccagcgccgucgacugcgccuccagcuacaccuccgagaucaagugcaagacgcagagcaugaaccccaacaccggcguguacgaccuguccggguacaccgugcagcccgucggccugguguaccggcgcguccggaaccucccggacugccgcaucgaggacuggcuggccgccaagaccgugcccagcccccugaacugggagcggaagacguuccagaacugcaacuucaaccucuccagccugcugcgccucgugcaggcggggucccugagcugcuccaacaucgacgccgccaaggucuacggcaugugcuucgggagcauguccaucgacaaguucgccauccccaacagccggcgcguggaccugcagcucggcaacuccggcuuccugcagagcuucaacuacaagaucgacacccgggccaccuccugccagcuguacuacagccucgcgcaguccaacgugaccgucaacaaccacaacccgagcagcuggaaccgccgguacggguucaacgacguggccacguucggccgcgggaagcacgacguggccuacgccgaggccugcuucaccgucggcgcguccuacugccccugcgccaaccccagcaucgugucccccugcaccaccgggaagccgaaguucgccaacugccccaccggcacgaccaaccgggagugcaacgugcuggcccugggcagcaaccucuucaagugcgacugcacgugcaaccccagcccccugaccaccuacgaccugcgcugccugcaggggcggagcaugcucggcgucggggaccacugcgagggccugggggugcuggaggacaagugcggcggcuccaacacgugcaacugcagcgccgacgcguucguggggugggccaaggacuccugccucagcaacggccgcugccacaucuucuccaaccugaugcugaacgggaucaacagcggcacgaccugcuccaccgaccuccagcugccgaacaccgaggucgugaccggcaucugcgugaaguacgaccuguacgggaucaccggccagggggucuucaaggaggugaaggccgacuacuacaacagcuggcagaaccuccuguacgacgugaacggcaaccugaacggguuccgggacaucgucaccaacaagaccuaccucacccgcuccugcuacagcggccgcguguccgccgcguaccaccaggacgcccccgagcccgcccugcuguaccggaaccucaagugcgacuacguguucaacaacaacaucuuccgcgaggagaccccgcugaacuacuucgacagcuaccugggcugcgucgugaacgccgacaacagcacggagcaggccguggacgcgugcgaccuccggaugggguccggccugugcgucaacuacagcaccgcccaccgcgcccggaccuccgugagcaccggguacaagcugacgaccuucgagcccuucaccguguccaucgucaacgacagcguggaguccgugggcgggcucuacgagaugcagauccccaccaacuucacgaucgccagccaccaggaguucauccagacccgcgcccccaaggucaccaucgacugcgcggccuucgugugcggcgacuacaccacgugccggcagcagcugguggaguacggcuccuucugcgacaacaucaacgccauccugggggaggucaacaaccucaucgacaccaugcagcuccagguggccagcgcccugauccagggcgugacccucuccagccgccuggcggacgggaucuccggccagaucgacgacaucaacuucagcccgcugcucgggugccugggcucccagugcagcgagggcaccauggccgcccaggggcgguccacggucgaggaccugcuguucgacaaggugaagcugagcgacgugggcuucgucgaggccuacaacaacugcaccgggggccaggaggugcgcgaccugcucugcgugcaguccuucaacgggaucaagguccugccgcccgugcugagcgagaaccaggugagcggcuacaccgcgggcgccaccgccuccagcauguucccgcccugguccgccgccgcggggguccccuucagccucuccgugcaguaccggaucaacggccugggggugacgaugaacguccugagcgagaaccagaagaugaucgccuccgccuucaacaacgccaucggcgccauccaggagggcuucgacgcgaccaacagcgcccucgccaagauccaguccguggucaacgccaacgccgaggcgcugaacaaccugcucaaccagcugagcaaccgcuucggggccaucuccgccagccugcaggagauccucucccggcuggacgcccuggaggcgcaggcccagaucgaccgccucaucaacggccggcugaccgcccugaacgccuacgugagcaagcagcucuccgacaugacccugaucaaggugagcgccgcgcaggccaucgagaaggucaacgagugcgugaagucccagagcccccgcaucaacuucugcgggaacggcaaccacauccugucccucgugcagaacgcccccuacgggcuguacuuccugcacuucagcuacguccccaccagcuucacgaccgccaacgugucccccggccucugcaucagcggcgaccgggggcuggcccccaaggcgggcuacuucgugcaggacgacggggaguggaaguucaccggcuccaacuacuacuaccccgagccgaucaccgacaagaacagcgucgugauguccagcugcgccgugaacuacacgaaggcccccgaggucuuccugaacaccuccaucagcaaccuccccgacuucaaggaggagcuggacaagugguucaagaaccagaccuccguggcccccgaccugagccucgacuucgagaagcugaacgugaccuuccuggaccucuccgacgagaugaaccgcauccaggaggccaucaagaagcugaacgagagcuacaucaaccugaaggagaucgggacguacgagauguacgucaaguggccgugguacguguggcuccugaucggccuggcgggcguggccgucugcgugcuccuguucuucaucugcugcugcaccgggugcggcuccugcugcuucaagaagugcgggaacugcugcgacgaguacggcgggcaccaggacagcaucgugauccacaacaucuccagccacgaggacuga

SEQ ID NO: 14993 - RNA, 4086 nt, Artificial Sequence
  MHV/S__BAK18575.1 spike protein CDS gc (1-1361)(A1073P_L1074P)
augcugagcguguucauccucuuccugcccuccugccugggcuacaucggggacuuccgcugcaucaaccucgucaacaccgacaccagcaacgccuccgccccgagcguguccacggagguggucgacgugagcaagggcaucgggaccuacuacgugcuggaccgggucuaccugaacgcgacccuccugcugaccggcuacuaccccguggacggguccaacuaccgcaaccucgcccugacgggcaccaacacccugagccucaacugguacaagccgcccuuccuguccgaguucaacgacggcaucuucgccaaggugaagaaccugaaggccagccuccccaaggacuccaccagcuacuuccccacgaucgucaucggguccaacuucgugaccaccagcuacaccgugguccuggagcccuacaacggcaucaucauggccuccaucugccaguacacgaucugccugcuccccuacaccgacugcaagccgaacaccgggggcaacaagcugaucggguucuggcacaucgaccucaagagccccgugugcauccucaagcggaacuucaccuucaacgugaacgcggacuggcuguacuuccacuucuaccagcagggcggcacguucuacgccuacuacgccgacgccggguccgcgaccaccuuccuguucagcuccuacaucggcgacguccucacccaguacuucgugcugcccuucgugugcacgcccaccaccaccggggucuucagcccgcaguacugggugacgccccuggugaagcgccaguaccucuucaacuucaaccagaagggcaccaucaccagcgccgucgacugcgccuccagcuacaccuccgagaucaagugcaagacgcagagcaugaaccccaacaccggcguguacgaccuguccggguacaccgugcagcccgucggccugguguaccggcgcguccggaaccucccggacugccgcaucgaggacuggcuggccgccaagaccgugcccagcccccugaacugggagcggaagacguuccagaacugcaacuucaaccucuccagccugcugcgccucgugcaggcggggucccugagcugcuccaacaucgacgccgccaaggucuacggcaugugcuucgggagcauguccaucgacaaguucgccauccccaacagccggcgcguggaccugcagcucggcaacuccggcuuccugcagagcuucaacuacaagaucgacacccgggccaccuccugccagcuguacuacagccucgcgcaguccaacgugaccgucaacaaccacaacccgagcagcuggaaccgccgguacggguucaacgacguggccacguucggccgcgggaagcacgacguggccuacgccgaggccugcuucaccgucggcgcguccuacugccccugcgccaaccccagcaucgugucccccugcaccaccgggaagccgaaguucgccaacugccccaccggcacgaccaaccgggagugcaacgugcuggcccugggcagcaaccucuucaagugcgacugcacgugcaaccccagcccccugaccaccuacgaccugcgcugccugcaggggcgguccaugcucggcgucggggaccacugcgagggccugggggugcuggaggacaagugcggcggcuccaacacgugcaacugcagcgccgacgcguucguggggugggccaaggacuccugccucagcaacggccgcugccacaucuucuccaaccugaugcugaacgggaucaacagcggcacgaccugcuccaccgaccuccagcugccgaacaccgaggucgugaccggcaucugcgugaaguacgaccuguacgggaucaccggccagggggucuucaaggaggugaaggccgacuacuacaacagcuggcagaaccuccuguacgacgugaacggcaaccugaacggguuccgggacaucgucaccaacaagaccuaccucacccgcuccugcuacagcggccgcguguccgccgcguaccaccaggacgcccccgagcccgcccugcuguaccggaaccucaagugcgacuacguguucaacaacaacaucuuccgcgaggagaccccgcugaacuacuucgacagcuaccugggcugcgucgugaacgccgacaacagcacggagcaggccguggacgcgugcgaccuccggaugggguccggccugugcgucaacuacagcaccgcccaccgcgcccggaccuccgugagcaccggguacaagcugacgaccuucgagcccuucaccguguccaucgucaacgacagcguggaguccgugggcgggcucuacgagaugcagauccccaccaacuucacgaucgccagccaccaggaguucauccagacccgcgcccccaaggucaccaucgacugcgcggccuucgugugcggcgacuacaccacgugccggcagcagcugguggaguacggcuccuucugcgacaacaucaacgccauccugggggaggucaacaaccucaucgacaccaugcagcuccagguggccagcgcccugauccagggcgugacccucuccagccgccuggcggacgggaucuccggccagaucgacgacaucaacuucagcccgcugcucgggugccugggcucccagugcagcgagggcaccauggccgcccaggggcgguccacggucgaggaccugcuguucgacaaggugaagcugagcgacgugggcuucgucgaggccuacaacaacugcaccgggggccaggaggugcgcgaccugcucugcgugcaguccuucaacgggaucaagguccugccgcccgugcugagcgagaaccaggugagcggcuacaccgcgggcgccaccgccuccagcauguucccgcccugguccgccgccgcggggguccccuucagccucuccgugcaguaccggaucaacggccugggggugacgaugaacguccugagcgagaaccagaagaugaucgccuccgccuucaacaacgccaucggcgccauccaggagggcuucgacgcgaccaacagcgcccucgccaagauccaguccguggucaacgccaacgccgaggcgcugaacaaccugcucaaccagcugagcaaccgcuucggggccaucuccgccagccugcaggagauccucucccggcuggacccgcccgaggcccaggcgcagaucgaccgccugaucaacggccggcucaccgcccugaacgccuacgugagcaagcagcuguccgacaugacccucaucaaggugagcgccgcccaggcgaucgagaaggucaacgagugcgugaagucccagagcccccgcaucaacuucugcgggaacggcaaccacauccugucccuggugcagaacgcccccuacgggcucuacuuccugcacuucagcuacguccccaccagcuucacgaccgccaacgugucccccggccugugcaucagcggcgaccgggggcucgcccccaaggccggcuacuucgugcaggacgacggggaguggaaguucaccggcuccaacuacuacuaccccgagcccaucaccgacaagaacagcgucgugauguccagcugcgcggugaacuacacgaaggcccccgaggucuuccugaacaccuccaucagcaaccugccggacuucaaggaggagcucgacaagugguucaagaaccagaccuccguggcccccgaccugagccuggacuucgagaagcucaacgugaccuuccuggaccuguccgacgagaugaaccgcauccaggaggccaucaagaagcucaacgagagcuacaucaaccugaaggagaucgggacguacgagauguacgucaaguggcccugguacguguggcugcucaucggccuggccggcguggcggucugcgugcugcuguucuucaucugcugcugcaccgggugcggcuccugcugcuucaagaagugcgggaacugcugcgacgaguacggcgggcaccaggacagcaucgugauccacaacaucuccagccacgaggacuga

SEQ ID NO: 14994 - RNA, 3894 nt, Artificial Sequence
  MHV/S__BAK18575.1 spike protein CDS gc (variant)
augcugagcguguucauccucuuccugcccuccugccugggcuacaucggggacuuccgcugcaucaaccucgucaacaccgacaccagcaacgccuccgccccgagcguguccacggagguggucgacgugagcaagggcaucgggaccuacuacgugcuggaccgggucuaccugaacgcgacccuccugcugaccggcuacuaccccguggacggguccaacuaccgcaaccucgcccugacgggcaccaacacccugagccucaacugguacaagccgcccuuccuguccgaguucaacgacggcaucuucgccaaggugaagaaccugaaggccagccuccccaaggacuccaccagcuacuuccccacgaucgucaucggguccaacuucgugaccaccagcuacaccgugguccuggagcccuacaacggcaucaucauggccuccaucugccaguacacgaucugccugcuccccuacaccgacugcaagccgaacaccgggggcaacaagcugaucggguucuggcacaucgaccugaagucccccgugugcauccucaagcggaacuucaccuucaacgugaacgcggacuggcuguacuuccacuucuaccagcagggcggcacguucuacgccuacuacgccgacgccggguccgcgaccaccuuccuguucagcuccuacaucggcgacguccucacccaguacuucgugcugcccuucgugugcacgcccaccaccaccggggucuucagcccgcaguacugggugacgccccuggugaagcgccaguaccucuucaacuucaaccagaagggcaccaucaccagcgccgucgacugcgccuccagcuacaccuccgagaucaagugcaagacgcagagcaugaaccccaacaccggcguguacgaccuguccggguacaccgugcagcccgucggccugguguaccggcgcguccggaaccucccggacugccgcaucgaggacuggcuggccgccaagaccgugcccagcccccugaacugggagcggaagacguuccagaacugcaacuucaaccucuccagccugcugcgccucgugcaggcggggucccugagcugcuccaacaucgacgccgccaaggucuacggcaugugcuucgggagcauguccaucgacaaguucgccauccccaacagccggcgcguggaccugcagcucggcaacuccggcuuccugcagagcuucaacuacaagaucgacacccgggccaccuccugccagcuguacuacagccucgcgcaguccaacgugaccgucaacaaccacaacccgagcagcuggaaccgccgguacggguucaacgacguggccacguucggccgcgggaagcacgacguggccuacgccgaggccugcuucaccgucggcgcguccuacugccccugcgccaaccccagcaucgugucccccugcaccaccgggaagccgaaguucgccaacugccccaccggcacgaccaaccgggagugcaacgugcuggcccugggcagcaaccucuucaagugcgacugcacgugcaaccccagcccccugaccaccuacgaccugcgcugccugcaggggcggagcaugcucggcgucggggaccacugcgagggccugggggugcuggaggacaagugcggcggcuccaacacgugcaacugcagcgccgacgcguucguggggugggccaaggacuccugccucagcaacggccgcugccacaucuucuccaaccugaugcugaacgggaucaacagcggcacgaccugcuccaccgaccuccagcugccgaacaccgaggucgugaccggcaucugcgugaaguacgaccuguacgggaucaccggccagggggucuucaaggaggugaaggccgacuacuacaacagcuggcagaaccuccuguacgacgugaacggcaaccugaacggguuccgggacaucgucaccaacaagaccuaccucacccgcuccugcuacagcggccgcguguccgccgcguaccaccaggacgcccccgagcccgcccugcuguaccggaaccucaagugcgacuacguguucaacaacaacaucuuccgcgaggagaccccgcugaacuacuucgacagcuaccugggcugcgucgugaacgccgacaacagcacggagcaggccguggacgcgugcgaccuccggaugggguccggccugugcgucaacuacagcaccgcccaccgcgcccggaccuccgugagcaccggguacaagcugacgaccuucgagcccuucaccguguccaucgucaacgacagcguggaguccgugggcgggcucuacgagaugcagauccccaccaacuucacgaucgccagccaccaggaguucauccagacccgcgcccccaaggucaccaucgacugcgcggccuucgugugcggcgacuacaccacgugccggcagcagcugguggaguacggcuccuucugcgacaacaucaacgccauccugggggaggucaacaaccucaucgacaccaugcagcuccagguggccagcgcccugauccagggcgugacccucuccagccgccuggcggacgggaucuccggccagaucgacgacaucaacuucagcccgcugcucgggugccugggcucccagugcagcgagggcaccauggccgcccaggggcgguccacggucgaggaccugcuguucgacaaggugaagcugagcgacgugggcuucgucgaggccuacaacaacugcaccgggggccaggaggugcgcgaccugcucugcgugcaguccuucaacgggaucaagguccugccgcccgugcugagcgagaaccaggugagcggcuacaccgcgggcgccaccgccuccagcauguucccgcccugguccgccgccgcggggguccccuucagccucuccgugcaguaccggaucaacggccugggggugacgaugaacguccugagcgagaaccagaagaugaucgccuccgccuucaacaacgccaucggcgccauccaggagggcuucgacgcgaccaacagcgcccucgccaagauccaguccguggucaacgccaacgccgaggcgcugaacaaccugcucaaccagcugagcaaccgcuucggggccaucuccgccagccugcaggagauccucucccggcuggacccgcccgaggcccaggcgcagaucgaccgccugaucaacggccggcucaccgcccugaacgccuacgugagcaagcagcuguccgacaugacccucaucaaggugagcgccgcccaggcgaucgagaaggucaacgagugcgugaagucccagagcccccgcaucaacuucugcgggaacggcaaccacauccugucccuggugcagaacgcccccuacgggcucuacuuccugcacuucagcuacguccccaccagcuucacgaccgccaacgugucccccggccugugcaucagcggcgaccgggggcucgcccccaaggccggcuacuucgugcaggacgacggggaguggaaguucaccggcuccaacuacuacuaccccgagcccaucaccgacaagaacagcgucgugauguccagcugcgcggugaacuacacgaaggcccccgaggucuuccugaacaccuccaucagcaaccugccggacuucaaggaggagcucgacaagugguucaagaaccagaccuccguggcccccgaccugagccuggacuucgagaagcucaacgugaccuuccuggaccuguccgacgagaugaaccgcauccaggaggccaucaagaagcucaacgagagcuacaucaaccugaaggagaucgggacguacgagauguga

SEQ ID NO: 14995 - RNA, 3975 nt, Artificial Sequence
  MHV/S__BAK18575.1 spike protein CDS gc (variant)
augcugagcguguucauccucuuccugcccuccugccugggcuacaucggggacuuccgcugcaucaaccucgucaacaccgacaccagcaacgccuccgccccgagcguguccacggagguggucgacgugagcaagggcaucgggaccuacuacgugcuggaccgggucuaccugaacgcgacccuccugcugaccggcuacuaccccguggacggguccaacuaccgcaaccucgcccugacgggcaccaacacccugagccucaacugguacaagccgcccuuccuguccgaguucaacgacggcaucuucgccaaggugaagaaccugaaggccagccuccccaaggacuccaccagcuacuuccccacgaucgucaucggguccaacuucgugaccaccagcuacaccgugguccuggagcccuacaacggcaucaucauggccuccaucugccaguacacgaucugccugcuccccuacaccgacugcaagccgaacaccgggggcaacaagcugaucggguucuggcacaucgaccugaagucccccgugugcauccucaagcggaacuucaccuucaacgugaacgcggacuggcuguacuuccacuucuaccagcagggcggcacguucuacgccuacuacgccgacgccggguccgcgaccaccuuccuguucagcuccuacaucggcgacguccucacccaguacuucgugcugcccuucgugugcacgcccaccaccaccggggucuucagcccgcaguacugggugacgccccuggugaagcgccaguaccucuucaacuucaaccagaagggcaccaucaccagcgccgucgacugcgccuccagcuacaccuccgagaucaagugcaagacgcagagcaugaaccccaacaccggcguguacgaccuguccggguacaccgugcagcccgucggccugguguaccggcgcguccggaaccucccggacugccgcaucgaggacuggcuggccgccaagaccgugcccagcccccugaacugggagcggaagacguuccagaacugcaacuucaaccucuccagccugcugcgccucgugcaggcggggucccugagcugcuccaacaucgacgccgccaaggucuacggcaugugcuucgggagcauguccaucgacaaguucgccauccccaacagccggcgcguggaccugcagcucggcaacuccggcuuccugcagagcuucaacuacaagaucgacacccgggccaccuccugccagcuguacuacagccucgcgcaguccaacgugaccgucaacaaccacaacccgagcagcuggaaccgccgguacggguucaacgacguggccacguucggccgcgggaagcacgacguggccuacgccgaggccugcuucaccgucggcgcguccuacugccccugcgccaaccccagcaucgugucccccugcaccaccgggaagccgaaguucgccaacugccccaccggcacgaccaaccgggagugcaacgugcuggcccugggcagcaaccucuucaagugcgacugcacgugcaaccccagcccccugaccaccuacgaccugcgcugccugcaggggcggagcaugcucggcgucggggaccacugcgagggccugggggugcuggaggacaagugcggcggcuccaacacgugcaacugcagcgccgacgcguucguggggugggccaaggacuccugccucagcaacggccgcugccacaucuucuccaaccugaugcugaacgggaucaacagcggcacgaccugcuccaccgaccuccagcugccgaacaccgaggucgugaccggcaucugcgugaaguacgaccuguacgggaucaccggccagggggucuucaaggaggugaaggccgacuacuacaacagcuggcagaaccuccuguacgacgugaacggcaaccugaacggguuccgggacaucgucaccaacaagaccuaccucacccgcuccugcuacagcggccgcguguccgccgcguaccaccaggacgcccccgagcccgcccugcuguaccggaaccucaagugcgacuacguguucaacaacaacaucuuccgcgaggagaccccgcugaacuacuucgacagcuaccugggcugcgucgugaacgccgacaacagcacggagcaggccguggacgcgugcgaccuccggaugggguccggccugugcgucaacuacagcaccgcccaccgcgcccggaccuccgugagcaccggguacaagcugacgaccuucgagcccuucaccguguccaucgucaacgacagcguggaguccgugggcgggcucuacgagaugcagauccccaccaacuucacgaucgccagccaccaggaguucauccagacccgcgcccccaaggucaccaucgacugcgcggccuucgugugcggcgacuacaccacgugccggcagcagcugguggaguacggcuccuucugcgacaacaucaacgccauccugggggaggucaacaaccucaucgacaccaugcagcuccagguggccagcgcccugauccagggcgugacccucuccagccgccuggcggacgggaucuccggccagaucgacgacaucaacuucagcccgcugcucgggugccugggcucccagugcagcgagggcaccauggccgcccaggggcgguccacggucgaggaccugcuguucgacaaggugaagcugagcgacgugggcuucgucgaggccuacaacaacugcaccgggggccaggaggugcgcgaccugcucugcgugcaguccuucaacgggaucaagguccugccgcccgugcugagcgagaaccaggugagcggcuacaccgcgggcgccaccgccuccagcauguucccgcccugguccgccgccgcggggguccccuucagccucuccgugcaguaccggaucaacggccugggggugacgaugaacguccugagcgagaaccagaagaugaucgccuccgccuucaacaacgccaucggcgccauccaggagggcuucgacgcgaccaacagcgcccucgccaagauccaguccguggucaacgccaacgccgaggcgcugaacaaccugcucaaccagcugagcaaccgcuucggggccaucuccgccagccugcaggagauccucucccggcuggacccgcccgaggcccaggcgcagaucgaccgccugaucaacggccggcucaccgcccugaacgccuacgugagcaagcagcuguccgacaugacccucaucaaggugagcgccgcccaggcgaucgagaaggucaacgagugcgugaagucccagagcccccgcaucaacuucugcgggaacggcaaccacauccugucccuggugcagaacgcccccuacgggcucuacuuccugcacuucagcuacguccccaccagcuucacgaccgccaacgugucccccggccugugcaucagcggcgaccgggggcucgcccccaaggccggcuacuucgugcaggacgacggggaguggaaguucaccggcuccaacuacuacuaccccgagcccaucaccgacaagaacagcgucgugauguccagcugcgcggugaacuacacgaaggcccccgaggucuuccugaacaccuccaucagcaaccugccggacuucaaggaggagcucgacaagugguucaagaaccagaccuccguggcccccgaccugagccuggacuucgagaagcucaacgugaccuuccuggaccuguccgacgagaugaaccgcauccaggaggccaucaagaagcucaacgagagcuacaucaaccugaaggagaucgggacguacgagaugggcggcuacauccccgaggcgccccgggacgggcaggccuacguccgcaaggacggcgagugggugcugcucuccaccuucuga

SEQ ID NO: 14996 - RNA, 3768 nt, Artificial Sequence
  SARS-CoV__P59594.1 spike protein CDS human (1-1255)
auguucaucuuucugcucuuucuuacccugacaagcggcuccgacuuggauagaugcacuacguuugacgaugugcaggcccccaacuacacccaacacacaucuucaaugagaggggucuauuacccugacgagauuuuccggagugauacuuuauaucugacccaggaccuauuucucccauucuacagcaauguuacaggauuucauaccauaaaccacacuuucgguaauccggugauccccuuuaaggauggcauuuauuucgcugcaacagaaaaauccaacguagugcgcgggugggucuuuggaucuaccaugaauaacaagucgcagucagugaucauuaucaauaacagcacgaauguugugauacgagccuguaacuucgagcugugcgacaauccuuucuucgcggucaguaaaccaaugggcacucagacccauacaaugaucuucgauaacgcuuuuaauuguacuuucgaauacauuuccgacgccuuuucucuugaugugagcgagaaguccgguaacuucaaacaucugcgugaauuuguauucaagaauaaggacggguuuuuguauguuuacaaaggauaccaacccaucgauguggucagagaccucccuucaggcuucaacacccugaagccaauuuuuaaacugccccucggcaucaacauaacaaauuucagggcaauuuuaaccgccuuuaguccugcucaggacaucugggggacgagcgcagccgcuuauuucgugggauaccugaagccaacuacauuuaugcuuaaauaugaugagaacgguaccauuacugacgccguggauugcucucagaauccguuggcggagcugaaguguuccgucaagucauucgaaaucgacaaaggcaucuaccagacaagcaacuuccggguugugcccaguggggauguagugcgcuuuccuaauauuaccaaccuaugcccauucggagaggucuuuaaugcaacgaaguuccccucuguguaugccugggaaaggaaaaagauauccaacuguguugcugacuacagcgugcucuauaauucgaccuuuuucucuacauuuaaaugcuacggcgucuccgccacuaagcugaacgaucuuuguuucucaaauguguacgcagacaguuuuguaguuaaaggugaugacgugaggcaaaucgcuccugggcagaccggagucauugccgauuauaacuacaagcugccagacgacuucaugggcugcguguuggcguggaauacacggaacaucgaugccacuagcaccggcaauuauaacuacaaguaucgcuaccuccgacacgggaaacugagacccuuugagagggacauauccaacgucccguucucuccugauggaaagcccuguacacccccugcauuaaauugcuauuggccccugaacgacuacgguuuuuacaccacuacgggcauuggguaucagccauaccgggugguugugcucagcuucgagcuucugaaugcucccgccacaguaugcggaccuaaauugucaaccgaucuaaucaagaaccagugugucaauuucaacuuuaauggccugacugguaccggggugcucacaccaaguuccaaacguuuccaaccguuucagcaguucggccgcgacguuagcgauuuuaccgacucugugagagaucccaagacuucagaaauccuggacauuaguccuugcagcuucggaggcgucuccgugaucacaccagggacgaacgcuucuucggagguagccgugcuuuaucaagauguuaauuguaccgacgucagcacugcaauucacgccgaucagcugacacccgcuuggaggauauacuccaccggaaacaauguguuucagacacaggcggguugcuugaucggcgcagaacacguggacacuucauaugagugugacauuccuaucggggccggaaucugcgcuaguuaccauaccgucucucuccugcggagcacgucccaaaagucaauuguugccuauaccaugagcuuaggcgcagauucuuccauagccuacaguaacaauacaaucgcuauuccaacuaacuucagcaucucuauuaccacagaagugaugcccguguccauggccaaaacuucaguagacuguaauauguacaucugcggugauaguaccgagugugcaaaccugcuacuccaguaugggagcuuuugcacgcagcugaaccgagcgcuuucgggcauagcugccgagcaggaccgcaauacaagagaagucuucgcacaagugaagcagauguacaaaaccccgacuuugaaguauuuuggaggcuucaacuucucccagauccugccugauccacucaaacccacaaagaggucuuuuauugaggaccugcuuuucaauaagguuacccuggccgaugcuggguuuaugaaacaguacggagaauguuugggugacaucaacgcccgggaucucauuugcgcacaaaaguucaauggccugacuguguuaccuccccugcuaaccgacgauaugaucgcugccuauacagcggcccucgucagcgggacggcuaccgcaggauggacuuuuggcgccggugcugcccugcagauaccauucgcaaugcagauggcguaccgcuuuaacgggauuggcgugacacagaauguucuuuaugagaaccaaaaacagaucgccaaucaguucaacaaggcuauuucacaaauccaggaaaguuugaccacaacuuccaccgcccugggaaaacuccaggacgugguaaaucagaacgcacaagcucugaauacguuagucaagcagcugucuagcaacuuuggcgccauauccucagugcuuaaugauaucuugagcagacucgacaagguggaggcagagguccagauugacaggcugaucacagggcgucuacagagucugcaaaccuacguuacucagcagcucauucgggccgcugaaauccgagcgucugccaaccuggcagcuaccaaaauguccgagugcgugcuuggacagagcaagagaguagauuucuguggcaaagguuaccacuugaugucguuuccucaagccgccccacaugggguggucuuccugcacgugacauauguuccaucacaggaaaggaacuuuacuaccgcuccggcaauaugccacgagggaaaggccuacuucccucgcgaaggcguguucgucuuuaaugguacaucuugguucauuacgcagcggaacuuuuucaguccccaaaucaucaccacugacaauacauuuguguccggcaacugugauguugugauugggaucauuaauaacaccgucuaugacccauuacagcccgagcucgauagcuucaaagaggaacuggacaaguacuuuaaaaaucauacuucuccugauguagaccuuggagauauaagcggcaucaacgcguccgugguuaauauucagaaggagaucgacagacugaacgaaguggcuaagaauuugaacgagucacucauugaucugcaggagcuagggaaauaugaacaauacaucaaguggccaugguaugucuggcugggauucauagccggccucaucgcaauugugaugguaacaauccugcuuugcuguaugaccaguugcuguagcugcuugaaaggugccuguucuugcggguccuguugcaaguuugacgaggacgauucagaacccgugcugaaaggagucaaguuacacuacacguga

SEQ ID NO: 14997 - RNA, 3768 nt, Artificial Sequence
  SARS-CoV__P59594.1 spike protein CDS human (1-1255)(K968P_V969P)
auguucaucuuucugcuguuccuuacccugacaagcggcuccgacuuggauagaugcacuacguuugacgaugugcaggcccccaacuacacccaacacacaucuucaaugagaggggucuauuacccugacgagauuuuccggagugauacuuuauaucugacccaggaccuauuucucccauucuacagcaauguuacaggauuucauaccauaaaccacacuuucgguaauccggugauccccuuuaaggauggcauuuauuucgcugcaacagaaaaauccaacguagugcgcgggugggucuuuggaucuaccaugaauaacaagucgcagucagugaucauuaucaauaacagcacgaauguugugauacgagccuguaacuucgagcugugcgacaauccauuuuucgcggucaguaaaccaaugggcacucagacccauacaaugaucuucgauaacgcuuuuaauuguacuuucgaauacauuuccgacgccuuuucucuugaugugagcgagaaguccgguaacuucaaacaccuccgugaauuuguauucaagaauaaggacggguuuuuguauguuuacaaaggauaccaacccaucgauguggucagagaccucccuucaggcuucaacacccugaagccaauuuuuaaacugccccucggcaucaacauaacaaauuucagggcaauuuuaaccgccuuuaguccugcucaggacaucugggggacgagcgcagccgcuuauuucgugggauaccugaagccaacuacauuuaugcuuaaauaugaugagaacgguaccauuacugacgccguggauugcucucagaauccguuggcggagcugaaguguuccgucaagucauucgaaaucgacaaaggcaucuaccagacaagcaacuuccggguugugcccaguggggauguagugcgcuuuccuaauauuaccaaccuaugcccauucggagaggucuuuaaugcaacgaaguuccccucuguguaugccugggaaaggaaaaagauauccaacuguguugcugacuacagcgugcucuauaauucgaccuuuuucucuacauuuaaaugcuacggcgucuccgccacuaagcugaacgaucuuuguuucucaaauguguacgcagacaguuuuguaguuaaaggugaugacgugaggcaaaucgcuccugggcagaccggagucauugccgauuauaacuacaagcugccagacgacuucaugggcugcguguuggcguggaauacacggaacaucgaugccacuagcaccggcaauuauaacuacaaguaucgcuaccuccgacaugggaaacugagacccuuugagagggacauauccaacgucccguucucuccugauggaaagcccuguacaccuccugcauuaaauugcuauuggccccugaacgacuacgguuuuuacaccacuacgggcauuggguaucagccauaccgggugguugugcucagcuucgagcuucugaaugcucccgccacaguaugcggaccuaaauugucaaccgaucuaaucaagaaccagugugucaauuucaacuuuaauggccugacugguaccggggugcucacaccaaguuccaaacguuuccaaccguuucagcaguucggccgcgacguuagcgauuuuaccgacucugugagagaucccaagacuucagaaauccuggacauuaguccuugcagcuucggaggcgucuccgugaucacaccagggacgaacgcuucuucggagguagccgugcuuuaucaagauguuaauuguaccgacgucagcacugcaauucacgccgaucagcugacacccgcuuggaggauauacuccaccggaaacaauguguuucagacacaggcggguugcuugaucggcgcagaacacguggacacuucauaugagugugacauuccuaucggggccggaaucugcgcuaguuaccauaccgucucucuccugcggagcacgucccaaaagucaauuguugccuauaccaugagcuuaggcgcagauucuuccauagccuacaguaacaauacaaucgcuauuccaacuaacuucagcaucucuauuaccacagaagugaugcccguguccauggccaaaacuucaguagacuguaauauguacaucugcggugauaguaccgagugugcaaaccugcuacuccaguaugggagcuuuugcacgcagcugaaccgagcgcuuucgggcauagcugccgagcaggaccgcaauacaagagaagucuucgcacaagugaagcagauguacaaaaccccgacuuugaaguauuuuggaggcuucaacuucucccagauccugccugauccacucaaacccacaaagaggucuuuuauugaggaccugcuuuucaauaagguuacccuggccgaugcuggguuuaugaaacaguacggagaauguuugggugacaucaacgcccgggaucucauuugcgcacaaaaguucaauggccugacuguguuaccuccccugcuaaccgacgauaugaucgcugccuauacagcggcccucgucagcgggacggcuaccgcaggauggacuuuuggcgccggugcugcccugcagauaccauucgcaaugcagauggcguaccgcuuuaacgggauuggcgugacacagaauguucuuuaugagaaccaaaaacagaucgccaaucaguucaacaaggcuauuucacaaauccaggaaaguuugaccacaacuuccaccgcccugggaaaacuccaggacgugguaaaucagaacgcacaagcucugaauacguuagucaagcagcugucuagcaacuuuggcgccauauccucagugcuuaaugauaucuugagcagacucgacccucccgaggcagaggugcagauugacaggcugaucacagggcgucuacagagucugcaaaccuacgucacucagcagcucauucgggccgcugaaauccgagcgucugccaaccuggcagcuaccaagauguccgagugcguucuuggacagagcaaaagaguggauuucuguggcaaggguuaccacuugaugucguuuccacaagccgccccgcaugggguaguguuccugcacgucacauaugugccuucacaggaaaggaacuuuacuaccgcucccgcaauaugccacgagggaaaagccuacuucccacgcgaaggcguuuucguguuuaaugguacaucuugguucauuacgcagcggaacuuuuucaguccccaaaucaucaccacugacaauacauuugucuccggcaacugugaugugguuauugggaucauuaauaacaccguguaugacccuuuacagccagagcucgauagcuucaaggaggaacuggacaaauacuuuaagaaucauacuucucccgaugucgaccuuggagauauaagcggcaucaacgcguccguagugaauauucagaaagagaucgacagacugaacgaaguugcuaagaauuugaacgagucacucauugaucugcaggagcuagggaaguaugaacaauacaucaaauggccuugguauguguggcugggauucauagccggccucaucgcaauugucauggugacaauccugcuuugcuguaugaccaguugcuguagcugcuugaagggugccuguucuugcggguccuguugcaaauuugacgaggacgauucagaaccgguacugaagggagugaaauuacacuacacguga

SEQ ID NO: 14998 - RNA, 1581 nt, Artificial Sequence
  SARS-CoV__P59594.1 spike protein CDS human (1-17_747-1255)
auguucaucuuucugcucuuucuuacccugacaagcggcuccgacuuggauagagccuuaucugggauugcugcagagcaggacaggaacacucgggaaguguuugcccaagucaagcagauguacaaaacgcccacccugaaguauuucggagguuuuaauuucucacagauacuaccugauccacucaaaccgacaaagcgcaguuuuaucgaggaccugcuuuucaacaaaguuacucuggcggaugcuggcuuuaugaagcaguacggggaaugcuugggagacauuaaugcccgagaucucaucugugcacaaaaguucaacggccugaccgugcugcccccucucuuaacagacgauaugauugccgcuuauaccgcagcccugguaagcgguacugcuacagccggguggaccuuuggagcgggcgcagcccuucagaucccauucgcuaugcagauggccuaccguuuuaauggcauaggggugacgcagaacgucuuguaugagaaucaaaaacagaucgcaaaccaguucaauaaggcuauuucccagauccaagaaucucugacuaccacaucgacugcccuaggaaaacuccaggacgugguuaaccagaaugcgcaagcccugaacacccuugugaagcagcugucaagcaauuucggugcaauuaguuccgucuugaacgauauccucucuagacuggacaaaguggaggcugagguacagauagauagguuaauuacaggccggcugcagagccuccaaaccuacguuacgcagcagcuuauccgcgccgcugaaauuagagccuccgcaaaucuggccgcuacuaagaugucagagugcguguuggggcagaguaagagggucgacuuuuguggaaaaggcuaucaccuaaugagcuucccccaagcggcaccucauggugugguguuucugcacgucacauacguuccaucucaggaacggaacuucaccacugcccccgcuaucugccaugaggggaaggccuacuuuccucgcgagggaguguucguauuuaacggcacauccugguucaucacccagcgaaauuucuucucaccacagauuauaacgaccgacaacacauuugugagcggcaauugugaugucgugaucgggauuaucaacaauacuguuuaugacccgcuccaacccgaacuggauaguuucaaagaggaacuugacaaguacuuuaaaaaccacaccucuccugauguggaccugggagauauauccgguauuaaugcaagcgucgugaacauccagaaggagaucgacagauugaaugaaguagccaaaaaccucaaugagucgcugauugauuuacaggagcugggcaaguaugaacaguacaucaaguggccaugguauguuuggcuaggguucauugcuggacucauagccaucgugauggucacaauucugcuuugcuguaugacuucuugcuguuccugcuugaaaggcgcauguucaugcgguaguugcuguaaguucgacgaggaugacagcgaacccgugcugaaaggggucaagcuccauuacaccuga

SEQ ID NO: 14999 - RNA, 3768 nt, Artificial Sequence
  SARS-CoV/Tor2__NP_828851.1 spike protein CDS human (1-1255)
auguucaucuuucugcuguuccuuacccugacaagcggcuccgacuuggauagaugcacuacguuugacgaugugcaggcccccaacuacacccaacacacaucuucaaugagaggggucuauuacccugacgagauuuuccggagugauacuuuauaucugacccaggaccuauuucucccauucuacagcaauguuacaggauuucauaccauaaaccacacuuucgguaauccggugauccccuuuaaggauggcauuuauuucgcugcaacagaaaaauccaacguagugcgcgggugggucuuuggaucuaccaugaauaacaagucgcagucagugaucauuaucaauaacagcacgaauguugugauacgagccuguaacuucgagcugugcgacaauccauuuuucgcggucaguaaaccaaugggcacucagacccauacaaugaucuucgauaacgcuuuuaauuguacuuucgaauacauuuccgacgccuuuucucuugaugugagcgagaaguccgguaacuucaaacaccuccgugaauuuguauucaagaauaaggacggguuuuuguauguuuacaaaggauaccaacccaucgauguggucagagaccucccuucaggcuucaacacccugaagccaauuuuuaaacugccccucggcaucaacauaacaaauuucagggcaauuuuaaccgccuuuaguccugcucaggacaucugggggacgagcgcagccgcuuauuucgugggauaccugaagccaacuacauuuaugcuuaaauaugaugagaacgguaccauuacugacgccguggauugcucucagaauccguuggcggagcugaaguguuccgucaagucauucgaaaucgacaaaggcaucuaccagacaagcaacuuccggguugugcccaguggggauguagugcgcuuuccuaauauuaccaaccuaugcccauucggagaggucuuuaaugcaacgaaguuccccucuguguaugccugggaaaggaaaaagauauccaacuguguugcugacuacagcgugcucuauaauucgaccuuuuucucuacauuuaaaugcuacggcgucuccgccacuaagcugaacgaucuuuguuucucaaauguguacgcagacaguuuuguaguuaaaggugaugacgugaggcaaaucgcuccugggcagaccggagucauugccgauuauaacuacaagcugccagacgacuucaugggcugcguguuggcguggaauacacggaacaucgaugccacuagcaccggcaauuauaacuacaaguaucgcuaccuccgacaugggaaacugagacccuuugagagggacauauccaacgucccguucucuccugauggaaagcccuguacaccuccugcauuaaauugcuauuggccccugaacgacuacgguuuuuacaccacuacgggcauuggguaucagccauaccgggugguugugcucagcuucgagcuucugaaugcucccgccacaguaugcggaccuaaauugucaaccgaucuaaucaagaaccagugugucaauuucaacuuuaauggccugacugguaccggggugcucacaccaaguuccaaacguuuccaaccguuucagcaguucggccgcgacguuagcgauuuuaccgacucugugagagaucccaagacuucagaaauccuggacauuaguccuugcgcuuucggaggcgucagcgugaucacaccagggacgaacgccuccucugagguagcagugcuuuaucaagauguuaauuguaccgacgucucgacugccauucacgcugaucagcugacacccgcguggaggauauacagcaccggaaacaauguguuucagacacaggcagguugcuugaucggcgccgaacacguggacacuuccuaugagugugacauuccuaucggggcuggaaucugcgccucauaccauaccgucagucuccugcggucuacgagccaaaaguccauuguugcauauaccaugucauuaggcgccgauagcucuauagcuuacuccaacaauacaaucgccauuccaacuaacuucaguaucagcauuaccacagaagugaugcccgugucuauggcaaaaacuuccguagacuguaauauguacaucugcggugauucaaccgagugugcgaaccugcuacuccaguaugggaguuuuugcacgcagcugaaccgagcucuuagcggcauagccgcagagcaggaccgcaauacaagagaagucuucgcccaagugaagcagauguacaaaaccccgacuuugaaguauuuuggaggcuucaacuucucgcagauccugccugauccacucaaacccacaaagagguccuuuauugaggaccugcuuuucaauaagguuacccuggcugaugccggguuuaugaaacaguacggagaauguuugggugacaucaacgcacgggaucucauuugcgcucaaaaguucaauggccugacuguguuaccuccccugcuaaccgacgauaugaucgccgcguauacagccgcucucgucucugggacggcaaccgccggauggacuuuuggcgcuggugccgcacugcagauaccauucgcgaugcagauggccuaccgcuuuaacgggauuggcgugacacagaauguucuuuaugagaaccaaaaacagaucgcuaaucaguucaacaaggccauuagccaaauccaggaaucauugaccacaaccaguacugcacugggaaaacuccaggacgugguaaaucagaacgcucaagcccugaauacguuagucaagcagcuguccucuaacuuuggcgcaauaagcuccgugcuuaaugauaucuugucaagacucgacaagguggaggccgagguccagauugacaggcugaucacagggcgucuacagagccugcaaaccuacguuacucagcagcucauucgggcugcggaaauccgagccagugcaaaccuggcugccaccaaaaugucugagugcgugcuuggacaguccaagagaguagauuucuguggcaaagguuaccacuugaugagcuuuccucaagccgcuccccaugggguggucuuccugcacgugacauauguuccaucgcaggaaaggaacuuuacuaccgcaccggccauaugccacgagggaaaggcguacuucccucgcgaaggcguguucgucuuuaaugguacaucaugguucauuacgcagcggaacuuuuucucuccccaaaucaucaccacugacaauacauuugugaguggcaacugugauguugugauugggaucauuaauaacaccgucuaugacccauuacagcccgagcucgauuccuucaaagaggaacuggacaaguacuuuaaaaaucauacuagcccugauguagaccuuggagauauaucuggcaucaacgcuagcgugguuaauauucagaaggagaucgacagacugaacgaaguggccaagaauuugaacgagucccucauugaucugcaggagcuagggaaauaugaacaauacaucaaguggccaugguaugucuggcugggauucauagcaggccucaucgccauugugaugguaacaauccugcuuugcuguaugaccucaugcuguaguugcuugaaaggugcuuguagcugcgggucuuguugcaaguuugacgaggacgauuccgaacccgugcugaaaggagucaaguuacacuacacguga

SEQ ID NO: 15000 - RNA, 3768 nt, Artificial Sequence
  SARS-CoV/Tor2__NP_828851.1 spike protein CDS human (1-1255)(K968P_V969P)
auguucaucuuucugcuguuccuuacccugacaagcggcuccgacuuggauagaugcacuacguuugacgaugugcaggcccccaacuacacccaacacacaucuucaaugagaggggucuauuacccugacgagauuuuccggagugauacuuuauaucugacccaggaccuauuucucccauucuacagcaauguuacaggauuucauaccauaaaccacacuuucgguaauccggugauccccuuuaaggauggcauuuauuucgcugcaacagaaaaauccaacguagugcgcgggugggucuuuggaucuaccaugaauaacaagucgcagucagugaucauuaucaauaacagcacgaauguugugauacgagccuguaacuucgagcugugcgacaauccauuuuucgcggucaguaaaccaaugggcacucagacccauacaaugaucuucgauaacgcuuuuaauuguacuuucgaauacauuuccgacgccuuuucucuugaugugagcgagaaguccgguaacuucaaacaccuccgugaauuuguauucaagaauaaggacggguuuuuguauguuuacaaaggauaccaacccaucgauguggucagagaccucccuucaggcuucaacacccugaagccaauuuuuaaacugccccucggcaucaacauaacaaauuucagggcaauuuuaaccgccuuuaguccugcucaggacaucugggggacgagcgcagccgcuuauuucgugggauaccugaagccaacuacauuuaugcuuaaauaugaugagaacgguaccauuacugacgccguggauugcucucagaauccguuggcggagcugaaguguuccgucaagucauucgaaaucgacaaaggcaucuaccagacaagcaacuuccggguugugcccaguggggauguagugcgcuuuccuaauauuaccaaccuaugcccauucggagaggucuuuaaugcaacgaaguuccccucuguguaugccugggaaaggaaaaagauauccaacuguguugcugacuacagcgugcucuauaauucgaccuuuuucucuacauuuaaaugcuacggcgucuccgccacuaagcugaacgaucuuuguuucucaaauguguacgcagacaguuuuguaguuaaaggugaugacgugaggcaaaucgcuccugggcagaccggagucauugccgauuauaacuacaagcugccagacgacuucaugggcugcguguuggcguggaauacacggaacaucgaugccacuagcaccggcaauuauaacuacaaguaucgcuaccuccgacaugggaaacugagacccuuugagagggacauauccaacgucccguucucuccugauggaaagcccuguacaccuccugcauuaaauugcuauuggccccugaacgacuacgguuuuuacaccacuacgggcauuggguaucagccauaccgggugguugugcucagcuucgagcuucugaaugcucccgccacaguaugcggaccuaaauugucaaccgaucuaaucaagaaccagugugucaauuucaacuuuaauggccugacugguaccggggugcucacaccaaguuccaaacguuuccaaccguuucagcaguucggccgcgacguuagcgauuuuaccgacucugugagagaucccaagacuucagaaauccuggacauuaguccuugcgcuuucggaggcgucagcgugaucacaccagggacgaacgccuccucugagguagcagugcuuuaucaagauguuaauuguaccgacgucucgacugccauucacgcugaucagcugacacccgcguggaggauauacagcaccggaaacaauguguuucagacacaggcagguugcuugaucggcgccgaacacguggacacuuccuaugagugugacauuccuaucggggcuggaaucugcgccucauaccauaccgucagucuccugcggucuacgagccaaaaguccauuguugcauauaccaugucauuaggcgccgauagcucuauagcuuacuccaacaauacaaucgccauuccaacuaacuucaguaucagcauuaccacagaagugaugcccgugucuauggcaaaaacuuccguagacuguaauauguacaucugcggugauucaaccgagugugcgaaccugcuacuccaguaugggaguuuuugcacgcagcugaaccgagcucuuagcggcauagccgcagagcaggaccgcaauacaagagaagucuucgcccaagugaagcagauguacaaaaccccgacuuugaaguauuuuggaggcuucaacuucucgcagauccugccugauccacucaaacccacaaagagguccuuuauugaggaccugcuuuucaauaagguuacccuggcugaugccggguuuaugaaacaguacggagaauguuugggugacaucaacgcacgggaucucauuugcgcucaaaaguucaauggccugacuguguuaccuccccugcuaaccgacgauaugaucgccgcguauacagccgcucucgucucugggacggcaaccgccggauggacuuuuggcgcuggugccgcacugcagauaccauucgcgaugcagauggccuaccgcuuuaacgggauuggcgugacacagaauguucuuuaugagaaccaaaaacagaucgcuaaucaguucaacaaggccauuagccaaauccaggaaucauugaccacaaccaguacugcacugggaaaacuccaggacgugguaaaucagaacgcucaagcccugaauacguuagucaagcagcuguccucuaacuuuggcgcaauaagcuccgugcuuaaugauaucuugucaagacucgacccucccgaggccgaggugcagauugacaggcugaucacagggcgucuacagagccugcaaaccuacgucacucagcagcucauucgggcugcggaaauccgagccagugcaaaccuggcugccaccaagaugucugagugcguucuuggacaguccaaaagaguggauuucuguggcaaggguuaccacuugaugagcuuuccacaagccgcuccgcaugggguaguguuccugcacgucacauaugugccuucgcaggaaaggaacuuuacuaccgcacccgccauaugccacgagggaaaagcguacuucccacgcgaaggcguuuucguguuuaaugguacaucaugguucauuacgcagcggaacuuuuucucuccccaaaucaucaccacugacaauacauuugucaguggcaacugugaugugguuauugggaucauuaauaacaccguguaugacccuuuacagccagagcucgauuccuucaaggaggaacuggacaaauacuuuaagaaucauacuagccccgaugucgaccuuggagauauaucuggcaucaacgcuagcguagugaauauucagaaagagaucgacagacugaacgaaguugccaagaauuugaacgagucccucauugaucugcaggagcuagggaaguaugaacaauacaucaaauggccuugguauguguggcugggauucauagcaggccucaucgccauugucauggugacaauccugcuuugcuguaugaccucaugcuguaguugcuugaagggugcuuguagcugcgggucuuguugcaaauuugacgaggacgauuccgaaccgguacugaagggagugaaauuacacuacacguga

SEQ ID NO: 15001 - RNA, 3573 nt, Artificial Sequence
  SARS-CoV/Tor2__NP_828851.1 spike protein CDS human (variant)
auguucaucuuucugcuguuccuuacccugacaagcggcuccgacuuggauagaugcacuacguuugacgaugugcaggcccccaacuacacccaacacacaucuucaaugagaggggucuauuacccugacgagauuuuccggagugauacuuuauaucugacccaggaccuauuucucccauucuacagcaauguuacaggauuucauaccauaaaccacacuuucgguaauccggugauccccuuuaaggauggcauuuauuucgcugcaacagaaaaauccaacguagugcgcgggugggucuuuggaucuaccaugaauaacaagucgcagucagugaucauuaucaauaacagcacgaauguugugauacgagccuguaacuucgagcugugcgacaauccauuuuucgcggucaguaaaccaaugggcacucagacccauacaaugaucuucgauaacgcuuuuaauuguacuuucgaauacauuuccgacgccuuuucucuugaugugagcgagaaguccgguaacuucaaacaccuccgugaauuuguauucaagaauaaggacggguuuuuguauguuuacaaaggauaccaacccaucgauguggucagagaccucccuucaggcuucaacacccugaagccaauuuuuaaacugccccucggcaucaacauaacaaauuucagggcaauuuuaaccgccuuuaguccugcucaggacaucugggggacgagcgcagccgcuuauuucgugggauaccugaagccaacuacauuuaugcuuaaauaugaugagaacgguaccauuacugacgccguggauugcucucagaauccguuggcggagcugaaguguuccgucaagucauucgaaaucgacaaaggcaucuaccagacaagcaacuuccggguugugcccaguggggauguagugcgcuuuccuaauauuaccaaccuaugcccauucggagaggucuuuaaugcaacgaaguuccccucuguguaugccugggaaaggaaaaagauauccaacuguguugcugacuacagcgugcucuauaauucgaccuuuuucucuacauuuaaaugcuacggcgucuccgccacuaagcugaacgaucuuuguuucucaaauguguacgcagacaguuuuguaguuaaaggugaugacgugaggcaaaucgcuccugggcagaccggagucauugccgauuauaacuacaagcugccagacgacuucaugggcugcguguuggcguggaauacacggaacaucgaugccacuagcaccggcaauuauaacuacaaguaucgcuaccuccgacaugggaaacugagacccuuugagagggacauauccaacgucccguucucuccugauggaaagcccuguacaccuccugcauuaaauugcuauuggccccugaacgacuacgguuuuuacaccacuacgggcauuggguaucagccauaccgggugguugugcucagcuucgagcuucugaaugcucccgccacaguaugcggaccuaaauugucaaccgaucuaaucaagaaccagugugucaauuucaacuuuaauggccugacugguaccggggugcucacaccaaguuccaaacguuuccaaccguuucagcaguucggccgcgacguuagcgauuuuaccgacucugugagagaucccaagacuucagaaauccuggacauuaguccuugcgcuuucggaggcgucagcgugaucacaccagggacgaacgccuccucugagguagcagugcuuuaucaagauguuaauuguaccgacgucucgacugccauucacgcugaucagcugacacccgcguggaggauauacagcaccggaaacaauguguuucagacacaggcagguugcuugaucggcgccgaacacguggacacuuccuaugagugugacauuccuaucggggcuggaaucugcgccucauaccauaccgucagucuccugcggucuacgagccaaaaguccauuguugcauauaccaugucauuaggcgccgauagcucuauagcuuacuccaacaauacaaucgccauuccaacuaacuucaguaucagcauuaccacagaagugaugcccgugucuauggcaaaaacuuccguagacuguaauauguacaucugcggugauucaaccgagugugcgaaccugcuacuccaguaugggaguuuuugcacgcagcugaaccgagcucuuagcggcauagccgcagagcaggaccgcaauacaagagaagucuucgcccaagugaagcagauguacaaaaccccgacuuugaaguauuuuggaggcuucaacuucucgcagauccugccugauccacucaaacccacaaagagguccuuuauugaggaccugcuuuucaauaagguuacccuggcugaugccggguuuaugaaacaguacggagaauguuugggugacaucaacgcacgggaucucauuugcgcucaaaaguucaauggccugacuguguuaccuccccugcuaaccgacgauaugaucgccgcguauacagccgcucucgucucugggacggcaaccgccggauggacuuuuggcgcuggugccgcacugcagauaccauucgcgaugcagauggccuaccgcuuuaacgggauuggcgugacacagaauguucuuuaugagaaccaaaaacagaucgcuaaucaguucaacaaggccauuagccaaauccaggaaucauugaccacaaccaguacugcacugggaaaacuccaggacgugguaaaucagaacgcucaagcccugaauacguuagucaagcagcuguccucuaacuuuggcgcaauaagcuccgugcuuaaugauaucuugucaagacucgacccucccgaggccgaggugcagauugacaggcugaucacagggcgucuacagagccugcaaaccuacgucacucagcagcucauucgggcugcggaaauccgagccagugcaaaccuggcugccaccaagaugucugagugcguucuuggacaguccaaaagaguggauuucuguggcaaggguuaccacuugaugagcuuuccacaagccgcuccgcaugggguaguguuccugcacgucacauaugugccuucgcaggaaaggaacuuuacuaccgcacccgccauaugccacgagggaaaagcguacuucccacgcgaaggcguuuucguguuuaaugguacaucaugguucauuacgcagcggaacuuuuucucuccccaaaucaucaccacugacaauacauuugucaguggcaacugugaugugguuauugggaucauuaauaacaccguguaugacccuuuacagccagagcucgauuccuucaaggaggaacuggacaaauacuuuaagaaucauacuagccccgaugucgaccuuggagauauaucuggcaucaacgcuagcguagugaauauucagaaagagaucgacagacugaacgaaguugccaagaauuugaacgagucccucauugaucugcaggagcuagggaaguaugaacaauga

SEQ ID NO: 15002 - RNA, 3654 nt, Artificial Sequence
  SARS-CoV/Tor2__NP_828851.1 spike protein CDS human (variant)
auguucaucuuucugcuguuccuuacccugacaagcggcuccgacuuggauagaugcacuacguuugacgaugugcaggcccccaacuacacccaacacacaucuucaaugagaggggucuauuacccugacgagauuuuccggagugauacuuuauaucugacccaggaccuauuucucccauucuacagcaauguuacaggauuucauaccauaaaccacacuuucgguaauccggugauccccuuuaaggauggcauuuauuucgcugcaacagaaaaauccaacguagugcgcgggugggucuuuggaucuaccaugaauaacaagucgcagucagugaucauuaucaauaacagcacgaauguugugauacgagccuguaacuucgagcugugcgacaauccauuuuucgcggucaguaaaccaaugggcacucagacccauacaaugaucuucgauaacgcuuuuaauuguacuuucgaauacauuuccgacgccuuuucucuugaugugagcgagaaguccgguaacuucaaacaccuccgugaauuuguauucaagaauaaggacggguuuuuguauguuuacaaaggauaccaacccaucgauguggucagagaccucccuucaggcuucaacacccugaagccaauuuuuaaacugccccucggcaucaacauaacaaauuucagggcaauuuuaaccgccuuuaguccugcucaggacaucugggggacgagcgcagccgcuuauuucgugggauaccugaagccaacuacauuuaugcuuaaauaugaugagaacgguaccauuacugacgccguggauugcucucagaauccguuggcggagcugaaguguuccgucaagucauucgaaaucgacaaaggcaucuaccagacaagcaacuuccggguugugcccaguggggauguagugcgcuuuccuaauauuaccaaccuaugcccauucggagaggucuuuaaugcaacgaaguuccccucuguguaugccugggaaaggaaaaagauauccaacuguguugcugacuacagcgugcucuauaauucgaccuuuuucucuacauuuaaaugcuacggcgucuccgccacuaagcugaacgaucuuuguuucucaaauguguacgcagacaguuuuguaguuaaaggugaugacgugaggcaaaucgcuccugggcagaccggagucauugccgauuauaacuacaagcugccagacgacuucaugggcugcguguuggcguggaauacacggaacaucgaugccacuagcaccggcaauuauaacuacaaguaucgcuaccuccgacaugggaaacugagacccuuugagagggacauauccaacgucccguucucuccugauggaaagcccuguacaccuccugcauuaaauugcuauuggccccugaacgacuacgguuuuuacaccacuacgggcauuggguaucagccauaccgggugguugugcucagcuucgagcuucugaaugcucccgccacaguaugcggaccuaaauugucaaccgaucuaaucaagaaccagugugucaauuucaacuuuaauggccugacugguaccggggugcucacaccaaguuccaaacguuuccaaccguuucagcaguucggccgcgacguuagcgauuuuaccgacucugugagagaucccaagacuucagaaauccuggacauuaguccuugcgcuuucggaggcgucagcgugaucacaccagggacgaacgccuccucugagguagcagugcuuuaucaagauguuaauuguaccgacgucucgacugccauucacgcugaucagcugacacccgcguggaggauauacagcaccggaaacaauguguuucagacacaggcagguugcuugaucggcgccgaacacguggacacuuccuaugagugugacauuccuaucggggcuggaaucugcgccucauaccauaccgucagucuccugcggucuacgagccaaaaguccauuguugcauauaccaugucauuaggcgccgauagcucuauagcuuacuccaacaauacaaucgccauuccaacuaacuucaguaucagcauuaccacagaagugaugcccgugucuauggcaaaaacuuccguagacuguaauauguacaucugcggugauucaaccgagugugcgaaccugcuacuccaguaugggaguuuuugcacgcagcugaaccgagcucuuagcggcauagccgcagagcaggaccgcaauacaagagaagucuucgcccaagugaagcagauguacaaaaccccgacuuugaaguauuuuggaggcuucaacuucucgcagauccugccugauccacucaaacccacaaagagguccuuuauugaggaccugcuuuucaauaagguuacccuggcugaugccggguuuaugaaacaguacggagaauguuugggugacaucaacgcacgggaucucauuugcgcucaaaaguucaauggccugacuguguuaccuccccugcuaaccgacgauaugaucgccgcguauacagccgcucucgucucugggacggcaaccgccggauggacuuuuggcgcuggugccgcacugcagauaccauucgcgaugcagauggccuaccgcuuuaacgggauuggcgugacacagaauguucuuuaugagaaccaaaaacagaucgcuaaucaguucaacaaggccauuagccaaauccaggaaucauugaccacaaccaguacugcacugggaaaacuccaggacgugguaaaucagaacgcucaagcccugaauacguuagucaagcagcuguccucuaacuuuggcgcaauaagcuccgugcuuaaugauaucuugucaagacucgacccucccgaggccgaggugcagauugacaggcugaucacagggcgucuacagagccugcaaaccuacgucacucagcagcucauucgggcugcggaaauccgagccagugcaaaccuggcugccaccaagaugucugagugcguucuuggacaguccaaaagaguggauuucuguggcaaggguuaccacuugaugagcuuuccacaagccgcuccgcaugggguaguguuccugcacgucacauaugugccuucgcaggaaaggaacuuuacuaccgcacccgccauaugccacgagggaaaagcguacuucccacgcgaaggcguuuucguguuuaaugguacaucaugguucauuacgcagcggaacuuuuucucuccccaaaucaucaccacugacaauacauuugucaguggcaacugugaugugguuauugggaucauuaauaacaccguguaugacccuuuacagccagagcucgauuccuucaaggaggaacuggacaaauacuuuaagaaucauacuagccccgaugucgaccuuggagauauaucuggcaucaacgcuagcguagugaauauucagaaagagaucgacagacugaacgaaguugccaagaauuugaacgagucccucauugaucugcaggagcuagggaaguaugaacaaggaggcuacaucccugaggcaccgagggacggucaggccuaugugcgcaaagacggggaauggguccugcucucaacauucuga

SEQ ID NO: 15003 - RNA, 4062 nt, Artificial Sequence
  HCoV/OC43__P36334.1 spike protein CDS human (1-1353)
auguuccugauccuccuuauuagccugcccaccgccuuugcugugauaggcgacuugaagugcacauccgauaacaucaaugacaaagauacugggccuccaccgauuucuacggacaccgucgauguuacaaacggauuagguacuuacuaugugcuggacagaguauaccuaaauaccacacucuuccugaacggcuauuaccccaccucagggaguacuuauaggaauauggcacuuaagggaagcgugcuguugucccggcucugguuuaaaccuccauuccugucugauuuuaucaacggcauuuucgccaaggucaaaaauacaaaggugaucaaggaccgcguuauguacucggaguuucccgcgauaaccaucgguucaacguucgugaacacuagcuauagugucgugguacagccucgaaccauuaauuccacacaagauggggacaacaaacugcagggacucuuagaaguuucugugugucaguacaauaugugcgaguacccacagacuaucugucaccccaaccugggcaaucaucguaaggaacuuuggcacuuggauaccggcgucgugagcugccuguauaaaagaaacuuuacauacgacgugaaugcugauuaucuauacuuccauuuuuaucaagaagggggaaccuucuacgccuauuuuacggacacuggugucguuacaaaguuccucuucaacguguaccugggcauggcacuuucccacuacuauguaaugccucugaccuguaacucaaaauugacucucgaguacugggugacaccacugaccaguaggcaguauuuacuggccuuuaaucaggacgggauuaucuucaacgcugaggauugcaugagcgacuuuaugucugagauaaaguguaagacgcaguccauugcaccgcccaccggagucuacgaacucaauggcuauacagugcaaccuaucgccgauguuuaccggcgcaaaccaaaccuucccaauugcaacauugaggcuuggcugaaugacaagucagugccuagcccauugaacugggaaagaaaaacuuucaguaauuguaacuuuaauaugucuucccuaaugagcuucauccaggccgauucguuuaccugcaacaauaucgacgcggcaaagauuuaugguauguguuucucuuccauaacaaucgauaaauuugccauucccaacgggaggaaggucgaccugcagcucggaaaucugggcuaccuucagucauucaacuaccggaucgauacuaccgcuacaaguugccaacuguauuacaacuugccggccgcaaaugugagcguaucccgcuuuaacccuucuaccuggaauaaacgauucggcuuuauagaggacagcguuuucaagcccagaccagcuggggugcucacuaaccaugaugucguguaugcccagcacugcuucaaggcgccuaaaaauuuuugucccugcaagcugaacggaucaugugucgguaguggcccagggaaaaauaacggaauuggcacgugccccgccgguacaaauuacuuaaccugugacaaccugugcacuccugacccaaucaccuucacagggaccuauaaguguccgcagacuaaaucccuagugggcaucggagagcacugcagcggccucgcaguuaagucugauuacugugggggaaauucaugcacauguaggccccaagcguuucuggguuggagugccgacagcugccuucagggcgauaagugcaacauuuucgcuaauuuuaucuugcaugacgugaacuccgggcugacguguucuaccgaucuccagaaagccaauacugacauuauacugggaguaugcgucaacuaugaucuuuacggcauccugggucaggggauuuucguggaaguuaacgcaacauacuauaauucguggcaaaacuugcucuacgacagcaauggcaaccuguauggauuucgggauuacaucaucaaucguaccuucaugauucgcuccuguuauucaggcagagugagugccgcuuuucacgcgaacucuagcgagccugcauuacuguucaggaauauaaagugcaacuacgucuuuaauaacucccuaacacggcagcuccagccaaucaauuauuucgacucauaccuggggugugugguaaacgccuacaauagcacugcuauuucugugcagaccugcgaucuuacgguuggauccgguuauugugucgacuacaguaaaaaccgacgcagcagaggcgccaucaccacaggguauagguuuacuaauuucgaacccuucaccgugaacucugugaacgauuccuuggagccugucggaggccuguacgaaauucaaaucccaucagaguuuacaauagguaauaugguugaguucauccagacuucuagccccaaggugaccauugacugcgcagccuuuguguguggggacuaugcugccugcaaaucgcagcucguagaauacggcuccuucugugauaacaucaaugcaauucugacggaggucaacgaauuacuggacacaacccagcuucaaguggcuaauucuuugaugaacggaguuacucucagcacaaagcugaaggauggcgugaauuuuaacgucgacgauaucaauuucucaccggugcuagggugccugggaagugagugcuccaaagcuaguagccgguccgccauagaagaccuccuguuugauaagguuaaacuuucagacgugggcuucguagaggcauauaacaauuguaccgguggggccgagauucgcgauuugaucugcguccagagcuacaagggaauuaaagugcugccuccauuacucagugaaaaccagaucucuggcuacacucuggcugccaccuccgcaagccuuuuucccccuuggacagcugccgcgggugugcccuucuaucugaauguccaguacagaauaaacggcuuggggguuacgauggacgugcucucgcaaaaucagaagcugaucgccaacgcuuuuaauaacgcacuauaugccauucaggagggauucgaugcuaccaacucagcccugguaaagauccaagcaguggucaaugcgaacgccgaagcucucaauaaccugcuucagcaguugucuaauagguucggcgccauuagugcaucccugcaggagaucuuaagccgucucgacgcucuggaagccgaggcacaaauagaucggcuuauuaacgggcgacugacugcccuaaaugcuuacgugucucagcagcucagcgacuccacacugguuaaauuuucagcggcccaggcaauggagaaggugaacgaaugugucaaaagucaaagcucuagaaucaauuucugcggaaacggcaaucauaucauuuccuuggugcagaacgcuccauauggucuguacuuuauccacuucucauauguuccuaccaaguacgugacagccagggucagucccggguuauguauugccggagaccgcggcauagcuccaaaaagcgguuacuuuguaaaugugaacaauacuuggauguauaccggcuccggguacuauuacccggagccuaucacggaaaacaacguuguggucaugucuacaugcgcagugaauuauaccaaggcccccuacguaaugcucaacacuucgauuccaaaucugcccgauuucaaagaggagcuugaccagugguuuaagaaccagaccagcguggcgccugaucugucauuggacuauaucaaugucacauuccucgaucugcaaguugaaaugaaccggcuacaggaggcuauuaaggugcugaaucaguccuacaucaaccuuaaagacauaggaacuuacgaauauuacgugaaguggccaugguaugucuggcuccugaucuguuuggccggcguggcaaugcugguuuuacucuuuuucauuugcuguugcaccggguguggaacaaguugcuuuaaaaagugcggcgguuguugcgaugacuacacgggguaucaagagcugguaaucaaaaccucucacgaugacuga

SEQ ID NO: 15004 - RNA, 4062 nt, Artificial Sequence
  HCoV/OC43__P36334.1 spike protein CDS human (1-1353)(A1070P_L1071P)
auguuccugauccuccuuauuagccugcccaccgccuuugcugugauaggcgacuugaagugcacauccgauaacaucaaugacaaagauacugggccuccaccgauuucuacggacaccgucgauguuacaaacggauuagguacuuacuaugugcuggacagaguauaccuaaauaccacacucuuccugaacggcuauuaccccaccucagggaguacuuauaggaauauggcacuuaagggaagcgugcuguugucccggcucugguuuaaaccuccauuccugucugauuuuaucaacggcauuuucgccaaggucaaaaauacaaaggugaucaaggaccgcguuauguacucggaguuucccgcgauaaccaucgguucaacguucgugaacacuagcuauagugucgugguacagccucgaaccauuaauuccacacaagauggggacaacaaacugcagggacucuuagaaguuucugugugucaguacaauaugugcgaguacccacagacuaucugucaccccaaccugggcaaucaucguaaggaacuuuggcacuuggauaccggcgucgugagcugccuguauaaaagaaacuuuacauacgacgugaaugcugauuaucuauacuuccauuuuuaucaagaagggggaaccuucuacgccuauuuuacggacacuggugucguuacaaaguuccucuucaacguguaccugggcauggcacuuucccacuacuauguaaugccucugaccuguaacucaaaauugacucucgaguacugggugacaccacugaccaguaggcaguauuuacuggccuuuaaucaggacgggauuaucuucaacgcugaggauugcaugagcgacuuuaugucugagauaaaguguaagacgcaguccauugcaccgcccaccggagucuacgaacucaauggcuauacagugcaaccuaucgccgauguuuaccggcgcaaaccaaaccuucccaauugcaacauugaggcuuggcugaaugacaagucagugccuagcccauugaacugggaaagaaaaacuuucaguaauuguaacuuuaauaugucuucccuaaugagcuucauccaggccgauucguuuaccugcaacaauaucgacgcggcaaagauuuaugguauguguuucucuuccauaacaaucgauaaauuugccauucccaacgggaggaaggucgaccugcagcucggaaaucugggcuaccuucagucauucaacuaccggaucgauacuaccgcuacaaguugccaacuguauuacaacuugccggccgcaaaugugagcguaucccgcuuuaacccuucuaccuggaauaaacgauucggcuuuauagaggacagcguuuucaagcccagaccagcuggggugcucacuaaccaugaugucguguaugcccagcacugcuucaaggcgccuaaaaauuuuugucccugcaagcugaacggaucaugugucgguaguggcccagggaaaaauaacggaauuggcacgugccccgccgguacaaauuacuuaaccugugacaaccugugcacuccugacccaaucaccuucacagggaccuauaaguguccgcagacuaaaucccuagugggcaucggagagcacugcagcggccucgcaguuaagucugauuacugugggggaaauucaugcacauguaggccccaagcguuucuggguuggagugccgacagcugccuucagggcgauaagugcaacauuuucgcuaauuuuaucuugcaugacgugaacuccgggcugacguguucuaccgaucuccagaaagccaauacugacauuauacugggaguaugcgucaacuaugaucuuuacggcauccugggucaggggauuuucguggaaguuaacgcaacauacuauaauucguggcaaaacuugcucuacgacagcaauggcaaccuguauggauuucgggauuacaucaucaaucguaccuucaugauucgcuccuguuauucaggcagagugagugccgcuuuucacgcgaacucuagcgagccugcauuacuguucaggaauauaaagugcaacuacgucuuuaauaacucccuaacacggcagcuccagccaaucaauuauuucgacucauaccuggggugugugguaaacgccuacaauagcacugcuauuucugugcagaccugcgaucuuacgguuggauccgguuauugugucgacuacaguaaaaaccgacgcagcagaggcgccaucaccacaggguauagguuuacuaauuucgaacccuucaccgugaacucugugaacgauuccuuggagccugucggaggccuguacgaaauucaaaucccaucagaguuuacaauagguaauaugguugaguucauccagacuucuagccccaaggugaccauugacugcgcagccuuuguguguggggacuaugcugccugcaaaucgcagcucguagaauacggcuccuucugugauaacaucaaugcaauucugacggaggucaacgaauuacuggacacaacccagcuucaaguggcuaauucuuugaugaacggaguuacucucagcacaaagcugaaggauggcgugaauuuuaacgucgacgauaucaauuucucaccggugcuagggugccugggaagugagugcuccaaagcuaguagccgguccgccauagaagaccuccuguuugauaagguuaaacuuucagacgugggcuucguagaggcauauaacaauuguaccgguggggccgagauucgcgauuugaucugcguccagagcuacaagggaauuaaagugcugccuccauuacucagugaaaaccagaucucuggcuacacucuggcugccaccuccgcaagccuuuuucccccuuggacagcugccgcgggugugcccuucuaucugaauguccaguacagaauaaacggcuuggggguuacgauggacgugcucucgcaaaaucagaagcugaucgccaacgcuuuuaauaacgcacuauaugccauucaggagggauucgaugcuaccaacucagcccugguaaagauccaagcaguggucaaugcgaacgccgaagcucucaauaaccugcuucagcaguugucuaauagguucggcgccauuagugcaucccugcaggagaucuuaagccgucucgacccaccugaagcugaggcccaaauagaucggcugauuaacgggcgacuuacugcacugaaugccuacgugucucagcagcuaagcgacuccacacucguuaaauuuucagcugcgcaggccauggagaaggugaacgaaugugucaaaagucaaagcucuagaaucaauuucugcggaaacggcaaucauaucauuucccuggugcagaacgcacccuaugguuuguacuuuauccacuucucauauguuccaaccaaguacgugacagcuagggucaguccggggcuguguauugccggagaccgcggcauagccccuaaaagcgguuacuuuguaaaugugaacaauacuuggauguauaccggcuccggguacuauuaccccgagccaaucacggaaaacaacguuguggucaugucuacaugcgcugugaauuauaccaaggcacccuacguaauguuaaacacuucgauuccuaaucucccagauuucaaagaggagcuggaccagugguuuaagaaccagaccagcguggcccccgaucuuucacuggacuauaucaaugucacauucuuggaucuccaaguugaaaugaaccggcugcaggaggcgauuaaggugcuaaaucaguccuacaucaaccugaaagacauaggaacuuacgaauauuacgugaaguggccuugguaugucuggcuucucaucugucuggcuggcguggccauguugguucuguuauuuuucauuugcuguugcaccggguguggaacaaguugcuuuaaaaagugcggcgguuguugcgaugacuacacgggguaucaagagcucguaaucaaaaccucucacgaugacuga

SEQ ID NO: 15005 - RNA, 4089 nt, Artificial Sequence
  HCoV/OC43/1783A_10__AIL49484.1 spike protein CDS human (1-1362)
auguuccugauccuccuuauuagccugcccaccgccuuugcugugauaggcgacuugaagugcccuuuagauuccagaacagggucucugaacaauaucgacacuggaccaccgucaauuaguacggcaaccgucgauguuacaaacggucuaggcacuuacuaugugcucgacaggguauaccugaauaccacacuuuuccugaacggguauuaccccaccagcggauccacuuaucggaauauggccuugaaaggcacagauaagcucucuacccugugguuuaaaccuccauuccugucggacuuuaucaacgguauuuucgcgaaggugaaaaauacgaaggucuuuaaggauggggugauguacucagaguuccccgcuaucacuauaggaagcaccuuuguuaacacaaguuauuccguggucgugcagccucgcacuaucaauucuacccaagacggcguaaacaaacuccagggcuuacuggaaguuagcgugugucaguacaauaugugcgaguacccacacacaauuugucaucccaaacuugggaaccacuucaaggaauuguggcauauggauaccggagucguguccugccuguauaagcgaaauuuuacguacgacgugaacgccacuuaucuauacuuccacuuuuaucaggaggguggcacauucuacgcauauuucaccgauacuggggucguuacaaaauuucucuucaauguguaccugggaauggcccuuucacauuacuauguaaugccucugaccuguaucagucguagagacauuggcuuuacguuggaauacugggugaccccacucacaagcaggcaauaucuguuagcuuucaaccaggaugguaucauauuuaacgcagucgacugcaugucugacuucauguccgagauuaaguguaagacucagucaaucgccccgcccaccgggguguacgagcugaauggauauacaguucagccuauugcugauguguaccggcgcaaaccagaccuccccaacugcaauaucgaagccuggcuuaacgauaagagcgucccuaguccacugaauugggagagaaaaacuuuuucuaacuguaauuucaacauguccagcuugaugucguuuauccaagcggacucuuuuaccugcaauaacauugaugcagccaagauauauggcauguguuucuccucaaucacaauugacaaauucgcuauccccaauggcaggaagguggaucuacagcuggggaaccucggauaccugcagaguuuuaauuaccggauagacaccacugccacgagcugccagcuuuauuacaaccugccggcagcuaauguauccguuucucgcuucaacccuagcacauggaacaaacgauucgguuuuauugaaaauucaguguucaagccccaaccagccggcgucuugaccaaccacgauguggucuaugcgcagcacugcuuuaaggccccuaaaaauuucugucccugcaagcucaacaguucccuguguguggggagcggaccaggcaaaaauaacgguaucgggacuugccccgcaggcaccaauuacuuaacaugucauaaccugugcaauccugacccaaucaccuuuacuggaccguauaaguguccccagacaaaaucucuaguuggcauuggggagcacugcucaggacucgcugugaagagugauuacugugguggcaacccuugcacgugucaaccacaggccuuccugggguggagcgcugacuccugccuucagggagacaagugcaauaucuuugccaacuugauucugcaugauguaaauucuggccucaccuguucgacugaccugcagaaagcaaacacagauauaaaacuuggugucugcgugaauuaugaccuguacgggaucagcggccaaggaauuuucguugaggugaacgccaccuacuauaacuccuggcagaauuugcucuacgauucaaacggcaaucuguauggguuuagagacuacaucacaaacaggacuuucaugauccggaguuguuauucuggacgugucagcgcugcguuucacgcaaauuccucagaacccgccuuacuguuccgcaacauuaagugcaauuacguguuuaacaauagccuaauaagacagcuccagccuaucaacuauuucgauucuuaccuggguuguguagugaaugcuuacaacuccaccgccauuaguguucaaacgugcgaccuuaccgucggcagcggguauuguguggauuacucuaagaauaggcggucccgacgcgcaaucacaacuggauauagauucaccaacuuugagccauucacagugaauagcgucaacgacaguuuggaacccguuggcggucuguacgagauucagaucccgagcgaauuuacuauagggaacauggaggaguucauccagaccucguccccuaaagugacgauugauugcgccgcuuuuguguguggcgacuaugccgcaugcaagucucagcucguagaauacggaucauucugugauaauaucaacgcgauucugacagaggucaaugaauuacuggacaccacucaacuucagguggcuaacucauugaugaauggcguuacacucaguaccaagcugaaagacggggugaacuuuaaugucgaugacaucaacuucuccucugugcuaggaugccugggcagcgagugcuccaaggccucaagcaggagugcaauagaagaucuccuguuugacaaaguuaaacuuucugauguggguuucguagccgcuuauaauaacuguacugggggagccgagauucgggacuugaucugcguccaguccuacaagggcauuaaggugcugccacccuuacucagcgagaaucagaucucggguuacacccuggcagcuacaucagccucucuuuuuccucccuggacggcggccgcuggcgugccauucuaucugaacguccaauaccgcauaaauggguugggaguuaccauggaugugcucagucagaaccagaagcugaucgcaaaugccuucaacaaugcucuagacgccauucaagaaggcuuugaugcaacuaacuccgcgcugguaaaaauccaggccguggucaacgcuaaugccgaggcacucaacaaucugcuucagcaguugagcaacagauucggggcuauuucuagcucccugcaagaaaucuuaucaaggcucgacgcccuggaggcagaagcccagauagaucgucuuauuaauggacggcugacagcucuaaacgcguaugugagucagcagcucagcgacucuacccugguuaaguuuuccgccgcacaagcuauggagaaagugaaugagugugucaagucacagaguagccgaaucaacuucugcggcaaugguaaccacaucauuuccuuggugcagaaugccccuuacgggcuguauuuuauccauuucucuuacguucccacaaaauaugugacugccaaggucucgccaggauuauguauugcuggcgauagagguauagcaccgaaaagcggcuacuuuguaaacgugaauaacaccuggauguacacggggucaggauauuacuauccugaacccaucacagagaauaacguuguggucaugaguaccugcgccgugaacuacacuaaggcgccauauguaaugcucaauaccuccacacccaaccugccugacuucagggaggaacuugaccagugguuuaagaaucaaacuucuguggcuccagaucugagcuuggacuacauuaacgucaccuuccucgaucugcagguugagaugaaucgccuacaggaagccaucaaagugcugaaccaauccuauauuaaucuuaaggacaucggcacauacgaguacuaugugaaauggcccugguacgucuggcuccugauaggguuggcaggaguggccaugcugguuuuacucuuuuucaucuguugcuguacgggcugcgguaccucauguuuuaagaaaugcgggggaugcugugaugacuauacuggcuaccaggaacugguaauuaagacaucucacgaugacuga

SEQ ID NO: 15006 - RNA, 4089 nt, Artificial Sequence
  HCoV/OC43/1783A_10__AIL49484.1 spike protein CDS human (1-1362)(A1079P_L1080P)
auguuccugauccuccuuauuagccugcccaccgccuuugcugugauaggcgacuugaagugcccuuuagauuccagaacagggucucugaacaauaucgacacuggaccaccgucaauuaguacggcaaccgucgauguuacaaacggucuaggcacuuacuaugugcucgacaggguauaccugaauaccacacuuuuccugaacggguauuaccccaccagcggauccacuuaucggaauauggccuugaaaggcacagauaagcucucuacccugugguuuaaaccuccauuccugucggacuuuaucaacgguauuuucgcgaaggugaaaaauacgaaggucuuuaaggauggggugauguacucagaguuccccgcuaucacuauaggaagcaccuuuguuaacacaaguuauuccguggucgugcagccucgcacuaucaauucuacccaagacggcguaaacaaacuccagggcuuacuggaaguuagcgugugucaguacaauaugugcgaguacccacacacaauuugucaucccaaacuugggaaccacuucaaggaauuguggcauauggauaccggagucguguccugccuguauaagcgaaauuuuacguacgacgugaacgccacuuaucuauacuuccacuuuuaucaggaggguggcacauucuacgcauauuucaccgauacuggggucguuacaaaauuucucuucaauguguaccugggaauggcccuuucacauuacuauguaaugccucugaccuguaucagucguagagacauuggcuuuacguuggaauacugggugaccccacucacaagcaggcaauaucuguuagcuuucaaccaggaugguaucauauuuaacgcagucgacugcaugucugacuucauguccgagauuaaguguaagacucagucaaucgccccgcccaccgggguguacgagcugaauggauauacaguucagccuauugcugauguguaccggcgcaaaccagaccuccccaacugcaauaucgaagccuggcuuaacgauaagagcgucccuaguccacugaauugggagagaaaaacuuuuucuaacuguaauuucaacauguccagcuugaugucguuuauccaagcggacucuuuuaccugcaauaacauugaugcagccaagauauauggcauguguuucuccucaaucacaauugacaaauucgcuauccccaauggcaggaagguggaucuacagcuggggaaccucggauaccugcagaguuuuaauuaccggauagacaccacugccacgagcugccagcuuuauuacaaccugccggcagcuaauguauccguuucucgcuucaacccuagcacauggaacaaacgauucgguuuuauugaaaauucaguguucaagccccaaccagccggcgucuugaccaaccacgauguggucuaugcgcagcacugcuuuaaggccccuaaaaauuucugucccugcaagcucaacaguucccuguguguggggagcggaccaggcaaaaauaacgguaucgggacuugccccgcaggcaccaauuacuuaacaugucauaaccugugcaauccugacccaaucaccuuuacuggaccguauaaguguccccagacaaaaucucuaguuggcauuggggagcacugcucaggacucgcugugaagagugauuacugugguggcaacccuugcacgugucaaccacaggccuuccugggguggagcgcugacuccugccuucagggagacaagugcaauaucuuugccaacuugauucugcaugauguaaauucuggccucaccuguucgacugaccugcagaaagcaaacacagauauaaaacuuggugucugcgugaauuaugaccuguacgggaucagcggccaaggaauuuucguugaggugaacgccaccuacuauaacuccuggcagaauuugcucuacgauucaaacggcaaucuguauggguuuagagacuacaucacaaacaggacuuucaugauccggaguuguuauucuggacgugucagcgcugcguuucacgcaaauuccucagaacccgccuuacuguuccgcaacauuaagugcaauuacguguuuaacaauagccuaauaagacagcuccagccuaucaacuauuucgauucuuaccuggguuguguagugaaugcuuacaacuccaccgccauuaguguucaaacgugcgaccuuaccgucggcagcggguauuguguggauuacucuaagaauaggcggucccgacgcgcaaucacaacuggauauagauucaccaacuuugagccauucacagugaauagcgucaacgacaguuuggaacccguuggcggucuguacgagauucagaucccgagcgaauuuacuauagggaacauggaggaguucauccagaccucguccccuaaagugacgauugauugcgccgcuuuuguguguggcgacuaugccgcaugcaagucucagcucguagaauacggaucauucugugauaauaucaacgcgauucugacagaggucaaugaauuacuggacaccacucaacuucagguggcuaacucauugaugaauggcguuacacucaguaccaagcugaaagacggggugaacuuuaaugucgaugacaucaacuucuccucugugcuaggaugccugggcagcgagugcuccaaggccucaagcaggagugcaauagaagaucuccuguuugacaaaguuaaacuuucugauguggguuucguagccgcuuauaauaacuguacugggggagccgagauucgggacuugaucugcguccaguccuacaagggcauuaaggugcugccacccuuacucagcgagaaucagaucucggguuacacccuggcagcuacaucagccucucuuuuuccucccuggacggcggccgcuggcgugccauucuaucugaacguccaauaccgcauaaauggguugggaguuaccauggaugugcucagucagaaccagaagcugaucgcaaaugccuucaacaaugcucuagacgccauucaagaaggcuuugaugcaacuaacuccgcgcugguaaaaauccaggccguggucaacgcuaaugccgaggcacucaacaaucugcuucagcaguugagcaacagauucggggcuauuucuagcucccugcaagaaaucuuaucaaggcucgacccucccgaggccgaagcacagauagaucgucugauuaauggacggcuuacagcccugaacgcuuaugugagucagcagcuaagcgacucuacccucguuaaguuuuccgcggcccaagcaauggagaaagugaaugagugugucaagucacagaguagccgaaucaacuucugcggcaaugguaaccacaucauuucccuggugcagaaugcuccauacggguuguauuuuauccauuucucuuacguuccgacaaaauaugugacugccaaggucucgccuggacuguguauugccggcgauagagguauagcucccaaaagcggcuacuuuguaaacgugaauaacaccuggauguacacggggucaggauauuacuauccagaacccaucacagagaauaacguuguggucaugaguaccugcgcagugaacuacacuaaggccccuuauguaauguuaaauaccuccacaccaaaccuccccgacuucagggaggaacuggaccagugguuuaagaaucaaacuucuguggcgccugaucuuagccuggacuacauuaacgucaccuucuuggaucuccagguugagaugaaucgccugcaggaagcuaucaaagugcuaaaccaauccuauauuaaucugaaggacaucggcacauacgaguacuaugugaaauggccgugguacgucuggcuucucauagggcuggccggaguggcaauguugguucuguuauuuuucaucuguugcuguacgggcugcgguaccucauguuuuaagaaaugcgggggaugcugugaugacuauacuggcuaccaggaacucguaauuaagacaucucacgaugacuga

SEQ ID NO: 15007 - RNA, 3864 nt, Artificial Sequence
  HCoV/OC43/1783A_10__AIL49484.1 spike protein CDS human (variant)
auguuccugauccuccuuauuagccugcccaccgccuuugcugugauaggcgacuugaagugcccuuuagauuccagaacagggucucugaacaauaucgacacuggaccaccgucaauuaguacggcaaccgucgauguuacaaacggucuaggcacuuacuaugugcucgacaggguauaccugaauaccacacuuuuccugaacggguauuaccccaccagcggauccacuuaucggaauauggccuugaaaggcacagauaagcucucuacccugugguuuaaaccuccauuccugucggacuuuaucaacgguauuuucgcgaaggugaaaaauacgaaggucuuuaaggauggggugauguacucagaguuccccgcuaucacuauaggaagcaccuuuguuaacacaaguuauuccguggucgugcagccucgcacuaucaauucuacccaagacggcguaaacaaacuccagggcuuacuggaaguuagcgugugucaguacaauaugugcgaguacccacacacaauuugucaucccaaacuugggaaccacuucaaggaauuguggcauauggauaccggagucguguccugccuguauaagcgaaauuuuacguacgacgugaacgccacuuaucuauacuuccacuuuuaucaggaggguggcacauucuacgcauauuucaccgauacuggggucguuacaaaauuucucuucaauguguaccugggaauggcccuuucacauuacuauguaaugccucugaccuguaucagucguagagacauuggcuuuacguuggaauacugggugaccccacucacaagcaggcaauaucuguuagcuuucaaccaggaugguaucauauuuaacgcagucgacugcaugucugacuucauguccgagauuaaguguaagacucagucaaucgccccgcccaccgggguguacgagcugaauggauauacaguucagccuauugcugauguguaccggcgcaaaccagaccuccccaacugcaauaucgaagccuggcuuaacgauaagagcgucccuaguccacugaauugggagagaaaaacuuuuucuaacuguaauuucaacauguccagcuugaugucguuuauccaagcggacucuuuuaccugcaauaacauugaugcagccaagauauauggcauguguuucuccucaaucacaauugacaaauucgcuauccccaauggcaggaagguggaucuacagcuggggaaccucggauaccugcagaguuuuaauuaccggauagacaccacugccacgagcugccagcuuuauuacaaccugccggcagcuaauguauccguuucucgcuucaacccuagcacauggaacaaacgauucgguuuuauugaaaauucaguguucaagccccaaccagccggcgucuugaccaaccacgauguggucuaugcgcagcacugcuuuaaggccccuaaaaauuucugucccugcaagcucaacaguucccuguguguggggagcggaccaggcaaaaauaacgguaucgggacuugccccgcaggcaccaauuacuuaacaugucauaaccugugcaauccugacccaaucaccuuuacuggaccguauaaguguccccagacaaaaucucuaguuggcauuggggagcacugcucaggacucgcugugaagagugauuacugugguggcaacccuugcacgugucaaccacaggccuuccugggguggagcgcugacuccugccuucagggagacaagugcaauaucuuugccaacuugauucugcaugauguaaauucuggccucaccuguucgacugaccugcagaaagcaaacacagauauaaaacuuggugucugcgugaauuaugaccuguacgggaucagcggccaaggaauuuucguugaggugaacgccaccuacuauaacuccuggcagaauuugcucuacgauucaaacggcaaucuguauggguuuagagacuacaucacaaacaggacuuucaugauccggaguuguuauucuggacgugucagcgcugcguuucacgcaaauuccucagaacccgccuuacuguuccgcaacauuaagugcaauuacguguuuaacaauagccuaauaagacagcuccagccuaucaacuauuucgauucuuaccuggguuguguagugaaugcuuacaacuccaccgccauuaguguucaaacgugcgaccuuaccgucggcagcggguauuguguggauuacucuaagaauggaggcuccgguucagcaaucacaacuggguauagguucaccaacuuugagccauucacagugaauagugucaacgacagcuuggaacccguuggcggacuguacgagauucagaucccgucggaauuuacuauaggcaacauggaggaguucauccagaccuccucuccuaaagugacgauugauugcgccgcuuuuguguguggggacuaugccgcaugcaagagccagcucguagaauacggaucauucugugauaauaucaacgcgauucugacagaggucaaugaauuacuggacaccacucaacuucagguggcuaacaguuugaugaauggcguuacacucuccaccaagcugaaagacggugugaacuuuaaugucgaugacaucaacuucucuagcgugcuagggugccugggauccgagugcucaaaggccagcagucggucugcaauagaagaucuccuguuugacaaaguuaaacuuuccgaugugggcuucguagccgcuuauaauaacuguacugguggcgccgagauucgagacuugaucugcguccagagcuacaaggggauuaaggugcugccacccuuacucucggagaaucagaucucaggauacacccuggcagcuacaucugccagucuuuuuccucccuggacggcggccgcuggcgugccauucuaucugaacguccaauaccgcauaaauggguugggaguuaccauggaugugcucucccagaaccagaagcugaucgcaaaugccuucaacaaugcucuagacgccauucaagaaggcuuugaugcaacuaacagcgcgcugguaaaaauccaggccguggucaacgcuaaugccgaggcacucaacaaucugcuucagcaguugucuaacagauucggugcuauuagcuccucacugcaagaaaucuuaaguaggcucgacccucccgaggccgaagcacagauagaucggcugauuaaugggcgccuuacagcccugaacgcuuaugugagccagcagcuaucugacuccacccucguuaaguuuucagcggcccaagcaauggagaaagugaaugagugugucaagagucagagcuccagaaucaacuucugcggaaauggcaaccacaucauuucucuggugcagaaugcuccauacgguuuguauuuuauccauuucucguacguuccgacaaaauaugugacugccaaggucagcccuggccuguguauugccggggauaggggaauagcucccaaaucaggcuacuuuguaaacgugaauaacaccuggauguacacgggguccggauauuacuauccagaacccaucacagagaauaacguuguggucaugaguaccugcgcagugaacuacacuaaggccccuuauguaauguuaaauaccucuacaccaaaccuccccgacuuccgugaggaacuggaccagugguuuaagaaucaaacuagcguggcgccugaucuuucccuggacuacauuaacgucaccuucuuggaucuccagguugagaugaaucggcugcaggaagcuaucaaagugcuaaacuga

SEQ ID NO: 15008 - RNA, 3945 nt, Artificial Sequence
  HCoV/OC43/1783A_10__AIL49484.1 spike protein CDS human (variant)
auguuccugauccuccuuauuagccugcccaccgccuuugcugugauaggcgacuugaagugcccuuuagauuccagaacagggucucugaacaauaucgacacuggaccaccgucaauuaguacggcaaccgucgauguuacaaacggucuaggcacuuacuaugugcucgacaggguauaccugaauaccacacuuuuccugaacggguauuaccccaccagcggauccacuuaucggaauauggccuugaaaggcacagauaagcucucuacccugugguuuaaaccuccauuccugucggacuuuaucaacgguauuuucgcgaaggugaaaaauacgaaggucuuuaaggauggggugauguacucagaguuccccgcuaucacuauaggaagcaccuuuguuaacacaaguuauuccguggucgugcagccucgcacuaucaauucuacccaagacggcguaaacaaacuccagggcuuacuggaaguuagcgugugucaguacaauaugugcgaguacccacacacaauuugucaucccaaacuugggaaccacuucaaggaauuguggcauauggauaccggagucguguccugccuguauaagcgaaauuuuacguacgacgugaacgccacuuaucuauacuuccacuuuuaucaggaggguggcacauucuacgcauauuucaccgauacuggggucguuacaaaauuucucuucaauguguaccugggaauggcccuuucacauuacuauguaaugccucugaccuguaucagucguagagacauuggcuuuacguuggaauacugggugaccccacucacaagcaggcaauaucuguuagcuuucaaccaggaugguaucauauuuaacgcagucgacugcaugucugacuucauguccgagauuaaguguaagacucagucaaucgccccgcccaccgggguguacgagcugaauggauauacaguucagccuauugcugauguguaccggcgcaaaccagaccuccccaacugcaauaucgaagccuggcuuaacgauaagagcgucccuaguccacugaauugggagagaaaaacuuuuucuaacuguaauuucaacauguccagcuugaugucguuuauccaagcggacucuuuuaccugcaauaacauugaugcagccaagauauauggcauguguuucuccucaaucacaauugacaaauucgcuauccccaauggcaggaagguggaucuacagcuggggaaccucggauaccugcagaguuuuaauuaccggauagacaccacugccacgagcugccagcuuuauuacaaccugccggcagcuaauguauccguuucucgcuucaacccuagcacauggaacaaacgauucgguuuuauugaaaauucaguguucaagccccaaccagccggcgucuugaccaaccacgauguggucuaugcgcagcacugcuuuaaggccccuaaaaauuucugucccugcaagcucaacaguucccuguguguggggagcggaccaggcaaaaauaacgguaucgggacuugccccgcaggcaccaauuacuuaacaugucauaaccugugcaauccugacccaaucaccuuuacuggaccguauaaguguccccagacaaaaucucuaguuggcauuggggagcacugcucaggacucgcugugaagagugauuacugugguggcaacccuugcacgugucaaccacaggccuuccugggguggagcgcugacuccugccuucagggagacaagugcaauaucuuugccaacuugauucugcaugauguaaauucuggccucaccuguucgacugaccugcagaaagcaaacacagauauaaaacuuggugucugcgugaauuaugaccuguacgggaucagcggccaaggaauuuucguugaggugaacgccaccuacuauaacuccuggcagaauuugcucuacgauucaaacggcaaucuguauggguuuagagacuacaucacaaacaggacuuucaugauccggaguuguuauucuggacgugucagcgcugcguuucacgcaaauuccucagaacccgccuuacuguuccgcaacauuaagugcaauuacguguuuaacaauagccuaauaagacagcuccagccuaucaacuauuucgauucuuaccuggguuguguagugaaugcuuacaacuccaccgccauuaguguucaaacgugcgaccuuaccgucggcagcggguauuguguggauuacucuaagaauggaggcuccgguucagcaaucacaacuggguauagguucaccaacuuugagccauucacagugaauagugucaacgacagcuuggaacccguuggcggacuguacgagauucagaucccgucggaauuuacuauaggcaacauggaggaguucauccagaccuccucuccuaaagugacgauugauugcgccgcuuuuguguguggggacuaugccgcaugcaagagccagcucguagaauacggaucauucugugauaauaucaacgcgauucugacagaggucaaugaauuacuggacaccacucaacuucagguggcuaacaguuugaugaauggcguuacacucuccaccaagcugaaagacggugugaacuuuaaugucgaugacaucaacuucucuagcgugcuagggugccugggauccgagugcucaaaggccagcagucggucugcaauagaagaucuccuguuugacaaaguuaaacuuuccgaugugggcuucguagccgcuuauaauaacuguacugguggcgccgagauucgagacuugaucugcguccagagcuacaaggggauuaaggugcugccacccuuacucucggagaaucagaucucaggauacacccuggcagcuacaucugccagucuuuuuccucccuggacggcggccgcuggcgugccauucuaucugaacguccaauaccgcauaaauggguugggaguuaccauggaugugcucucccagaaccagaagcugaucgcaaaugccuucaacaaugcucuagacgccauucaagaaggcuuugaugcaacuaacagcgcgcugguaaaaauccaggccguggucaacgcuaaugccgaggcacucaacaaucugcuucagcaguugucuaacagauucggugcuauuagcuccucacugcaagaaaucuuaaguaggcucgacccucccgaggccgaagcacagauagaucggcugauuaaugggcgccuuacagcccugaacgcuuaugugagccagcagcuaucugacuccacccucguuaaguuuucagcggcccaagcaauggagaaagugaaugagugugucaagagucagagcuccagaaucaacuucugcggaaauggcaaccacaucauuucucuggugcagaaugcuccauacgguuuguauuuuauccauuucucguacguuccgacaaaauaugugacugccaaggucagcccuggccuguguauugccggggauaggggaauagcucccaaaucaggcuacuuuguaaacgugaauaacaccuggauguacacgggguccggauauuacuauccagaacccaucacagagaauaacguuguggucaugaguaccugcgcagugaacuacacuaaggccccuuauguaauguuaaauaccucuacaccaaaccuccccgacuuccgugaggaacuggaccagugguuuaagaaucaaacuagcguggcgccugaucuuucccuggacuacauuaacgucaccuucuuggaucuccagguugagaugaaucggcugcaggaagcuaucaaagugcuaaacggcgguuauauuccggaggccccacgagacgggcaagcauacgugagaaaggauggagaauggguccugcuuucaacauuuuga

SEQ ID NO: 15009 - RNA, 4056 nt, Artificial Sequence
  HCoV/HKU1/N5__Q0ZME7.1 spike protein CDS human (1-1351)
auguuccugaucauuuuuauacuccccaccacacuugccgugaucggcgacuucaacugcacuaauagcuuuauuaacgauuacaauaagacgaucccuagaauuuccgaggacgucguugaugugucucugggguugggaaccuauuacguauuaaacaggguguaucugaauacaacucuacucuucaccgguuacuuuccaaaaucaggcgcuaacuuccgggaccuggcacuuaaggggaguaucuaucugagcacauugugguacaaaccgcccuuucucuccgauuucaauaacggaauauuuucuaaggucaaaaauaccaagcuguaugugaacaauacucuguacucggaguucucaacaaucguuauuggcagcguguuugucaacaccaguuacacgaucgugguacagccucacaaugguauucucgaaaucacugccugucaauauaccaugugcgaauacccacauacaguuuguaaguccaaagggucuauacgcaacgagagcuggcacauugacuccucagaacccuuaugccuguucaagaaaaauuuuacuuauaacgugagugcggauuggcuuuacuuccauuucuaucaggagcgaggagucuuuuacgcuuauuacgccgacgugggcaugccuaccacauucuuguuuagccuguaccuaggcaccauccucucucacuauuacgugaugccacugacguguaacgcaauuuccucaaauacugauaacgagacacuugaauauugggucacuccccugagccguagacaguacuugcucaauuucgacgagcaugggguuaucaccaacgccguggauugcaguucuuccuuucugagcgaaauccaguguaagacacaaucguucgcuccuaauaccggaguauaugacuuaucugguuuuacggugaaaccagucgcaaccguguacaggcggauuccgaaccugcccgauugcgacauagacaauuggcucaacaauguuuccgugccuucaccacuuaacugggagcgcagaaucuucaguaauuguaacuuuaaucugagcacauugcuaaggcugguccacguggauuccuucucuugcaacaaucucgacaagagcaagauuuuuggcucauguuucaacaguaucacuguagauaaauuugccauacccaaccggcgccgagacgaucugcagcuuggguccagcggauuccugcagucuucaaauuauaagauugacaucaguagcuccucuugccaguuguacuacucgcucccucugguuaacgugaccaucaauaacuucaauccaagcuccuggaacagaagguauggcuuugguucauucaauuuaaguucuuacgaugucguguauagcgaccacugcuuuuccgucaacucagauuucugucccugcgcugacccgagcgugguuaauucuugugccaaauccaagccucccagugcgauuugcccagcagggacaaaauaccggcauugugaucuggacacuacccuauaugugaagaacuggugccguuguagcugccucccugaccccaucucuacauacuccccaaauaccuguccccaaaagaagguagucgugggaauuggcgagcacugcccuggccuggggauaaacgaagagaaguguggaacucagcuuaaucauucaaguugcuuuugcagcccagaugccuucuuggguuggucguuugacuccuguaucucuaacaaucgcugcaacauuuucagcaacuuuaucuucaauggcaucaacucagggacgacauguaguaaugaucugcucuauuccaacaccgaaauuucuacuggaguuugcgugaauuacgaccuguacggcauaaccggucaggggaucuuuaaagaggucagcgcugccuauuacaacaauuggcagaaccuucuguaugauuccaauggcaacauuaucggauucaaggacuuuuugacaaauaaaaccuacacuauucucccguguuauucaggcagagugagcgcagcuuucuaccaaaacaguucuucccccgcccuguuauauaggaaucugaagugcagcuacguacuaaacaauaucucguucauaucacagccuuuuuacuucgauucuuaucucgggugugugcugaacgcgguuaaccuuacaaguuacuccgucagcucuugcgacuugcggaugggaagcgguuuuuguaucgauuaugcccugccauccucacgacgcaaaagaaggggcauuaguagccccuaccgguucgugacguuugaaccuuucaaugugucuuuugucaacgacuccguugagaccguagggggacucuucgagauccagauuccaacuaauuuuacaaucgcaggccacgaagaguucauacaaaccucaagucccaaggugacaauugauugcagcgcuuuuguguguuccaacuaugccgcuugccacgaccuguuaucugaauacgguacuuucugcgauaauaucaacucgauucugaaugaggucaacgaccuuuuggacaucacccagcuccagguggccaaugcacugaugcaggggguuacgcuaagcucaaaccugaauaccaaccuccauuccgauguggacaauauagauuucaagagucugcuuggcuguuugggaucucaaugcggcagcuccucacgcucucuguuagaagaccuccuguuuaacaaagucaaacuuagcgaugugggguucguugaggccuauaauaacuguacaggagguagugagaucagagaccuguugugcgugcaguccuuuaauggcauuaaaguacucccgccuauccugagcgaaacucagauuucuggguacaccacagcugcgacugucgcagccauguucccacccuggucagcugccgcaggagugccuuuuucccuaaacgugcaguacaggaucaacggccugggugucaccauggauguucucaauaagaaccaaaaacugauagccaaugcuuucaacaaggcccuuuugaguauucagaauggguuuacggcaacaaacagcgcgcuggcuaagauccagucggugguaaaugccaacgcacaggccuuaaauucucuccugcaacagcuuuucaacaaauuuggcgcuaucuccagcucacugcaggagauucuaagucgucucgacaaucuggaagcccaggugcaaaucgaucgguugauuaacggacgacugaccgcauuaaaugcuuaugucucucagcagcucuccgacauaacucugaucaaggccggcgcgagcagagccauugagaaagugaacgaauguguuaagucacaaagucccaggaucaauuucugcgggaacggaaaccacauucuuagccuggugcagaaugcuccauacggcuugcucuuuauccauuucuccuauaaaccuacaucuuuuaagaccguccuggugagccccggucuaugucuguccggggaucgcggaauagcaccaaagcagggcuacuucaucaaacagaacgacucauggauguucacugguucuaguuauuacuauccggagccuauuucggauaagaauguuguguuuaugaacagcugcuccgucaauuucaccaaagcccccuuuaucuaccuuaacaauucuauuccaaaccucucagacuucgaggcugaacugagcuugugguuuaagaaucacacauccaucgcccccaaccugacguucaauagucauauaaacgcaaccuuuuuagaccucuacuaugagaugaauguaauucaagaaucuaucaaaagccugaacucauccuucaucaaucuuaaggagauuggcacuuacgagauguaugugaaauggccuugguacauauggcuguugaucguuauucucuuuaucauuuuccugaugauccuauuuuucauauguugcuguacagggugcggaagugcgugcuuuagcaagugucacaacugcugugaugaauauggcgggcacaacgacuucgugaucaaggccucucaugaugacuga

SEQ ID NO: 15010 - RNA, 4056 nt, Artificial Sequence
  HCoV/HKU1/N5__Q0ZME7.1 spike protein CDS human (1-1351)(N1067P_L1068P)
auguuccugaucauuuuuauacuccccaccacacuugccgugaucggcgacuucaacugcacuaauagcuuuauuaacgauuacaauaagacgaucccuagaauuuccgaggacgucguugaugugucucugggguugggaaccuauuacguauuaaacaggguguaucugaauacaacucuacucuucaccgguuacuuuccaaaaucaggcgcuaacuuccgggaccuggcacuuaaggggaguaucuaucugagcacauugugguacaaaccgcccuuucucuccgauuucaauaacggaauauuuucuaaggucaaaaauaccaagcuguaugugaacaauacucuguacucggaguucucaacaaucguuauuggcagcguguuugucaacaccaguuacacgaucgugguacagccucacaaugguauucucgaaaucacugccugucaauauaccaugugcgaauacccacauacaguuuguaaguccaaagggucuauacgcaacgagagcuggcacauugacuccucagaacccuuaugccuguucaagaaaaauuuuacuuauaacgugagugcggauuggcuuuacuuccauuucuaucaggagcgaggagucuuuuacgcuuauuacgccgacgugggcaugccuaccacauucuuguuuagccuguaccuaggcaccauccucucucacuauuacgugaugccacugacguguaacgcaauuuccucaaauacugauaacgagacacuugaauauugggucacuccccugagccguagacaguacuugcucaauuucgacgagcaugggguuaucaccaacgccguggauugcaguucuuccuuucugagcgaaauccaguguaagacacaaucguucgcuccuaauaccggaguauaugacuuaucugguuuuacggugaaaccagucgcaaccguguacaggcggauuccgaaccugcccgauugcgacauagacaauuggcucaacaauguuuccgugccuucaccacuuaacugggagcgcagaaucuucaguaauuguaacuuuaaucugagcacauugcuaaggcugguccacguggauuccuucucuugcaacaaucucgacaagagcaagauuuuuggcucauguuucaacaguaucacuguagauaaauuugccauacccaaccggcgccgagacgaucugcagcuuggguccagcggauuccugcagucuucaaauuauaagauugacaucaguagcuccucuugccaguuguacuacucgcucccucugguuaacgugaccaucaauaacuucaauccaagcuccuggaacagaagguauggcuuugguucauucaauuuaaguucuuacgaugucguguauagcgaccacugcuuuuccgucaacucagauuucugucccugcgcugacccgagcgugguuaauucuugugccaaauccaagccucccagugcgauuugcccagcagggacaaaauaccggcauugugaucuggacacuacccuauaugugaagaacuggugccguuguagcugccucccugaccccaucucuacauacuccccaaauaccuguccccaaaagaagguagucgugggaauuggcgagcacugcccuggccuggggauaaacgaagagaaguguggaacucagcuuaaucauucaaguugcuuuugcagcccagaugccuucuuggguuggucguuugacuccuguaucucuaacaaucgcugcaacauuuucagcaacuuuaucuucaauggcaucaacucagggacgacauguaguaaugaucugcucuauuccaacaccgaaauuucuacuggaguuugcgugaauuacgaccuguacggcauaaccggucaggggaucuuuaaagaggucagcgcugccuauuacaacaauuggcagaaccuucuguaugauuccaauggcaacauuaucggauucaaggacuuuuugacaaauaaaaccuacacuauucucccguguuauucaggcagagugagcgcagcuuucuaccaaaacaguucuucccccgcccuguuauauaggaaucugaagugcagcuacguacuaaacaauaucucguucauaucacagccuuuuuacuucgauucuuaucucgggugugugcugaacgcgguuaaccuuacaaguuacuccgucagcucuugcgacuugcggaugggaagcgguuuuuguaucgauuaugcccugccauccucacgacgcaaaagaaggggcauuaguagccccuaccgguucgugacguuugaaccuuucaaugugucuuuugucaacgacuccguugagaccguagggggacucuucgagauccagauuccaacuaauuuuacaaucgcaggccacgaagaguucauacaaaccucaagucccaaggugacaauugauugcagcgcuuuuguguguuccaacuaugccgcuugccacgaccuguuaucugaauacgguacuuucugcgauaauaucaacucgauucugaaugaggucaacgaccuuuuggacaucacccagcuccagguggccaaugcacugaugcaggggguuacgcuaagcucaaaccugaauaccaaccuccauuccgauguggacaauauagauuucaagagucugcuuggcuguuugggaucucaaugcggcagcuccucacgcucucuguuagaagaccuccuguuuaacaaagucaaacuuagcgaugugggguucguugaggccuauaauaacuguacaggagguagugagaucagagaccuguugugcgugcaguccuuuaauggcauuaaaguacucccgccuauccugagcgaaacucagauuucuggguacaccacagcugcgacugucgcagccauguucccacccuggucagcugccgcaggagugccuuuuucccuaaacgugcaguacaggaucaacggccugggugucaccauggauguucucaauaagaaccaaaaacugauagccaaugcuuucaacaaggcccuuuugaguauucagaauggguuuacggcaacaaacagcgcgcuggcuaagauccagucggugguaaaugccaacgcacaggccuuaaauucucuccugcaacagcuuuucaacaaauuuggcgcuaucuccagcucacugcaggagauucuaagucgucucgaucccccagaagcccaggugcaaaucgaccggcugauuaauggacgauugaccgcacugaacgcuuaugucucucagcaguuauccgacauaacucucaucaaggccggcgcgagcagagccauugagaaagugaaugaauguguuaagucacaaaguccuaggaucaacuucugcgggaauggaaaccacauucugagccuugugcagaacgcucccuacggccuguuguuuauccauuucuccuauaaaccaacaucuuuuaagaccguccucgugagcccgggucugugucuauccggggaucgcggaauagcaccuaagcagggcuacuucaucaaacagaaugacucauggauguucacugguucuaguuauuacuaucccgagccaauuucggauaagaacguuguguuuaugaauagcugcuccgucaacuucaccaaagcccccuuuaucuaccugaauaacucuauuccuaaucuuucagacuucgaggcugaacucagccugugguuuaagaaccacacauccaucgccccaaauuugacguucaacagucauauaaaugcaaccuuucuggacuuauacuaugagaugaacguaauucaagaaucuaucaaaagccucaauucauccuucaucaaccugaaggagauuggcacuuacgagauguaugugaaauggcccugguacauauggcuucugaucguuauuuuguuuaucauuuuccucaugauccuguuuuucauauguugcuguacagggugcggaagugcgugcuuuagcaagugucacaauugcugugaugaauauggcgggcacaacgacuucgugaucaaggccucucaugaugacuga

SEQ ID NO: 15011 - RNA, 3831 nt, Artificial Sequence
  HCoV/HKU1/N5__Q0ZME7.1 spike protein CDS human (variant)
auguuccugaucauuuuuauacuccccaccacacuugccgugaucggcgacuucaacugcacuaauagcuuuauuaacgauuacaauaagacgaucccuagaauuuccgaggacgucguugaugugucucugggguugggaaccuauuacguauuaaacaggguguaucugaauacaacucuacucuucaccgguuacuuuccaaaaucaggcgcuaacuuccgggaccuggcacuuaaggggaguaucuaucugagcacauugugguacaaaccgcccuuucucuccgauuucaauaacggaauauuuucuaaggucaaaaauaccaagcuguaugugaacaauacucuguacucggaguucucaacaaucguuauuggcagcguguuugucaacaccaguuacacgaucgugguacagccucacaaugguauucucgaaaucacugccugucaauauaccaugugcgaauacccacauacaguuuguaaguccaaagggucuauacgcaacgagagcuggcacauugacuccucagaacccuuaugccuguucaagaaaaauuuuacuuauaacgugagugcggauuggcuuuacuuccauuucuaucaggagcgaggagucuuuuacgcuuauuacgccgacgugggcaugccuaccacauucuuguuuagccuguaccuaggcaccauccucucucacuauuacgugaugccacugacguguaacgcaauuuccucaaauacugauaacgagacacuugaauauugggucacuccccugagccguagacaguacuugcucaauuucgacgagcaugggguuaucaccaacgccguggauugcaguucuuccuuucugagcgaaauccaguguaagacacaaucguucgcuccuaauaccggaguauaugacuuaucugguuuuacggugaaaccagucgcaaccguguacaggcggauuccgaaccugcccgauugcgacauagacaauuggcucaacaauguuuccgugccuucaccacuuaacugggagcgcagaaucuucaguaauuguaacuuuaaucugagcacauugcuaaggcugguccacguggauuccuucucuugcaacaaucucgacaagagcaagauuuuuggcucauguuucaacaguaucacuguagauaaauuugccauacccaaccggcgccgagacgaucugcagcuuggguccagcggauuccugcagucuucaaauuauaagauugacaucaguagcuccucuugccaguuguacuacucgcucccucugguuaacgugaccaucaauaacuucaauccaagcuccuggaacagaagguauggcuuugguucauucaauuuaaguucuuacgaugucguguauagcgaccacugcuuuuccgucaacucagauuucugucccugcgcugacccgagcgugguuaauucuugugccaaauccaagccucccagugcgauuugcccagcagggacaaaauaccggcauugugaucuggacacuacccuauaugugaagaacuggugccguuguagcugccucccugaccccaucucuacauacuccccaaauaccuguccccagaaaaagguagucgugggaauuggcgagcacugcccuggccuggggauaaacgaagagaaguguggaacucaacuuaaucauucaaguugcuuuugcagcccagaugccuucuuggguuggucguuugacuccuguaucucuaacaaucgcugcaacauuuucagcaacuuuaucuucaauggcaucaacucagggacgacauguaguaaugaucugcucuauuccaacaccgaaauuucuacuggaguuugcgugaauuacgaccuguacggcauaaccggucaggggaucuuuaaagaggucagcgcugccuauuacaacaauuggcagaaccuucuguaugauuccaauggcaacauuaucggauucaaggacuuuuugacaaauaaaaccuacacuauucucccguguuauucaggcagagugagcgcagcuuucuaccaaaacaguucuucccccgcccuguuauauaggaaucugaagugcagcuacguacuaaacaauaucucguucauaucacagccuuuuuacuucgauucuuaucucgggugugugcugaacgcgguuaaccuuacaaguuacuccgucagcucuugcgacuugcggaugggaagcgguuuuuguaucgauuaugcccugccauccucaggcgggaguggaagcggcauuucuucccccuaccgauucgugacguuugaaccuuucaaugugucauuugucaacgacaguguugagaccguggguggccucuucgagauccagauuccaacuaauuuuacaaucgcagggcacgaagaguucauacaaaccagcucccccaaagugacaauugauugcucugcuuuuguauguucgaacuaugccgcuugccacgaccuguuaagcgaauacggaacuuucugcgauaauaucaacucaauucugaaugaggucaacgaccuuuuggacaucacccagcuccagguggccaaugcacugaugcagggcguuacgcuauccaguaaccugaauaccaaccuccauucugauguggacaauauagauuucaagagccugcuuggguguuugggaucccaaugcgguucaucuagccgcagucuguuagaagaccuccuguuuaacaaggucaaacuuuccgaugugggcuucguugaggccuauaauaacuguacagggggaagcgagaucagagaccuguugugcgugcagucuuuuaauggcauuaagguacucccgccuauccugucagaaacucagauuuccgguuacaccacagcugcgacugucgcagccauguucccacccuggagugcugccgcaggggugccuuuuagccuaaacgugcaguacaggaucaacggccugggagucaccauggauguucucaauaaaaaccaaaagcugauagccaaugcuuucaacaaagcccuuuugucgauucagaauggcuuuacggcaacaaacucugcgcuggcuaagauccaguccgugguaaaugccaacgcacaggccuuaaauagccuccugcaacagcuuuucaacaaguuuggggcuaucucaaguucucugcaggagauucuaucccggcucgaucccccagaagcccaggugcaaaucgaccgccugauuaauggaagauugaccgcacugaacgcuuaugucagccagcaguuaucagacauaacucucaucaaagccggcgcgaguagggccauugagaaggugaaugaauguguuaaaagccaauccccucguaucaacuucugcgguaaugggaaccacauucugucucuugugcagaacgcucccuacggacuguuguuuauccauuucagcuauaagccaacauccuuuaaaaccguccucgugucaccgggccugugucuaucuggugaucggggcauagcaccuaagcagggguacuucaucaagcagaaugacaguuggauguucacuggaucgagcuauuacuaucccgagccaauuuccgauaaaaacguuguguuuaugaacucuugcucagucaauuucaccaaggcccccuuuaucuaccugaauaacagcauuccuaaucuuuccgacuucgaggcugaacucagucugugguuuaaaaaccacacaucuaucgccccaaauuugacguucaacagccauauaaaugcaaccuuucuggacuuauacuaugagaugaacguaauucaagaaucaaucaagucccucaauuga

SEQ ID NO: 15012 - RNA, 3912 nt, Artificial Sequence
  HCoV/HKU1/N5__Q0ZME7.1 spike protein CDS human (variant)
auguuccugaucauuuuuauacuccccaccacacuugccgugaucggcgacuucaacugcacuaauagcuuuauuaacgauuacaauaagacgaucccuagaauuuccgaggacgucguugaugugucucugggguugggaaccuauuacguauuaaacaggguguaucugaauacaacucuacucuucaccgguuacuuuccaaaaucaggcgcuaacuuccgggaccuggcacuuaaggggaguaucuaucugagcacauugugguacaaaccgcccuuucucuccgauuucaauaacggaauauuuucuaaggucaaaaauaccaagcuguaugugaacaauacucuguacucggaguucucaacaaucguuauuggcagcguguuugucaacaccaguuacacgaucgugguacagccucacaaugguauucucgaaaucacugccugucaauauaccaugugcgaauacccacauacaguuuguaaguccaaagggucuauacgcaacgagagcuggcacauugacuccucagaacccuuaugccuguucaagaaaaauuuuacuuauaacgugagugcggauuggcuuuacuuccauuucuaucaggagcgaggagucuuuuacgcuuauuacgccgacgugggcaugccuaccacauucuuguuuagccuguaccuaggcaccauccucucucacuauuacgugaugccacugacguguaacgcaauuuccucaaauacugauaacgagacacuugaauauugggucacuccccugagccguagacaguacuugcucaauuucgacgagcaugggguuaucaccaacgccguggauugcaguucuuccuuucugagcgaaauccaguguaagacacaaucguucgcuccuaauaccggaguauaugacuuaucugguuuuacggugaaaccagucgcaaccguguacaggcggauuccgaaccugcccgauugcgacauagacaauuggcucaacaauguuuccgugccuucaccacuuaacugggagcgcagaaucuucaguaauuguaacuuuaaucugagcacauugcuaaggcugguccacguggauuccuucucuugcaacaaucucgacaagagcaagauuuuuggcucauguuucaacaguaucacuguagauaaauuugccauacccaaccggcgccgagacgaucugcagcuuggguccagcggauuccugcagucuucaaauuauaagauugacaucaguagcuccucuugccaguuguacuacucgcucccucugguuaacgugaccaucaauaacuucaauccaagcuccuggaacagaagguauggcuuugguucauucaauuuaaguucuuacgaugucguguauagcgaccacugcuuuuccgucaacucagauuucugucccugcgcugacccgagcgugguuaauucuugugccaaauccaagccucccagugcgauuugcccagcagggacaaaauaccggcauugugaucuggacacuacccuauaugugaagaacuggugccguuguagcugccucccugaccccaucucuacauacuccccaaauaccuguccccagaaaaagguagucgugggaauuggcgagcacugcccuggccuggggauaaacgaagagaaguguggaacucaacuuaaucauucaaguugcuuuugcagcccagaugccuucuuggguuggucguuugacuccuguaucucuaacaaucgcugcaacauuuucagcaacuuuaucuucaauggcaucaacucagggacgacauguaguaaugaucugcucuauuccaacaccgaaauuucuacuggaguuugcgugaauuacgaccuguacggcauaaccggucaggggaucuuuaaagaggucagcgcugccuauuacaacaauuggcagaaccuucuguaugauuccaauggcaacauuaucggauucaaggacuuuuugacaaauaaaaccuacacuauucucccguguuauucaggcagagugagcgcagcuuucuaccaaaacaguucuucccccgcccuguuauauaggaaucugaagugcagcuacguacuaaacaauaucucguucauaucacagccuuuuuacuucgauucuuaucucgggugugugcugaacgcgguuaaccuuacaaguuacuccgucagcucuugcgacuugcggaugggaagcgguuuuuguaucgauuaugcccugccauccucaggcgggaguggaagcggcauuucuucccccuaccgauucgugacguuugaaccuuucaaugugucauuugucaacgacaguguugagaccguggguggccucuucgagauccagauuccaacuaauuuuacaaucgcagggcacgaagaguucauacaaaccagcucccccaaagugacaauugauugcucugcuuuuguauguucgaacuaugccgcuugccacgaccuguuaagcgaauacggaacuuucugcgauaauaucaacucaauucugaaugaggucaacgaccuuuuggacaucacccagcuccagguggccaaugcacugaugcagggcguuacgcuauccaguaaccugaauaccaaccuccauucugauguggacaauauagauuucaagagccugcuuggguguuugggaucccaaugcgguucaucuagccgcagucuguuagaagaccuccuguuuaacaaggucaaacuuuccgaugugggcuucguugaggccuauaauaacuguacagggggaagcgagaucagagaccuguugugcgugcagucuuuuaauggcauuaagguacucccgccuauccugucagaaacucagauuuccgguuacaccacagcugcgacugucgcagccauguucccacccuggagugcugccgcaggggugccuuuuagccuaaacgugcaguacaggaucaacggccugggagucaccauggauguucucaauaaaaaccaaaagcugauagccaaugcuuucaacaaagcccuuuugucgauucagaauggcuuuacggcaacaaacucugcgcuggcuaagauccaguccgugguaaaugccaacgcacaggccuuaaauagccuccugcaacagcuuuucaacaaguuuggggcuaucucaaguucucugcaggagauucuaucccggcucgaucccccagaagcccaggugcaaaucgaccgccugauuaauggaagauugaccgcacugaacgcuuaugucagccagcaguuaucagacauaacucucaucaaagccggcgcgaguagggccauugagaaggugaaugaauguguuaaaagccaauccccucguaucaacuucugcgguaaugggaaccacauucugucucuugugcagaacgcucccuacggacuguuguuuauccauuucagcuauaagccaacauccuuuaaaaccguccucgugucaccgggccugugucuaucuggugaucggggcauagcaccuaagcagggguacuucaucaagcagaaugacaguuggauguucacuggaucgagcuauuacuaucccgagccaauuuccgauaaaaacguuguguuuaugaacucuugcucagucaauuucaccaaggcccccuuuaucuaccugaauaacagcauuccuaaucuuuccgacuucgaggcugaacucagucugugguuuaaaaaccacacaucuaucgccccaaauuugacguucaacagccauauaaaugcaaccuuucuggacuuauacuaugagaugaacguaauucaagaaucaaucaagucccucaauggcggguacauccccgaggcgccucgagauggacaggccuaugugagaaaagacggcgaguggguucugcuuaguacuuucuga

SEQ ID NO: 15013 - RNA, 3516 nt, Artificial Sequence
  HCoV/229E/BN1/GER/2015__AOG74783.1 spike protein CDS human (1-1171)
auguucgugcugcucgucgccuacgcacuucugcacaucgcuggcugccagaccacaaacgggacuaauacgagccauuccguuuguaacggaugcgugggucacucugagaauguauuugccguggaaucaggcggguauauucccaguaacuucgcguuuaauaacugguucuuguuaaccaauacaagcuccgucguggacggaguugugagaucuuuucaaccucugcuacucaacugucuguggucggucucaggcagccaguucacuaccgguuuuguguacuucaaugggacaggaaggggcgcuugcaagggcuuuuauaguaacgccuccucugauguaauacgguacaauaucaacuucgaggaaaaucuucgccgagggaccauucuguuuaaaacuagcuauggagcaguuguguucuacuguacaaacaauaccuuggucuccggugacgcccauaucccaucaggcacggugcucgggaacuuuuauugcuucgugaacacuaccauuggaaaugagacaacuagcgcuuucgucggcgcacugccgaagaccguucgugaauuugugaucagcagaacaggucacuucuacauaaacggguacagguauuuuucucugggagauguagaggccgugaauuucaacgucaccaaugcugccacgacuguguguacaguugcgcucgcauccuacgccgacguguuagucaacgugucacagaccgcuaucgccaauauuaucuauugcaacagcguaauuaaucggcugcgcugugaucagcuuaguuuugacguucccgauggcuucuacucuacuuccccuauccaaccaguggaguugcccgucagcauagugucgcugccugucuaucauaaacacacauuuauugugcuauacguuaacuucgaacacagaaggggcccagggaagugcuauaauugucggcccgcagugaucaacauuacccucgcuaauuuuaacgagacgaaaggaccucugugcguagacaccucucauuucacaacucaguuugucgauaaugugaaguuggcccgcugguccgcgucaaucaacaccgguaacugcccauucaguuuuggcaagguuaauaacuucgugaaauucgggagcgucuguuuuucccugaaggacaucccgggaggcugcgccaugcccauuauggcaaauuuggugaacucuaaaagccacaauauagguucacucuacguaaguugguccgauggggacgugaucacaggcguuccuaagccagucgaaggagugagcucuuucaugaacgugacucugaauaaauguaccaaguacaacauuuaugaugucucaggcguuggggugauccgaauaaguaaugacacauuuuuaaacggaauuaccuacacuagcacguccgguaaucugcucggcuucaaggacgugacaaacgggaccaucuauucuaucacucccugcaauccuccagaucagcuuguagucuaccagcaagcugugguuggagccaugcugucggagaacuuuaccagcuauggcuucuccaauguggucgagaugcccaaauuuuucuacgcuucaaacgguacauauaacuguaccgacgccguguugacuuacaguucuuuugggguuugcgcagauggcagcauuaucgccgugcagccgagaaauguauccuacgacucagucagcgcuauugugacagcgaaccuaucuauaccuuucaauuggacgaccuccgugcaggucgaauaucugcagaucacaaguacucccauuguuguggauuguagcaccuacguaugcaacggaaaugugaggugugucgagcuccugaagcaauauacaucugcaugcaaaacuaucgaagacgcccuucggaacuccgcuaugcuggagucagccgaugugagugaaauguugaccuuugacaagaaagcauucacgcucgccaauguuagcucguuuggcgauuacaaccuguccucugugaucccaaguuuaccucguucagggagucgcgucgcuggaagauccgccauugaggacauacuguucucuaagcuagugaccagcggucucggcacaguugaugcagacuauaaaaaguguacuaaggggcuguccaucgcggaccuugcuugcgcccaguacuauaauggaauuaugguguugcccggcgucgcagaugccgagaggauggcuauguacaccgguucacugaucgggggcauugcccucggaggccugacaagcgcagcuaguaucccauucucucuugccauacagucccggcugaacuacguagcguugcaaacugacgugcuccaggaaaaucagcgaauccuggccgcuagcuuuaacaaagcaaugaccaauauuguugaugccuucacgggggugaacgacgcuaucacacagaccucgcaagccuuacagacugucgcaacagcgcugaauaagauucaggaugugguaaaccagcaaggaaacucacuaaaucaucucaccucucagcugcgccagaacuuucaggccaucaguuccagcauacaagcuauuuaugacagacuugauaucauucaggccgaccaacagguggauagguugaucacuggccggcuggcagcucucaaugucuucguuucucacacccugacaaaauacacggaggugcgcgccagcagacaguuagcacagcagaaggugaacgaaugcgucaaaucccaaucaaagagguaugguuuuugugggaauggaacccacauauucagucuggugaacgccgcucccgagggccuuguuuuucuucauacuguacuccugccuacacaguacaaggacguggaagcguggagcggucuaugcgucgauggcaucaauggguaugugcugcgucagccaaaccucgcccuguacaaagagggaaauuauuaccggauuaccucucgaaucauguucgagccgaggauucccacaaucgcagacuuuguucagauagaaaacuguaaugugacuuucgucaacauuuccagaucagagcuucaaaccaucgugccugaauacaucgauguaaauaagacguugcaggagcugaguuauaaauuaccaaacuacacaguccccgaccucgugguugaacaguauaaucagaccauucugaaccuuacuagcgagaucuccacccuggagaauaagucugcugaauugaacuacacagugcaaaaacuccagacucugauugacaacauaaauucgacccuagucgaucugaaguggcucaaccgcguggagacauauaucaaguggccuugguggguuuggcugugcauuagcgugguccuuaucuuugugguaucaauguugcuguuauguugcuguuccacgggcugcuguggguucuucaguugcuuugccucuagcauucggggauguugcgaauccaccaaacucccauacuaugacguggagaagauccacauacaguga

SEQ ID NO: 15014 - RNA, 3516 nt, Artificial Sequence
  HCoV/229E/BN1/GER/2015__AOG74783.1 spike protein CDS human (1-1171)(I869P_I870P)
auguucgugcugcucgucgccuacgcacuucugcacaucgcuggcugccagaccacaaacgggacuaauacgagccauuccguuuguaacggaugcgugggucacucugagaauguauuugccguggaaucaggcggguauauucccaguaacuucgcguuuaauaacugguucuuguuaaccaauacaagcuccgucguggacggaguugugagaucuuuucaaccucugcuacucaacugucuguggucggucucaggcagccaguucacuaccgguuuuguguacuucaaugggacaggaaggggcgcuugcaagggcuuuuauaguaacgccuccucugauguaauacgguacaauaucaacuucgaggaaaaucuucgccgagggaccauucuguuuaaaacuagcuauggagcaguuguguucuacuguacaaacaauaccuuggucuccggugacgcccauaucccaucaggcacggugcucgggaacuuuuauugcuucgugaacacuaccauuggaaaugagacaacuagcgcuuucgucggcgcacugccgaagaccguucgugaauuugugaucagcagaacaggucacuucuacauaaacggguacagguauuuuucucugggagauguagaggccgugaauuucaacgucaccaaugcugccacgacuguguguacaguugcgcucgcauccuacgccgacguguuagucaacgugucacagaccgcuaucgccaauauuaucuauugcaacagcguaauuaaucggcugcgcugugaucagcuuaguuuugacguucccgauggcuucuacucuacuuccccuauccaaccaguggaguugcccgucagcauagugucgcugccugucuaucauaaacacacauuuauugugcuauacguuaacuucgaacacagaaggggcccagggaagugcuauaauugucggcccgcagugaucaacauuacccucgcuaauuuuaacgagacgaaaggaccucugugcguagacaccucucauuucacaacucaguuugucgauaaugugaaguuggcccgcugguccgcgucaaucaacaccgguaacugcccauucaguuuuggcaagguuaauaacuucgugaaauucgggagcgucuguuuuucccugaaggacaucccgggaggcugcgccaugcccauuauggcaaauuuggugaacucuaaaagccacaauauagguucacucuacguaaguugguccgauggggacgugaucacaggcguuccuaagccagucgaaggagugagcucuuucaugaacgugacucugaauaaauguaccaaguacaacauuuaugaugucucaggcguuggggugauccgaauaaguaaugacacauuuuuaaacggaauuaccuacacuagcacguccgguaaucugcucggcuucaaggacgugacaaacgggaccaucuauucuaucacucccugcaauccuccagaucagcuuguagucuaccagcaagcugugguuggagccaugcugucggagaacuuuaccagcuauggcuucuccaauguggucgagaugcccaaauuuuucuacgcuucaaacgguacauauaacuguaccgacgccguguugacuuacaguucuuuugggguuugcgcagauggcagcauuaucgccgugcagccgagaaauguauccuacgacucagucagcgcuauugugacagcgaaccuaucuauaccuuucaauuggacgaccuccgugcaggucgaauaucugcagaucacaaguacucccauuguuguggauuguagcaccuacguaugcaacggaaaugugaggugugucgagcuccugaagcaauauacaucugcaugcaaaacuaucgaagacgcccuucggaacuccgcuaugcuggagucagccgaugugagugaaauguugaccuuugacaagaaagcauucacgcucgccaauguuagcucguuuggcgauuacaaccuguccucugugaucccaaguuuaccucguucagggagucgcgucgcuggaagauccgccauugaggacauacuguucucuaagcuagugaccagcggucucggcacaguugaugcagacuauaaaaaguguacuaaggggcuguccaucgcggaccuugcuugcgcccaguacuauaauggaauuaugguguugcccggcgucgcagaugccgagaggauggcuauguacaccgguucacugaucgggggcauugcccucggaggccugacaagcgcagcuaguaucccauucucucuugccauacagucccggcugaacuacguagcguugcaaacugacgugcuccaggaaaaucagcgaauccuggccgcuagcuuuaacaaagcaaugaccaauauuguugaugccuucacgggggugaacgacgcuaucacacagaccucgcaagccuuacagacugucgcaacagcgcugaauaagauucaggaugugguaaaccagcaaggaaacucacuaaaucaucucaccucucagcugcgccagaacuuucaggccaucaguuccagcauacaagcuauuuaugacagacuugaucccccucaggccgaccaacagguggauagguugaucacuggccggcuggcagcucucaaugucuucguuucucacacccugacaaaauacacggaggugcgcgccagcagacaguuagcacagcagaaggugaacgaaugcgucaaaucccaaucaaagagguaugguuuuugugggaauggaacccacauuuucagucuggugaacgccgcuccagagggccuuguuuuucuucauacuguacuccugccgacacaguacaaggacguggaagcguggagcggucuaugcgucgauggcaucaauggguaugugcugcgucagcccaaccucgcccuguacaaagagggaaauuauuaccggauaaccucucgaaucauguucgagccuaggauuccaacaaucgcagacuuuguucagauugaaaacuguaaugugacuuucgucaacaucuccagaucagagcuucaaaccauagugcccgaauacauugauguaaauaagacguugcaggagcugaguuauaaauuaccuaacuacacagucccagaccucgugguugaacaguauaaucagaccauccugaaccuuacuagcgagaucuccacccuggagaauaagucugcugaauugaacuacacagugcaaaaacuccagacucugauugacaacaucaauucgacccuagucgaucugaaguggcucaaccgcguggagacauauauuaaguggcccugguggguuuggcugugcauaagcgugguccuuaucuuugugguaucaauguugcuguuauguugcuguuccacgggcugcuguggguucuucaguugcuuugccucuagcauucggggauguugcgaauccaccaaacucccguacuaugacguggagaagauccacauucaguga

SEQ ID NO: 15015 - RNA, 3327 nt, Artificial Sequence
  HCoV/229E/BN1/GER/2015__AOG74783.1 spike protein CDS human (variant)
auguucgugcugcucgucgccuacgcacuucugcacaucgcuggcugccagaccacaaacgggacuaauacgagccauuccguuuguaacggaugcgugggucacucugagaauguauuugccguggaaucaggcggguauauucccaguaacuucgcguuuaauaacugguucuuguuaaccaauacaagcuccgucguggacggaguugugagaucuuuucaaccucugcuacucaacugucuguggucggucucaggcagccaguucacuaccgguuuuguguacuucaaugggacaggaaggggcgcuugcaagggcuuuuauaguaacgccuccucugauguaauacgguacaauaucaacuucgaggaaaaucuucgccgagggaccauucuguuuaaaacuagcuauggagcaguuguguucuacuguacaaacaauaccuuggucuccggugacgcccauaucccaucaggcacggugcucgggaacuuuuauugcuucgugaacacuaccauuggaaaugagacaacuagcgcuuucgucggcgcacugccgaagaccguucgugaauuugugaucagcagaacaggucacuucuacauaaacggguacagguauuuuucucugggagauguagaggccgugaauuucaacgucaccaaugcugccacgacuguguguacaguugcgcucgcauccuacgccgacguguuagucaacgugucacagaccgcuaucgccaauauuaucuauugcaacagcguaauuaaucggcugcgcugugaucagcuuaguuuugacguucccgauggcuucuacucuacuuccccuauccaaccaguggaguugcccgucagcauagugucgcugccugucuaucauaaacacacauuuauugugcuauacguuaacuucgaacacagaaggggcccagggaagugcuauaauugucggcccgcagugaucaacauuacccucgcuaauuuuaacgagacgaaaggaccucugugcguagacaccucucauuucacaacucaguuugucgauaaugugaaguuggcccgcugguccgcgucaaucaacaccgguaacugcccauucaguuuuggcaagguuaauaacuucgugaaauucgggagcgucuguuuuucccugaaggacaucccgggaggcugcgccaugcccauuauggcaaauuuggugaacucuaaaagccacaauauagguucacucuacguaaguugguccgauggggacgugaucacaggcguuccuaagccagucgaaggagugagcucuuucaugaacgugacucugaauaaauguaccaaguacaacauuuaugaugucucaggcguuggggugauccgaauaaguaaugacacauuuuuaaacggaauuaccuacacuagcacguccgguaaucugcucggcuucaaggacgugacaaacgggaccaucuauucuaucacucccugcaauccuccagaucagcuuguagucuaccagcaagcugugguuggagccaugcugucggagaacuuuaccagcuauggcuucuccaauguggucgagaugcccaaauuuuucuacgcuucaaacgguacauauaacuguaccgacgccguguugacuuacaguucuuuugggguuugcgcagauggcagcauuaucgccgugcagccgagaaauguauccuacgacucagucagcgcuauugugacagcgaaccuaucuauaccuuucaauuggacgaccuccgugcaggucgaauaucugcagaucacaaguacucccauuguuguggauuguagcaccuacguaugcaacggaaaugugaggugugucgagcuccugaagcaauauacaucugcaugcaaaacuaucgaagacgcccuucggaacuccgcuaugcuggagucagccgaugugagugaaauguugaccuuugacaagaaagcauucacgcucgccaauguuagcucguuuggcgauuacaaccuguccucugugaucccaaguuuaccucguucagggagucgcgucgcuggaagauccgccauugaggacauacuguucucuaagcuagugaccagcggucucggcacaguugaugcagacuauaaaaaguguacuaaggggcuguccaucgcggaccuugcuugcgcccaguacuauaauggaauuaugguguugcccggcgucgcagaugccgagaggauggcuauguacaccgguucacugaucgggggcauugcccucggaggccugacaagcgcagcuaguaucccauucucucuugccauacagucccggcugaacuacguagcguugcaaacugacgugcuccaggaaaaucagcgaauccuggccgcuagcuuuaacaaagcaaugaccaauauuguugaugccuucacgggggugaacgacgcuaucacacagaccucgcaagccuuacagacugucgcaacagcgcugaauaagauucaggaugugguaaaccagcaaggaaacucacuaaaucaucucaccucucagcugcgccagaacuuucaggccaucaguuccagcauacaagcuauuuaugacagacuugaucccccucaggccgaccaacagguggauagguugaucacuggccggcuggcagcucucaaugucuucguuucucacacccugacaaaauacacggaggugcgcgccagcagacaguuagcacagcagaaggugaacgaaugcgucaaaucccaaucaaagagguaugguuuuugugggaauggaacccacauuuucagucuggugaacgccgcuccagagggccuuguuuuucuucauacuguacuccugccgacacaguacaaggacguggaagcguggagcggucuaugcgucgauggcaucaauggguaugugcugcgucagcccaaccucgcccuguacaaagagggaaauuauuaccggauaaccucucgaaucauguucgagccuaggauuccaacaaucgcagacuuuguucagauugaaaacuguaaugugacuuucgucaacaucuccagaucagagcuucaaaccauagugcccgaauacauugauguaaauaagacguugcaggagcugaguuauaaauuaccuaacuacacagucccagaccucgugguugaacaguauaaucagaccauccugaaccuuacuagcgagaucuccacccuggagaauaagucugcugaauugaacuacacagugcaaaaacuccagacucugauugacaacaucaauucgacccuagucgaucugaaguggcucaaccgcguggagacauga

SEQ ID NO: 15016 - RNA, 3408 nt, Artificial Sequence
  HCoV/229E/BN1/GER/2015__AOG74783.1 spike protein CDS human (variant)
auguucgugcugcucgucgccuacgcacuucugcacaucgcuggcugccagaccacaaacgggacuaauacgagccauuccguuuguaacggaugcgugggucacucugagaauguauuugccguggaaucaggcggguauauucccaguaacuucgcguuuaauaacugguucuuguuaaccaauacaagcuccgucguggacggaguugugagaucuuuucaaccucugcuacucaacugucuguggucggucucaggcagccaguucacuaccgguuuuguguacuucaaugggacaggaaggggcgcuugcaagggcuuuuauaguaacgccuccucugauguaauacgguacaauaucaacuucgaggaaaaucuucgccgagggaccauucuguuuaaaacuagcuauggagcaguuguguucuacuguacaaacaauaccuuggucuccggugacgcccauaucccaucaggcacggugcucgggaacuuuuauugcuucgugaacacuaccauuggaaaugagacaacuagcgcuuucgucggcgcacugccgaagaccguucgugaauuugugaucagcagaacaggucacuucuacauaaacggguacagguauuuuucucugggagauguagaggccgugaauuucaacgucaccaaugcugccacgacuguguguacaguugcgcucgcauccuacgccgacguguuagucaacgugucacagaccgcuaucgccaauauuaucuauugcaacagcguaauuaaucggcugcgcugugaucagcuuaguuuugacguucccgauggcuucuacucuacuuccccuauccaaccaguggaguugcccgucagcauagugucgcugccugucuaucauaaacacacauuuauugugcuauacguuaacuucgaacacagaaggggcccagggaagugcuauaauugucggcccgcagugaucaacauuacccucgcuaauuuuaacgagacgaaaggaccucugugcguagacaccucucauuucacaacucaguuugucgauaaugugaaguuggcccgcugguccgcgucaaucaacaccgguaacugcccauucaguuuuggcaagguuaauaacuucgugaaauucgggagcgucuguuuuucccugaaggacaucccgggaggcugcgccaugcccauuauggcaaauuuggugaacucuaaaagccacaauauagguucacucuacguaaguugguccgauggggacgugaucacaggcguuccuaagccagucgaaggagugagcucuuucaugaacgugacucugaauaaauguaccaaguacaacauuuaugaugucucaggcguuggggugauccgaauaaguaaugacacauuuuuaaacggaauuaccuacacuagcacguccgguaaucugcucggcuucaaggacgugacaaacgggaccaucuauucuaucacucccugcaauccuccagaucagcuuguagucuaccagcaagcugugguuggagccaugcugucggagaacuuuaccagcuauggcuucuccaauguggucgagaugcccaaauuuuucuacgcuucaaacgguacauauaacuguaccgacgccguguugacuuacaguucuuuugggguuugcgcagauggcagcauuaucgccgugcagccgagaaauguauccuacgacucagucagcgcuauugugacagcgaaccuaucuauaccuuucaauuggacgaccuccgugcaggucgaauaucugcagaucacaaguacucccauuguuguggauuguagcaccuacguaugcaacggaaaugugaggugugucgagcuccugaagcaauauacaucugcaugcaaaacuaucgaagacgcccuucggaacuccgcuaugcuggagucagccgaugugagugaaauguugaccuuugacaagaaagcauucacgcucgccaauguuagcucguuuggcgauuacaaccuguccucugugaucccaaguuuaccucguucagggagucgcgucgcuggaagauccgccauugaggacauacuguucucuaagcuagugaccagcggucucggcacaguugaugcagacuauaaaaaguguacuaaggggcuguccaucgcggaccuugcuugcgcccaguacuauaauggaauuaugguguugcccggcgucgcagaugccgagaggauggcuauguacaccgguucacugaucgggggcauugcccucggaggccugacaagcgcagcuaguaucccauucucucuugccauacagucccggcugaacuacguagcguugcaaacugacgugcuccaggaaaaucagcgaauccuggccgcuagcuuuaacaaagcaaugaccaauauuguugaugccuucacgggggugaacgacgcuaucacacagaccucgcaagccuuacagacugucgcaacagcgcugaauaagauucaggaugugguaaaccagcaaggaaacucacuaaaucaucucaccucucagcugcgccagaacuuucaggccaucaguuccagcauacaagcuauuuaugacagacuugaucccccucaggccgaccaacagguggauagguugaucacuggccggcuggcagcucucaaugucuucguuucucacacccugacaaaauacacggaggugcgcgccagcagacaguuagcacagcagaaggugaacgaaugcgucaaaucccaaucaaagagguaugguuuuugugggaauggaacccacauuuucagucuggugaacgccgcuccagagggccuuguuuuucuucauacuguacuccugccgacacaguacaaggacguggaagcguggagcggucuaugcgucgauggcaucaauggguaugugcugcgucagcccaaccucgcccuguacaaagagggaaauuauuaccggauaaccucucgaaucauguucgagccuaggauuccaacaaucgcagacuuuguucagauugaaaacuguaaugugacuuucgucaacaucuccagaucagagcuucaaaccauagugcccgaauacauugauguaaauaagacguugcaggagcugaguuauaaauuaccuaacuacacagucccagaccucgugguugaacaguauaaucagaccauccugaaccuuacuagcgagaucuccacccuggagaauaagucugcugaauugaacuacacagugcaaaaacuccagacucugauugacaacaucaauucgacccuagucgaucugaaguggcucaaccgcguggagacaggcggguauauucccgaagccccgcgggacggacaggccuacguuagaaaggauggcgagugggugcugcuuagcacguuuuga

SEQ ID NO: 15017 - RNA, 4071 nt, Artificial Sequence
  HCoV/NL63/RPTEC/2004__AFV53148.1 spike protein CDS human (1-1356)
augaagcuguuccucauccuucugguguugcccuuagccagcugcuuuuucaccuguaacuccaaugcuaaccugucuaugcuacagcucggcgucccugacaauucaaguacaauuguuacugggcugcuuccaacgcacugguuuugcgcaaaccaaagcaccuccguguacucugccaauggauucuuuuauauagauguagguaaccauagaucggcguucgcucugcacacaggcuacuaugacgccaaucaguacuauaucuacgugacuaacgagauuggguugaaugcaucagucacccucaaaaucuguaaguuuagcaggaacacaaccuucgauuuucugaguaaugccuccucuagcuucgacugcauugugaaccugcucuuuacugaacaguuaggagcuccgcugggcaucacaauauccggugagaccguucggcuucauuuguauaaugugacgcgcacuuucuacguccccgcagccuacaaacugaccaagcuaucagugaaauguuauuuuaacuacaguugcguauucagcguugugaaugcuacagucacugugaacgugaccacacacaacgggcgagucguuaauuauaccgugugugaugacugcaacggauacacggauaauaucuucucuguacagcaagacggccguauuccuaacggcuuuccauucaauaacugguuucuccugacuaauggguccacacuuguggauggagucucaagacuguaucagcccuugaggcucaccugucuguggccugugccagguuuaaagagcaguacuggcuucguuuacuuuaacgccacagggucugacgugaauugcaacggauaucagcauaauuccgucguggauguaaugcgguacaaccugaauuucagcgcgaacucgcucgacaaucuuaagucuggcguuaucguguuuaaaacccugcaguacgaugucuuguucuauuguuccaacucaaguagcggugugcuagacacgaccauucccuuugggccuuccucucaaccauacuauugcuucaucaacagcacaauaaauacuacccacgucucaacauuugugggcauucugccgcccacuguucgcgaaaucgugguagcaagaaccggacaguucuacauuaacggcuuuaaguauuucgaccucggguucaucgaggccgucaauuuuaacgugacaaccgcuagugccacugauuucuggacgguugcauuugcuacauucguggacguccuggugaauguauccgccaccaacauccagaaucuucuguacugcgauagcccuuuugaaaaauugcagugugagcaccuccaauucggacugcaggacgguuuuuauucugcgaacuucuuagaugacaaugugcugccagagacuuacguugcccuacccauuuacuaucagcauaccgauauaaacuuuacagcaaccgcuucauucggcgggaguugcuacgucuguaagccucaccaagugaauaucagccucaacggaaauacuuccgugugcgucaggacaucucauuuuucgauucgguauaucuacaaccgcguuaaaagcggcuccccaggugacucaaguuggcacauauaucugaagucugggacgugucccuucagcuuuuccaaacuuaauaacuuccagaaguucaagaccauuugcuuuucaacuguggaagugccgggcagcuguaacuucccuuuggaggccacauggcacuacaccucuuauacaaucguaggagcucuguacgucacuugguccgaaggcaauaguaucaccggggugcccuacccaguuagcgguauucgagaguuuucuaaccucgugcugaauaacugcacgaaauauaauaucuacgauuaugucggaaccggcauuauaagauccucaaaccagagucuugccgggggaaucacauacgugagcaauucgggcaaccuguuggguuucaagaauguuuccacugggaacauuuuuaucgugaccccuuguaaucagcccgaccaaguagcagucuaucagcagucuaucauuggcgccaugacagcugugaacgagagcagguacggacuccagaaucuguuacaacugccaaacuucuauuacgugucaaauggcgggaacaacugcacuaccgcggucaugacguacaguaauuuuggaauaugugcagaugguucccuaauccccguucggccucguaacucuagcgacaauggcauuuccgccaucauuacagcuaaccucucaaucccaagcaauuggaccacaagugugcagguagaauaucugcagauaacuucuaccccgaucguggucgacugcgccacuuacgugugcaacgggaauccccgcuguaaaaaccuuuugaagcaguauaccuccgcaugcaaaacaauugaggaugcccugagacucagcgcucaucuggaaacgaaugacguuucgucaauguuaaccuucgauucuaacgccuuuagucuggcaaaugugacuuccuucggagacuacaaccuuagcucugucuugccucaaaggaauauccggagcucccgaauugcgggccgcucagcucucgaggaucugcuauuuaguaaggugguuacaagcggucuggggaccguggacgucgauuauaagucuuguacaaaaggccucuccaucgccgaccuggcaugcgcccaguacuauaacggaauaaugguacuuccaggcguggcugaugccgaaagaauggcaauguacacugggucauugauuggaggcaugguucuggguggguuaaccagugcugccgcgauccccuucagccucgcccugcaggcuaggcuuaauuacguggcacugcagacggacgucuugcaagagaaccagaagauucucgccgcuuccuucaauaaagccaucaacaacauaguggcaucuuuuucgagcguaaaugaugcgaucacacagaccgccgaggcuauucacacugugaccaucgcccugaacaagauucaagacgucguuaaucagcagggaucagcacuaaaccaucugacaucccagcuccggcacaauuuccaagcuaucaguaacucuauacaggccauuuaugaucgccuggacagcauccaggcagaccagcaaguggauagacuuaucacuggcagguuggccgcucugaaugcguuugugucccaggucuuaaacaaauacaccgaagugcgugguucacggcgacucgcccagcagaagauuaaugaguguguuaagucucaaagcaacagauauggcuucugcgggaauggaacacauaucuuuaguauuguaaacuccgcaccugacggccugcuuuuccugcacacggugcuacucccaaccgauuacaaaaaugucaaggcuuggagcgggauauguguggacggaaucuauggcuacguucugaggcagcccaacuuggugcuguauucugauaauggugucuuucgcgugacuucacggauuauguuccagccgagauuaccuguacucuccgacuuuguccaaaucuacaacugcaacgugacauucguuaauauuaguaggguggaacugcacaccgucaucccagauuacguggacguuaacaaaacucuucaggaguuugcccagaaucugcccaaguaugugaaaccuaacuucgauuugacacccuuuaaucucaccuaccugaaccuaagcucggaacugaagcagcuugaggccaagacggcuucucucuuccaaacuaccgucgagcugcagggguugauagaccagaucaauuccacauauguggaucugaaauuacucaaccgcuucgaaaauuacauuaaguggccaugguggguauggcugaucauuagcgugguuuuugucgugcuucugucauugcucguguucuguugccugaguaccggauguugcggcugcuguaacugccuaacuucuuccaugcgagguuguugcgacuguggcagcacaaaacugccuuauuacgaguuugaaaagguccauguacaguga

SEQ ID NO: 15018 - RNA, 4071 nt, Artificial Sequence
  HCoV/NL63/RPTEC/2004__AFV53148.1 spike protein CDS human (1-1356)(S1052P_I1053P)
augaagcuguuccucauccuucugguguugcccuuagccagcugcuuuuucaccuguaacuccaaugcuaaccugucuaugcuacagcucggcgucccugacaauucaaguacaauuguuacugggcugcuuccaacgcacugguuuugcgcaaaccaaagcaccuccguguacucugccaauggauucuuuuauauagauguagguaaccauagaucggcguucgcucugcacacaggcuacuaugacgccaaucaguacuauaucuacgugacuaacgagauuggguugaaugcaucagucacccucaaaaucuguaaguuuagcaggaacacaaccuucgauuuucugaguaaugccuccucuagcuucgacugcauugugaaccugcucuuuacugaacaguuaggagcuccgcugggcaucacaauauccggugagaccguucggcuucauuuguauaaugugacgcgcacuuucuacguccccgcagccuacaaacugaccaagcuaucagugaaauguuauuuuaacuacaguugcguauucagcguugugaaugcuacagucacugugaacgugaccacacacaacgggcgagucguuaauuauaccgugugugaugacugcaacggauacacggauaauaucuucucuguacagcaagacggccguauuccuaacggcuuuccauucaauaacugguuucuccugacuaauggguccacacuuguggauggagucucaagacuguaucagcccuugaggcucaccugucuguggccugugccagguuuaaagagcaguacuggcuucguuuacuuuaacgccacagggucugacgugaauugcaacggauaucagcauaauuccgucguggauguaaugcgguacaaccugaauuucagcgcgaacucgcucgacaaucuuaagucuggcguuaucguguuuaaaacccugcaguacgaugucuuguucuauuguuccaacucaaguagcggugugcuagacacgaccauucccuuugggccuuccucucaaccauacuauugcuucaucaacagcacaauaaauacuacccacgucucaacauuugugggcauucugccgcccacuguucgcgaaaucgugguagcaagaaccggacaguucuacauuaacggcuuuaaguauuucgaccucggguucaucgaggccgucaauuuuaacgugacaaccgcuagugccacugauuucuggacgguugcauuugcuacauucguggacguccuggugaauguauccgccaccaacauccagaaucuucuguacugcgauagcccuuuugaaaaauugcagugugagcaccuccaauucggacugcaggacgguuuuuauucugcgaacuucuuagaugacaaugugcugccagagacuuacguugcccuacccauuuacuaucagcauaccgauauaaacuuuacagcaaccgcuucauucggcgggaguugcuacgucuguaagccucaccaagugaauaucagccucaacggaaauacuuccgugugcgucaggacaucucauuuuucgauucgguauaucuacaaccgcguuaaaagcggcuccccaggugacucaaguuggcacauauaucugaagucugggacgugucccuucagcuuuuccaaacuuaauaacuuccagaaguucaagaccauuugcuuuucaacuguggaagugccgggcagcuguaacuucccuuuggaggccacauggcacuacaccucuuauacaaucguaggagcucuguacgucacuugguccgaaggcaauaguaucaccggggugcccuacccaguuagcgguauucgagaguuuucuaaccucgugcugaauaacugcacgaaauauaauaucuacgauuaugucggaaccggcauuauaagauccucaaaccagagucuugccgggggaaucacauacgugagcaauucgggcaaccuguuggguuucaagaauguuuccacugggaacauuuuuaucgugaccccuuguaaucagcccgaccaaguagcagucuaucagcagucuaucauuggcgccaugacagcugugaacgagagcagguacggacuccagaaucuguuacaacugccaaacuucuauuacgugucaaauggcgggaacaacugcacuaccgcggucaugacguacaguaauuuuggaauaugugcagaugguucccuaauccccguucggccucguaacucuagcgacaauggcauuuccgccaucauuacagcuaaccucucaaucccaagcaauuggaccacuucggugcagguagaauaucugcagauaacaucuaccccgaucguggucgacugcgccacuuacgugugcaacgggaauccccgcuguaaaaaccuuuugaagcaguauaccuccgcaugcaaaacaauugaggaugcccugagacucagcgcucaucuggaaacgaaugacguuucgucaauguuaaccuucgauucuaacgccuuuagucuggcaaaugugacuuccuucggagacuacaaccuuagcucugucuugccucaaaggaauauccggagcucccgaauugcgggccgcucagcucucgaggaucugcuauuuaguaaggugguuacaagcggucuggggaccguggacgucgauuauaagucuuguacaaaaggccucuccaucgccgaccuggcaugcgcccaguacuauaacggaauaaugguacuuccaggcguggcugaugccgaaagaauggcaauguacacugggucauugauuggaggcaugguucuggguggguuaaccagugcugccgcgauccccuucagccucgcccugcaggcuaggcuuaauuacguggcacugcagacggacgucuugcaagagaaccagaagauucucgccgcuuccuucaauaaagccaucaacaacauaguggcaucuuuuucgagcguaaaugaugcgaucacacagaccgccgaggcuauucacacugugaccaucgcccugaacaagauucaagacgucguuaaucagcagggaucagcacuaaaccaucugacaucccagcuccggcacaauuuccaagcuaucaguaacucuauacaggccauuuaugaucgccuggacccuccacaggcagaccagcaaguggauagacuuaucacuggcagguuggccgcucugaaugcguuugugagccaggucuuaaacaaauacaccgaagugcgugguucccggcgacucgcccagcagaagaucaaugaguguguuaagucacaaucuaacagauauggcuucugcgggaauggaacacauauuuuuagcaucguaaacagugcacccgacggccugcuuuuccugcacacggugcuacucccgaccgauuacaaaaaugucaaggcuugguccgggauuuguguggacggaauauauggcuacguucugaggcagccuaacuuggugcuguauagcgauaauggugucuuucgcgugacuucucggaucauguuccagccaagauuacccguacucucagacuuuguccaaauuuacaacugcaacgugacauucguuaauaucuccaggguggaacugcacaccgucauuccugauuacguggacguuaacaaaacucuucaggaguuugcccagaaucugcccaaguaugugaaaccaaacuucgauuugacaccuuuuaaucucaccuaccugaaccuaaguagcgaacugaagcagcuugaggccaagacggcuagucucuuccaaacuaccgucgagcugcagggguugaucgaccagauaaauucuacauauguggaucugaaauuacucaaccgcuucgaaaauuacaucaaguggcccugguggguauggcugauuaucuccgugguuuuugucgugcuucugagcuugcucguguucuguugccugucaaccggauguugcggcugcuguaacugccuaacaaguucuaugcgagguuguugcgacuguggcuccacuaaacugccauauuacgaguuugaaaagguccauguacaguga

SEQ ID NO: 15019 - RNA, 3876 nt, Artificial Sequence
  HCoV/NL63/RPTEC/2004__AFV53148.1 spike protein CDS human (variant)
augaagcuguuccucauccuucugguguugcccuuagccagcugcuuuuucaccuguaacuccaaugcuaaccugucuaugcuacagcucggcgucccugacaauucaaguacaauuguuacugggcugcuuccaacgcacugguuuugcgcaaaccaaagcaccuccguguacucugccaauggauucuuuuauauagauguagguaaccauagaucggcguucgcucugcacacaggcuacuaugacgccaaucaguacuauaucuacgugacuaacgagauuggguugaaugcaucagucacccucaaaaucuguaaguuuagcaggaacacaaccuucgauuuucugaguaaugccuccucuagcuucgacugcauugugaaccugcucuuuacugaacaguuaggagcuccgcugggcaucacaauauccggugagaccguucggcuucauuuguauaaugugacgcgcacuuucuacguccccgcagccuacaaacugaccaagcuaucagugaaauguuauuuuaacuacaguugcguauucagcguugugaaugcuacagucacugugaacgugaccacacacaacgggcgagucguuaauuauaccgugugugaugacugcaacggauacacggauaauaucuucucuguacagcaagacggccguauuccuaacggcuuuccauucaauaacugguuucuccugacuaauggguccacacuuguggauggagucucaagacuguaucagcccuugaggcucaccugucuguggccugugccagguuuaaagagcaguacuggcuucguuuacuuuaacgccacagggucugacgugaauugcaacggauaucagcauaauuccgucguggauguaaugcgguacaaccugaauuucagcgcgaacucgcucgacaaucuuaagucuggcguuaucguguuuaaaacccugcaguacgaugucuuguucuauuguuccaacucaaguagcggugugcuagacacgaccauucccuuugggccuuccucucaaccauacuauugcuucaucaacagcacaauaaauacuacccacgucucaacauuugugggcauucugccgcccacuguucgcgaaaucgugguagcaagaaccggacaguucuacauuaacggcuuuaaguauuucgaccucggguucaucgaggccgucaauuuuaacgugacaaccgcuagugccacugauuucuggacgguugcauuugcuacauucguggacguccuggugaauguauccgccaccaacauccagaaucuucuguacugcgauagcccuuuugaaaaauugcagugugagcaccuccaauucggacugcaggacgguuuuuauucugcgaacuucuuagaugacaaugugcugccagagacuuacguugcccuacccauuuacuaucagcauaccgauauaaacuuuacagcaaccgcuucauucggcgggaguugcuacgucuguaagccucaccaagugaauaucagccucaacggaaauacuuccgugugcgucaggacaucucauuuuucgauucgguauaucuacaaccgcguuaaaagcggcuccccaggugacucaaguuggcacauauaucugaagucugggacgugucccuucagcuuuuccaaacuuaauaacuuccagaaguucaagaccauuugcuuuucaacuguggaagugccgggcagcuguaacuucccuuuggaggccacauggcacuacaccucuuauacaaucguaggagcucuguacgucacuugguccgaaggcaauaguaucaccggggugcccuacccaguuagcgguauucgagaguuuucuaaccucgugcugaauaacugcacgaaauauaauaucuacgauuaugucggaaccggcauuauaagauccucaaaccagagucuugccgggggaaucacauacgugagcaauucgggcaaccuguuggguuucaagaauguuuccacugggaacauuuuuaucgugaccccuuguaaucagcccgaccaaguagcagucuaucagcagucuaucauuggcgccaugacagcugugaacgagagcagguacggacuccagaaucuguuacaacugccaaacuucuauuacgugucaaauggcgggaacaacugcacuaccgcggucaugacguacaguaauuuuggaauaugugcagaugguucccuaauccccguucggccucguaacucuagcgacaauggcauuuccgccaucauuacagcuaaccucucaaucccaagcaauuggaccacuucggugcagguagaauaucugcagauaacaucuaccccgaucguggucgacugcgccacuuacgugugcaacgggaauccccgcuguaaaaaccuuuugaagcaguauaccuccgcaugcaaaacaauugaggaugcccugagacucagcgcucaucuggaaacgaaugacguuucgucaauguuaaccuucgauucuaacgccuuuagucuggcaaaugugacuuccuucggagacuacaaccuuagcucugucuugccucaaaggaauauccggagcucccgaauugcgggccgcucagcucucgaggaucugcuauuuaguaaggugguuacaagcggucuggggaccguggacgucgauuauaagucuuguacaaaaggccucuccaucgccgaccuggcaugcgcccaguacuauaacggaauaaugguacuuccaggcguggcugaugccgaaagaauggcaauguacacugggucauugauuggaggcaugguucuggguggguuaaccagugcugccgcgauccccuucagccucgcccugcaggcuaggcuuaauuacguggcacugcagacggacgucuugcaagagaaccagaagauucucgccgcuuccuucaauaaagccaucaacaacauaguggcaucuuuuucgagcguaaaugaugcgaucacacagaccgccgaggcuauucacacugugaccaucgcccugaacaagauucaagacgucguuaaucagcagggaucagcacuaaaccaucugacaucccagcuccggcacaauuuccaagcuaucaguaacucuauacaggccauuuaugaucgccuggacccuccacaggcagaccagcaaguggauagacuuaucacuggcagguuggccgcucugaaugcguuugugagccaggucuuaaacaaauacaccgaagugcgugguucccggcgacucgcccagcagaagaucaaugaguguguuaagucacaaucuaacagauauggcuucugcgggaauggaacacauauuuuuagcaucguaaacagugcacccgacggccugcuuuuccugcacacggugcuacucccgaccgauuacaaaaaugucaaggcuugguccgggauuuguguggacggaauauauggcuacguucugaggcagccuaacuuggugcuguauagcgauaauggugucuuucgcgugacuucucggaucauguuccagccaagauuacccguacucucagacuuuguccaaauuuacaacugcaacgugacauucguuaauaucuccaggguggaacugcacaccgucauuccugauuacguggacguuaacaaaacucuucaggaguuugcccagaaucugcccaaguaugugaaaccaaacuucgauuugacaccuuuuaaucucaccuaccugaaccuaaguagcgaacugaagcagcuugaggccaagacggcuagucucuuccaaacuaccgucgagcugcagggguugaucgaccagauaaauucuacauauguggaucugaaauuacucaaccgcuucgaaaauuga

SEQ ID NO: 15020 - RNA, 3957 nt, Artificial Sequence
  HCoV/NL63/RPTEC/2004__AFV53148.1 spike protein CDS human (variant)
augaagcuguuccucauccuucugguguugcccuuagccagcugcuuuuucaccuguaacuccaaugcuaaccugucuaugcuacagcucggcgucccugacaauucaaguacaauuguuacugggcugcuuccaacgcacugguuuugcgcaaaccaaagcaccuccguguacucugccaauggauucuuuuauauagauguagguaaccauagaucggcguucgcucugcacacaggcuacuaugacgccaaucaguacuauaucuacgugacuaacgagauuggguugaaugcaucagucacccucaaaaucuguaaguuuagcaggaacacaaccuucgauuuucugaguaaugccuccucuagcuucgacugcauugugaaccugcucuuuacugaacaguuaggagcuccgcugggcaucacaauauccggugagaccguucggcuucauuuguauaaugugacgcgcacuuucuacguccccgcagccuacaaacugaccaagcuaucagugaaauguuauuuuaacuacaguugcguauucagcguugugaaugcuacagucacugugaacgugaccacacacaacgggcgagucguuaauuauaccgugugugaugacugcaacggauacacggauaauaucuucucuguacagcaagacggccguauuccuaacggcuuuccauucaauaacugguuucuccugacuaauggguccacacuuguggauggagucucaagacuguaucagcccuugaggcucaccugucuguggccugugccagguuuaaagagcaguacuggcuucguuuacuuuaacgccacagggucugacgugaauugcaacggauaucagcauaauuccgucguggauguaaugcgguacaaccugaauuucagcgcgaacucgcucgacaaucuuaagucuggcguuaucguguuuaaaacccugcaguacgaugucuuguucuauuguuccaacucaaguagcggugugcuagacacgaccauucccuuugggccuuccucucaaccauacuauugcuucaucaacagcacaauaaauacuacccacgucucaacauuugugggcauucugccgcccacuguucgcgaaaucgugguagcaagaaccggacaguucuacauuaacggcuuuaaguauuucgaccucggguucaucgaggccgucaauuuuaacgugacaaccgcuagugccacugauuucuggacgguugcauuugcuacauucguggacguccuggugaauguauccgccaccaacauccagaaucuucuguacugcgauagcccuuuugaaaaauugcagugugagcaccuccaauucggacugcaggacgguuuuuauucugcgaacuucuuagaugacaaugugcugccagagacuuacguugcccuacccauuuacuaucagcauaccgauauaaacuuuacagcaaccgcuucauucggcgggaguugcuacgucuguaagccucaccaagugaauaucagccucaacggaaauacuuccgugugcgucaggacaucucauuuuucgauucgguauaucuacaaccgcguuaaaagcggcuccccaggugacucaaguuggcacauauaucugaagucugggacgugucccuucagcuuuuccaaacuuaauaacuuccagaaguucaagaccauuugcuuuucaacuguggaagugccgggcagcuguaacuucccuuuggaggccacauggcacuacaccucuuauacaaucguaggagcucuguacgucacuugguccgaaggcaauaguaucaccggggugcccuacccaguuagcgguauucgagaguuuucuaaccucgugcugaauaacugcacgaaauauaauaucuacgauuaugucggaaccggcauuauaagauccucaaaccagagucuugccgggggaaucacauacgugagcaauucgggcaaccuguuggguuucaagaauguuuccacugggaacauuuuuaucgugaccccuuguaaucagcccgaccaaguagcagucuaucagcagucuaucauuggcgccaugacagcugugaacgagagcagguacggacuccagaaucuguuacaacugccaaacuucuauuacgugucaaauggcgggaacaacugcacuaccgcggucaugacguacaguaauuuuggaauaugugcagaugguucccuaauccccguucggccucguaacucuagcgacaauggcauuuccgccaucauuacagcuaaccucucaaucccaagcaauuggaccacuucggugcagguagaauaucugcagauaacaucuaccccgaucguggucgacugcgccacuuacgugugcaacgggaauccccgcuguaaaaaccuuuugaagcaguauaccuccgcaugcaaaacaauugaggaugcccugagacucagcgcucaucuggaaacgaaugacguuucgucaauguuaaccuucgauucuaacgccuuuagucuggcaaaugugacuuccuucggagacuacaaccuuagcucugucuugccucaaaggaauauccggagcucccgaauugcgggccgcucagcucucgaggaucugcuauuuaguaaggugguuacaagcggucuggggaccguggacgucgauuauaagucuuguacaaaaggccucuccaucgccgaccuggcaugcgcccaguacuauaacggaauaaugguacuuccaggcguggcugaugccgaaagaauggcaauguacacugggucauugauuggaggcaugguucuggguggguuaaccagugcugccgcgauccccuucagccucgcccugcaggcuaggcuuaauuacguggcacugcagacggacgucuugcaagagaaccagaagauucucgccgcuuccuucaauaaagccaucaacaacauaguggcaucuuuuucgagcguaaaugaugcgaucacacagaccgccgaggcuauucacacugugaccaucgcccugaacaagauucaagacgucguuaaucagcagggaucagcacuaaaccaucugacaucccagcuccggcacaauuuccaagcuaucaguaacucuauacaggccauuuaugaucgccuggacccuccacaggcagaccagcaaguggauagacuuaucacuggcagguuggccgcucugaaugcguuugugagccaggucuuaaacaaauacaccgaagugcgugguucccggcgacucgcccagcagaagaucaaugaguguguuaagucacaaucuaacagauauggcuucugcgggaauggaacacauauuuuuagcaucguaaacagugcacccgacggccugcuuuuccugcacacggugcuacucccgaccgauuacaaaaaugucaaggcuugguccgggauuuguguggacggaauauauggcuacguucugaggcagccuaacuuggugcuguauagcgauaauggugucuuucgcgugacuucucggaucauguuccagccaagauuacccguacucucagacuuuguccaaauuuacaacugcaacgugacauucguuaauaucuccaggguggaacugcacaccgucauuccugauuacguggacguuaacaaaacucuucaggaguuugcccagaaucugcccaaguaugugaaaccaaacuucgauuugacaccuuuuaaucucaccuaccugaaccuaaguagcgaacugaagcagcuugaggccaagacggcuagucucuuccaaacuaccgucgagcugcagggguugaucgaccagauaaauucuacauauguggaucugaaauuacucaaccgcuucgaaaauggaggcuacauccccgaggcaccacgagacggucaggccuauguacggaaggauggcgaaugggugcugcuuuccaccuuuuga

SEQ ID NO: 15021 - RNA, 3771 nt, Artificial Sequence
  Bat SARS-like CoV/WIV1__AGZ48828.1 spike protein CDS human (1-1256)
augaagcugcucgugcuugucuucgccacccugguuagcuccuacacaaucgagaaaugcuuggacuuugaugacagaacucccccugcuaacacgcaguucuuaucuucacacaggggcguguauuacccagaugacauuuuucggaguaauguacugcaucuagugcaagaucacuuccucccguuugacagcaacgucacccgcuucauaacauuugggcugaauuucgauaaccccaucauuccuuuuaaggacggaaucuauuucgcagccacugaaaaauccaaugugauucgagguuggguuuuuggcucuaccaugaacaauaagucgcagucagugaucauaaugaacaauagcacaaaccuugucauccgugcguguaauuucgagcugugcgauaacccauuuuucgugguauugaaaaguaauaacacccagauucccuccuacaucuucaauaacgcuuuuaacuguacuuucgaauauguuucuaaggacuuuaaucucgaucugggggagaagccuggaaacuucaaagaccugagagaauuuguguucaggaauaaggauggcuuucuccaugucuacagcgguuaucagccaauuuccgccgcaucaggguuacccacaggauucaacgcccugaaaccuaucuuuaagcuaccauugggcauaaauauuaccaacuuccggacgcugcuaacugcuuuuccgccccgcccugacuacuggggcaccagugcagccgcuuacuucgugggguaucucaaaccaacaacuuuuaugcugaaguacgacgagaauggaaccaucacagaugccguggacugcagccaaaacccccuugcggagcugaaguguucugucaaauccuucgaaauugauaaggguaucuaucagaccucaaauuucagaguugcaccuagcaaagaggugguaagguuuccaaacaucacgaauuugugccccuucggcgaaguguuuaacgccacuacauucccgagugucuacgcuugggagcggaagcgcauuucuaauuguguggccgacuauuccguucucuacaacagcaccucguuuucuacuuucaaaugcuaugggguguccgcaacaaagcugaaugauuuauguuuuucaaacgucuacgcugacaguuucgugguaaaaggagaugacguucgacagauagccccuggccagaccggugugaucgcggauuacaacuauaagcugcccgacgauuuuacggggugcguccucgccuggaauaccagaaacauugacgcaacacaaacuggaaauuacaacuauaaguacaggagccuucggcacggcaaacugcguccauucgagcgcgacaucuccaaugugccuuuuucucccgauggcaagccauguacacccccugcuuucaacugcuauuggccauugaaugacuacggguuuuauauaaccaacggaauugguuaccagccguacagagucgugguucuuagcuucgaacugcucaaugcccccgcuacugugugcggcccuaaacugucaaccgaucuuaucaagaaccaguguguaaauuucaacuuuaaugggcugacaggaaccggcgucuugacuccaaguuccaaaagguuccagcccuuucaacaguucggucgggacgugagcgauuuuacggacucuguucgagauccuaagacaucagagauccucgacauuaguccaugcagcuucgggggcguguccgucaucacccccggaacuaacaccucuucggaaguggccguacuguaucaggaugugaauuguacagacguuccggucgcaauucaugccgaucaauuaaccccuagcuggcgcgugcacuccacuggcaacaacguguuucagacacaggcugggugccugauaggagcggagcacgucgacacgucauacgaaugugauaucccaauuggugcaggcaucugcgccaguuaucauaccguuucuagccuaagauccacuucacaaaagagcaucguggcuuacacaaugucucucggggccgacuccaguauugcauauagcaauaacaccauagccauccccacaaauuucucuauuuccaucacuaccgaggugaugccuguaucaauggcuaaaacgagugucgacuguaacauguacauuugcggagauagcaccgagugugccaaucugcuuuugcaguauggcucguuuugcacacagcugaacagggcacucuccgguaucgcgguggaacaggaccggaauacucgcgagguuuucgcucaggugaagcaaauguacaaaacccccacacugaaggauuuugggggcuucaacuucucucagauacuuccagacccucugaaacccacuaagagauccuuuaucgaagaucuucucuucaauaaggucacccuggccgacgcaggauuuaugaaacaguacggcgaguguuuaggggauauuaacgccagggaccugaucugcgcucagaaguucaauggacuaacggugcucccaccgcugcuuacagaugacaugauugccgcauauaccgcugccuugguuucagguacugcgacagccggcuggaccuuuggggcuggagcagcccugcaaaucccuuucgcuaugcagauggccuaccguuuuaacggcauaggugugacucagaauguacucuaugaaaaccagaaacaaauugcaaaucaguucaacaaggcgaucagucagauucaagagucccugaccacaacgucuaccgccuuagggaaacugcaggaugucgugaaccagaaugcucaggcccuuaacacuuuggugaagcaacucagcuccaauuuuggcgcaaucucaagcguccugaacgacauacuaagucggcuggauaagguugaggcugaagugcagaucgaccgacucauuacaggaagacugcagucucuucagaccuacguaacacaacaguugaucagggccgcagagauucgcgccuccgcuaaucuggcggccacuaaaaugagcgaaugcguguuaggccagucgaagcgggucgacuucugugggaaaggauaucaccucaugucauuuccccaggcagcuccacauggcgugguuuuccugcacgugaccuacguccccucucaagagagaaacuuuacgacagccccugccaucugccacgaagguaaggcuuauuucccaagggaggggguguucguuuuuaauggaaccaguugguucauaacucagcgcaacuuuuucagcccccagauuaucaccacagauaauacuuuugugagcggcucuugugacgucguaaucgguauuaucaacaauaccguguacgauccucuucaaccggagcuggacagcuucaaagaagaguuggauaaguacuuuaaaaaccauacauccccagacguugaucucggcgacauuucagggauaaaugcaaguguggucaacauccagaaggaaauugaucgacugaaugagguggccaagaaccuaaaugagagccugaucgaccuccaggaacugggaaaauaugagcaguacauuaaguggcccugguauguauggcuuggcuucaucgcgggguugauagcuaucgugauggucacgauucuguuaugcuguaugaccucuugcuguuccugccucaaaggagccuguucaugcggcaguuguugcaaguuugaugaagacgacagcgagccuguucugaaaggugugaaguugcacuacacuuga

SEQ ID NO: 15022 - RNA, 3771 nt, Artificial Sequence
  Bat SARS-like CoV/WIV1__AGZ48828.1 spike protein CDS human (1-1256)(K969P_V970P)
augaagcugcucgugcuugucuucgccacccugguuagcuccuacacaaucgagaaaugcuuggacuuugaugacagaacucccccugcuaacacgcaguucuuaucuucacacaggggcguguauuacccagaugacauuuuucggaguaauguacugcaucuagugcaagaucacuuccucccguuugacagcaacgucacccgcuucauaacauuugggcugaauuucgauaaccccaucauuccuuuuaaggacggaaucuauuucgcagccacugaaaaauccaaugugauucgagguuggguuuuuggcucuaccaugaacaauaagucgcagucagugaucauaaugaacaauagcacaaaccuugucauccgugcguguaauuucgagcugugcgauaacccauuuuucgugguauugaaaaguaauaacacccagauucccuccuacaucuucaauaacgcuuuuaacuguacuuucgaauauguuucuaaggacuuuaaucucgaucugggggagaagccuggaaacuucaaagaccugagagaauuuguguucaggaauaaggauggcuuucuccaugucuacagcgguuaucagccaauuuccgccgcaucaggguuacccacaggauucaacgcccugaaaccuaucuuuaaacuuccauugggcauaaauauuaccaacuuccggacgcugcuaacugcuuuuccgccccgcccugacuacuggggcaccagugcagccgcuuacuucgugggguaucucaaaccaacaacuuuuaugcugaaguacgacgagaauggaaccaucacagaugccguggacugcagccaaaacccccuugcggagcugaaguguucugucaaauccuucgaaauugauaaggguaucuaucagaccucaaauuucagaguugcaccuagcaaagaggugguaagguuuccaaacaucacgaauuugugccccuucggcgaaguguuuaacgccacuacauucccgagugucuacgcuugggagcggaagcgcauuucuaauuguguggccgacuauuccguucucuacaacagcaccucguuuucuacuuucaaaugcuaugggguguccgcaacaaagcugaaugauuuauguuuuucaaacgucuacgcugacaguuucgugguaaaaggagaugacguucgacagauagccccuggccagaccggugugaucgcggauuacaacuauaagcugcccgacgauuuuacggggugcguccucgccuggaauaccagaaacauugacgcaacacaaacuggaaauuacaacuauaaguacaggagccuucggcacggcaaacugcguccauucgagcgcgacaucuccaaugugccuuuuucucccgauggcaagccauguacacccccugcuuucaacugcuauuggccauugaaugacuacggguuuuauauaaccaacggaauugguuaccagccguacagagucgugguuuugagcuucgaacugcucaaugcccccgcuacugugugcggcccuaaacugucaaccgaucuuaucaagaaccaguguguaaauuucaacuuuaaugggcugacaggaaccggcgucuugacuccaaguuccaaaagguuccagcccuuucaacaguucggucgggacgugagcgauuuuacggacucuguucgagauccuaagacaucagagauccucgacauuaguccaugcagcuucgggggcguguccgucaucacccccggaacuaacaccucuucggaaguggccguacuguaucaggaugugaauuguacagacguuccggucgcaauucaugccgaucaauuaaccccuagcuggcgcgugcacuccacuggcaacaacguguuucagacacaggcugggugccugauaggagcggagcacgucgacacgucauacgaaugugauaucccaauuggugcaggcaucugcgccaguuaucauaccguuucuagccuaagauccacuucacaaaagagcaucguggcuuacacaaugucucucggggccgacuccaguauugcauauagcaauaacaccauagccauccccacaaauuucucuauuuccaucacuaccgaggugaugccuguaucaauggcuaaaacgagugucgacuguaacauguacauuugcggagauagcaccgagugugccaaucugcuuuugcaguauggcucguuuugcacacagcugaacagggcacucuccgguaucgcgguggaacaggaccggaauacucgcgagguuuucgcucaggugaagcaaauguacaaaacccccacacugaaggauuuugggggcuucaacuucucucagauacuuccagacccucugaaacccacuaagaggagcuuuaucgaagaucuacucuucaauaaggucacccuggccgacgcaggauuuaugaaacaguacggcgaguguuuaggggauauuaacgccagagaccugaucugcgcucagaaguucaauggacuaacggugcucccaccgcugcuuacagaugacaugauugccgcauauaccgcugccuugguuucagguacugcgacagccggcuggaccuuuggggcuggagcagcccugcaaaucccuuucgcuaugcagauggccuaccguuuuaacggcauaggugugacucagaauguacucuaugaaaaccagaaacaaauugcaaaucaguucaacaaggcgaucagucagauucaagagucccugaccacaacgucuaccgccuuagggaaacugcaggaugucgugaaccagaaugcucaggcccuuaacacuuuggugaagcaacucagcuccaauuuuggcgcaaucucaagcguccugaacgacauacuaagucggcuggaucccccagaggcugaaguucagaucgaccgacucauuacaggaagacugcagucucuucagaccuacgugacacaacaguugaucagggccgcagagauucgcgccuccgcuaaucuggcggccacuaagaugagcgaaugcguauuaggccagucgaaacggguggacuucugugggaagggauaucaccucaugucauuuccccaggcagcuccucauggcgucguguuccugcacguuaccuacgugccaucucaagagagaaacuuuacgacagcccccgccaucugccacgaagguaaggcuuauuucccuagggagggggucuucguguuuaauggaaccaguugguucauaacucagcgcaacuuuuucuccccgcagauuaucaccacagauaauacuuuuguuagcggcucuugugacguggucaucgguauuaucaacaauaccguauacgauccacuucaacccgagcuggacagcuucaaggaagaguuggauaaauacuuuaagaaccauacauccccugacguggaucucggcgacauuucagggauaaaugcaaguguugugaacauccagaaagaaauugaucgacugaaugaggucgccaagaaccuaaaugagagccugaucgaccuccaggaacugggaaaguaugagcaguacauuaaauggccaugguauguguggcuuggcuucaucgcgggguugauagcuaucguaauggugacgauucuguuaugcuguaugaccucuugcuguuccugccucaagggagccuguucaugcggcaguuguugcaaauuugaugaagacgacagcgagcccguccugaaggguguuaaacuucacuacacuuga

SEQ ID NO: 15023 - RNA, 3576 nt, Artificial Sequence
  Bat SARS-like CoV/WIV1__AGZ48828.1 spike protein CDS human (variant)
augaagcugcucgugcuugucuucgccacccugguuagcuccuacacaaucgagaaaugcuuggacuuugaugacagaacucccccugcuaacacgcaguucuuaucuucacacaggggcguguauuacccagaugacauuuuucggaguaauguacugcaucuagugcaagaucacuuccucccguuugacagcaacgucacccgcuucauaacauuugggcugaauuucgauaaccccaucauuccuuuuaaggacggaaucuauuucgcagccacugaaaaauccaaugugauucgagguuggguuuuuggcucuaccaugaacaauaagucgcagucagugaucauaaugaacaauagcacaaaccuugucauccgugcguguaauuucgagcugugcgauaacccauuuuucgugguauugaaaaguaauaacacccagauucccuccuacaucuucaauaacgcuuuuaacuguacuuucgaauauguuucuaaggacuuuaaucucgaucugggggagaagccuggaaacuucaaagaccugagagaauuuguguucaggaauaaggauggcuuucuccaugucuacagcgguuaucagccaauuuccgccgcaucaggguuacccacaggauucaacgcccugaaaccuaucuuuaaacuuccauugggcauaaauauuaccaacuuccggacgcugcuaacugcuuuuccgccccgcccugacuacuggggcaccagugcagccgcuuacuucgugggguaucucaaaccaacaacuuuuaugcugaaguacgacgagaauggaaccaucacagaugccguggacugcagccaaaacccccuugcggagcugaaguguucugucaaauccuucgaaauugauaaggguaucuaucagaccucaaauuucagaguugcaccuagcaaagaggugguaagguuuccaaacaucacgaauuugugccccuucggcgaaguguuuaacgccacuacauucccgagugucuacgcuugggagcggaagcgcauuucuaauuguguggccgacuauuccguucucuacaacagcaccucguuuucuacuuucaaaugcuaugggguguccgcaacaaagcugaaugauuuauguuuuucaaacgucuacgcugacaguuucgugguaaaaggagaugacguucgacagauagccccuggccagaccggugugaucgcggauuacaacuauaagcugcccgacgauuuuacggggugcguccucgccuggaauaccagaaacauugacgcaacacaaacuggaaauuacaacuauaaguacaggagccuucggcacggcaaacugcguccauucgagcgcgacaucuccaaugugccuuuuucucccgauggcaagccauguacacccccugcuuucaacugcuauuggccauugaaugacuacggguuuuauauaaccaacggaauugguuaccagccguacagagucgugguuuugagcuucgaacugcucaaugcccccgcuacugugugcggcccuaaacugucaaccgaucuuaucaagaaccaguguguaaauuucaacuuuaaugggcugacaggaaccggcgucuugacuccaaguuccaaaagguuccagcccuuucaacaguucggucgggacgugagcgauuuuacggacucuguucgagauccuaagacaucagagauccucgacauuaguccaugcagcuucgggggcguguccgucaucacccccggaacuaacaccucuucggaaguggccguacuguaucaggaugugaauuguacagacguuccggucgcaauucaugccgaucaauuaaccccuagcuggcgcgugcacuccacuggcaacaacguguuucagacacaggcugggugccugauaggagcggagcacgucgacacgucauacgaaugugauaucccaauuggugcaggcaucugcgccaguuaucauaccguuucuagccuaagauccacuucacaaaagagcaucguggcuuacacaaugucucucggggccgacuccaguauugcauauagcaauaacaccauagccauccccacaaauuucucuauuuccaucacuaccgaggugaugccuguaucaauggcuaaaacgagugucgacuguaacauguacauuugcggagauagcaccgagugugccaaucugcuuuugcaguauggcucguuuugcacacagcugaacagggcacucuccgguaucgcgguggaacaggaccggaauacucgcgagguuuucgcucaggugaagcaaauguacaaaacccccacacugaaggauuuugggggcuucaacuucucucagauacuuccagacccucugaaacccacuaagaggagcuuuaucgaagaucuacucuucaauaaggucacccuggccgacgcaggauuuaugaaacaguacggcgaguguuuaggggauauuaacgccagagaccugaucugcgcucagaaguucaauggacuaacggugcucccaccgcugcuuacagaugacaugauugccgcauauaccgcugccuugguuucagguacugcgacagccggcuggaccuuuggggcuggagcagcccugcaaaucccuuucgcuaugcagauggccuaccguuuuaacggcauaggugugacucagaauguacucuaugaaaaccagaaacaaauugcaaaucaguucaacaaggcgaucagucagauucaagagucccugaccacaacgucuaccgccuuagggaaacugcaggaugucgugaaccagaaugcucaggcccuuaacacuuuggugaagcaacucagcuccaauuuuggcgcaaucucaagcguccugaacgacauacuaagucggcuggaucccccagaggcugaaguucagaucgaccgacucauuacaggaagacugcagucucuucagaccuacgugacacaacaguugaucagggccgcagagauucgcgccuccgcuaaucuggcggccacuaagaugagcgaaugcguauuaggccagucgaaacggguggacuucugugggaagggauaucaccucaugucauuuccccaggcagcuccucauggcgucguguuccugcacguuaccuacgugccaucucaagagagaaacuuuacgacagcccccgccaucugccacgaagguaaggcuuauuucccuagggagggggucuucguguuuaauggaaccaguugguucauaacucagcgcaacuuuuucuccccgcagauuaucaccacagauaauacuuuuguuagcggcucuugugacguggucaucgguauuaucaacaauaccguauacgauccacuucaacccgagcuggacagcuucaaggaagaguuggauaaauacuuuaagaaccauacauccccugacguggaucucggcgacauuucagggauaaaugcaaguguugugaacauccagaaagaaauugaucgacugaaugaggucgccaagaaccuaaaugagagccugaucgaccuccaggaacugggaaaguaugagcaguga

SEQ ID NO: 15024 - RNA, 3657 nt, Artificial Sequence
  Bat SARS-like CoV/WIV1__AGZ48828.1 spike protein CDS human (variant)
augaagcugcucgugcuugucuucgccacccugguuagcuccuacacaaucgagaaaugcuuggacuuugaugacagaacucccccugcuaacacgcaguucuuaucuucacacaggggcguguauuacccagaugacauuuuucggaguaauguacugcaucuagugcaagaucacuuccucccguuugacagcaacgucacccgcuucauaacauuugggcugaauuucgauaaccccaucauuccuuuuaaggacggaaucuauuucgcagccacugaaaaauccaaugugauucgagguuggguuuuuggcucuaccaugaacaauaagucgcagucagugaucauaaugaacaauagcacaaaccuugucauccgugcguguaauuucgagcugugcgauaacccauuuuucgugguauugaaaaguaauaacacccagauucccuccuacaucuucaauaacgcuuuuaacuguacuuucgaauauguuucuaaggacuuuaaucucgaucugggggagaagccuggaaacuucaaagaccugagagaauuuguguucaggaauaaggauggcuuucuccaugucuacagcgguuaucagccaauuuccgccgcaucaggguuacccacaggauucaacgcccugaaaccuaucuuuaaacuuccauugggcauaaauauuaccaacuuccggacgcugcuaacugcuuuuccgccccgcccugacuacuggggcaccagugcagccgcuuacuucgugggguaucucaaaccaacaacuuuuaugcugaaguacgacgagaauggaaccaucacagaugccguggacugcagccaaaacccccuugcggagcugaaguguucugucaaauccuucgaaauugauaaggguaucuaucagaccucaaauuucagaguugcaccuagcaaagaggugguaagguuuccaaacaucacgaauuugugccccuucggcgaaguguuuaacgccacuacauucccgagugucuacgcuugggagcggaagcgcauuucuaauuguguggccgacuauuccguucucuacaacagcaccucguuuucuacuuucaaaugcuaugggguguccgcaacaaagcugaaugauuuauguuuuucaaacgucuacgcugacaguuucgugguaaaaggagaugacguucgacagauagccccuggccagaccggugugaucgcggauuacaacuauaagcugcccgacgauuuuacggggugcguccucgccuggaauaccagaaacauugacgcaacacaaacuggaaauuacaacuauaaguacaggagccuucggcacggcaaacugcguccauucgagcgcgacaucuccaaugugccuuuuucucccgauggcaagccauguacacccccugcuuucaacugcuauuggccauugaaugacuacggguuuuauauaaccaacggaauugguuaccagccguacagagucgugguuuugagcuucgaacugcucaaugcccccgcuacugugugcggcccuaaacugucaaccgaucuuaucaagaaccaguguguaaauuucaacuuuaaugggcugacaggaaccggcgucuugacuccaaguuccaaaagguuccagcccuuucaacaguucggucgggacgugagcgauuuuacggacucuguucgagauccuaagacaucagagauccucgacauuaguccaugcagcuucgggggcguguccgucaucacccccggaacuaacaccucuucggaaguggccguacuguaucaggaugugaauuguacagacguuccggucgcaauucaugccgaucaauuaaccccuagcuggcgcgugcacuccacuggcaacaacguguuucagacacaggcugggugccugauaggagcggagcacgucgacacgucauacgaaugugauaucccaauuggugcaggcaucugcgccaguuaucauaccguuucuagccuaagauccacuucacaaaagagcaucguggcuuacacaaugucucucggggccgacuccaguauugcauauagcaauaacaccauagccauccccacaaauuucucuauuuccaucacuaccgaggugaugccuguaucaauggcuaaaacgagugucgacuguaacauguacauuugcggagauagcaccgagugugccaaucugcuuuugcaauauggcucguuuugcacacagcugaacagggcacucuccgguaucgcgguggaacaggaccggaauacucgcgagguuuucgcucaggugaagcaaauguacaaaacccccacacugaaggauuuugggggcuucaacuucucucagauacuuccagacccucugaaacccacuaagaggagcuuuaucgaagaucuacucuucaauaaggucacccuggccgacgcaggauuuaugaaacaguacggcgaguguuuaggggauauuaacgccagagaccugaucugcgcucagaaguucaauggacuaacggugcucccaccgcugcuuacagaugacaugauugccgcauauaccgcugccuugguuucagguacugcgacagccggcuggaccuuuggggcuggagcagcccugcaaaucccuuucgcuaugcagauggccuaccguuuuaacggcauaggugugacucagaauguacucuaugaaaaccagaaacaaauugcaaaucaguucaacaaggcgaucagucagauucaagagucccugaccacaacgucuaccgccuuagggaaacugcaggaugucgugaaccagaaugcucaggcccuuaacacuuuggugaagcaacucagcuccaauuuuggcgcaaucucaagcguccugaacgacauacuaagucggcuggaucccccagaggcugaaguucagaucgaccgacucauuacaggaagacugcagucucuucagaccuacgugacacaacaguugaucagggccgcagagauucgcgccuccgcuaaucuggcggccacuaagaugagcgaaugcguauuaggccagucgaaacggguggacuucugugggaagggauaucaccucaugucauuuccccaggcagcuccucauggcgucguguuccugcacguuaccuacgugccaucucaagagagaaacuuuacgacagcccccgccaucugccacgaagguaaggcuuauuucccuagggagggggucuucguguuuaauggaaccaguugguucauaacucagcgcaacuuuuucuccccgcagauuaucaccacagauaauacuuuuguuagcggcucuugugacguggucaucgguauuaucaacaauaccguauacgauccacuucaacccgagcuggacagcuucaaggaagaguuggauaaauacuuuaagaaccauacauccccugacguggaucucggcgacauuucagggauaaaugcaaguguugugaacauccagaaagaaauugaucgacugaaugaggucgccaagaaccuaaaugagagccugaucgaccuccaggaacugggaaaguaugagcagggcggguacauuccagaagcgccccgggauggacaggcuuaugugcguaaagacggcgaguggguacuuuugucuacguucuga

SEQ ID NO: 15025 - RNA, 3825 nt, Artificial Sequence
  BatCoV/HKU9-1 BF_005I__YP_001039971.1 spike protein CDS human (1-1274)
augcugcucauccuugugcugggcgucagcuuggccgcugcauccagacccgagugcuucaacccuagguuuaccuuaacaccacugaaucacacucuaaacuacacgucuauuaaggccaaaguuucaaaugugcuccugccggaccccuauauagcguacagugggcagacccuucggcaaaaccuguucauggcugauaugagcaauacaaucuuguauccuguaacuccacccgccaacggagcaaaugguggcuuuauuuacaacaccuccaucauuccugugucugccggacucuucgucaauacauggauguaucgccagccagcuucgucacgagcauacugucaggaacccuuugggguggccuucggcgacaccuuugagaacgaucguaucgcuauacugaucauggccccugacaaucuggguagcuggagugcgguugcaccaagaaaccagacuaauauuuaucucuuagugugcuccaacgccacacuguguaucaauccgggguucaacagguggggacccgcuggcucuuuuauugccccugaugcacuugucgaccauagcaacuccugcuucgugaauaacaccuuuucaguaaauaucaguacgagccggauaucuuuggcuuuccuguuuaaggauggcgaccuacucauuuaccacuccggguggcugccaacuucaaacuucgaacauggauucagccgcgguagucaccccaugaccuacuuuaugucucuuccuguuggcgggaaucugccaagagcccaauucuuucaguccaucgugaggagcaacgcgauugauaaaggagacggcauguguacaaauuucgaugucaacuugcauguggcccaccucaucaaucgggaccuguuagugucguauuuuaacaaugguucugucgcaaacgcugccgauugcgcugacuccgccgcagaggaacuguacuguguuacugggucauucgaucccccgaccggaguguauccucucagucgcuaccgagcccagguagcuggcuuugugagagucacacagaggggcagcuauugcacgcccccauacuccgugcuucaagacccuccccagccaguuguguggcggcguuauaugcuguacgacugugucuucgauuuuaccgugguaguugacucuuugcccacucaccagcuacagugcuacggggugagcccucgcagacuggcgucaauguguuauggaagugucacacucgaugugaugaggaucaaugagacccaucugaacaaucuuuucaaccgggucccagacacuuuuucccuguacaacuaugcauugccggauaauuucuacgguugccuccacgccuuuuaucugaacagcacagcucccuacgccguggcaaaucgauucccuauuaagccaggcgggcgccaaucuaacucagccuucauagacaccguuaucaaugcugcccauuauagucccuuuagcuacguguacggauuagcaguaauuacgcugaaaccugcggcuggcuccaagcuagucugcccaguggccaacgauaccguugugaucacagacagauguguccaguauaaucucuacgguuauacugggaccggcgugcugucuaagaacacaucgcuuguaauacccgauggaaaaguguucacugcaagcuccaccggcacaauuaucgggguuucaaucaauaguaccacuuacucuauuaugccgugcgucacggugccugugagcgucggauaucacccaaacuuugagagggccuugcuguucaauggucucuccuguucacagcggagccgcgcuguuacagaacccgugucugugcugugguccgccagugcaaccgcucaagacgccuuugacacuccuagcggcugcguagucaacguggagcuuagaaauaccacaaucguuaacaccugugcgaugcccauuggaaauucucugugcuucauaaacggguccaucgccacugcuaacgcagauucauugccaaggcuccagcuggugaauuacgacccuuuauaugauaacaguacagccacgcccaugaccccagucuacugggugaagguuccgacuaauuuuacacugagcgcuaccgaagaguacauucagacaacugccccuaaaaucaccaucgacugugcacguuaucuaugcggcgauucgucccggugucucaacgugcugcuucacuacgguacguucugcaaugacauuaacaaggcguugucucgaguaagcaccauacuggauucagcccuccugaguuuagucaaagagcuguccaucaauacaagagacgaagugacuaccuuuucuuucgauggggacuauaacuuuacaggccuuaugggauguuugggccccaauugcggggcuacuaccuacaggagcgccuucuccgaucuccuguaugacaaggugcgcauuacggauccaggauuuaugcagucauaccaaaagugcaucgacagccagugggguggcaguauucgggaccuacuguguacacagaccuauaacgggaucgcaguccugcccccuauaguuucuccagcuaugcaggcccucuacacuucccuuuuggugggagcaguagccagcucgggcuacacauucgguaucaccucagcuggggugauucccuucgcgacucaacugcaguuuagauuaaauggcaucggagucaccacacaggugcucguugagaaccagaaacugauugccucuaguuucaauaacgcacuugugaauauccaaaagggcuuuacggaaaccuccauagcucugagcaaaaugcaggaugucauuaaccagcaugccgcccaguugcacacucucgugguucaacuggggaacucuuucggagcuaucagcuccucaauuaaugagaucuuuaguaggcuagaaggccuggcagccaacgcggagguggaccgccucauaaauggucgaaugaugguccugaacacauauguaacccagcuuuugauccaggcuagcgaggccaaggcacaaaaugcccuggcugcacagaaaauuucugaaugcgugaaggcccaguccuuacggaacgauuucugugggaauggaacacauguucucucaaucccucagcuggcgccgaacggcgugcuuuuuauucacuacgcuuauacuccaaccgaguacgccuucguccaaacgagugcaggucugugccauaauggcacaggguaugcuccccgucagggaauguuugugcuaccuaacaauaccaacauguggcacuucacuaccaugcaguuuuacaauccaguaaacaucagcgccuccaauacacaggugcucacuucuuguucggucaacuauaccagcguuaauuacacagugcuggaacccucagugccuggcgacuacgauuuccaaaaagaguucgacaaguuuuauaagaacuuguccacgauauucaacaauaccuuuaacccgaaugauuucaacuuuaguacugucgacgugacagcccagauuaaaucucugcacgauguuguaaaucaguuaaaccagagcuucaucgaccucaagaaacugaauguguacgaaaagaccaucaaauggcccugguaugucuggcuugcaaugauugcugggaucgugggacugguuuuggccgugauuaugcucaugugcaugacuaacuguugcuccuguuuuaagggcaugugcgauuguagaaggugcugcgguucauacgacucuuaugaugacgucuacccagcggugcgcguaaauaagaaacggacagucuga

SEQ ID NO: 15026 - RNA, 3825 nt, Artificial Sequence
  BatCoV/HKU9-1 BF_005I__YP_001039971.1 spike protein CDS human (1-1274)(G983P_L984P)
augcugcucauccuugugcugggcgucagcuuggccgcugcauccagacccgagugcuucaacccuagguuuaccuuaacaccacugaaucacacucuaaacuacacgucuauuaaggccaaaguuucaaaugugcuccugccggaccccuauauagcguacagugggcagacccuucggcaaaaccuguucauggcugauaugagcaauacaaucuuguauccuguaacuccacccgccaacggagcaaaugguggcuuuauuuacaacaccuccaucauuccugugucugccggacucuucgucaauacauggauguaucgccagccagcuucgucacgagcauacugucaggaacccuuugggguggccuucggcgacaccuuugagaacgaucguaucgcuauacugaucauggccccugacaaucuggguagcuggagugcgguugcaccaagaaaccagacuaauauuuaucucuuagugugcuccaacgccacacuguguaucaauccgggguucaacagguggggacccgcuggcucuuuuauugccccugaugcacuugucgaccauagcaacuccugcuucgugaauaacaccuuuucaguaaauaucaguacgagccggauaucuuuggcuuuccuguuuaaggauggcgaccuacucauuuaccacuccggguggcugccaacuucaaacuucgaacauggauucagccgcgguagucaccccaugaccuacuuuaugucucuuccuguuggcgggaaucugccaagagcccaauucuuucaguccaucgugaggagcaacgcgauugauaaaggagacggcauguguacaaauuucgaugucaacuugcauguggcccaccucaucaaucgggaccuguuagugucguauuuuaacaaugguucugucgcaaacgcugccgauugcgcugacuccgccgcagaggaacuguacuguguuacugggucauucgaucccccgaccggaguguauccucucagucgcuaccgagcccagguagcuggcuuugugagagucacacagaggggcagcuauugcacgcccccauacuccgugcuucaagacccuccccagccaguuguguggcggcguuauaugcuguacgacugugucuucgauuuuaccgugguaguugacucuuugcccacucaccagcuacagugcuacggggugagcccucgcagacuggcgucaauguguuauggaagugucacacucgaugugaugaggaucaaugagacccaucugaacaaucuuuucaaccgggucccagacacuuuuucccuguacaacuaugcauugccggauaauuucuacgguugccuccacgccuuuuaucugaacagcacagcucccuacgccguggcaaaucgauucccuauuaagccaggcgggcgccaaucuaacucagccuucauagacaccguuaucaaugcugcccauuauagucccuuuagcuacguguacggauuagcaguaauuacgcugaaaccugcggcuggcuccaagcuagucugcccaguggccaacgauaccguugugaucacagacagauguguccaguauaaucucuacgguuauacugggaccggcgugcugucuaagaacacaucgcuuguaauacccgauggaaaaguguucacugcaagcuccaccggcacaauuaucgggguuucaaucaauaguaccacuuacucuauuaugccgugcgucacggugccugugagcgucggauaucacccaaacuuugagagggccuugcuguucaauggucucuccuguucacagcggagccgcgcuguuacagaacccgugucugugcugugguccgccagugcaaccgcucaagacgccuuugacacuccuagcggcugcguagucaacguggagcuuagaaauaccacaaucguuaacaccugugcgaugcccauuggaaauucucugugcuucauaaacggguccaucgccacugcuaacgcagauucauugccaaggcuccagcuggugaauuacgacccuuuauaugauaacaguacagccacgcccaugaccccagucuacugggugaagguuccgacuaauuuuacacugagcgcuaccgaagaguacauucagacaacugccccuaaaaucaccaucgacugugcacguuaucuaugcggcgauucgucccggugucucaacgugcugcuucacuacgguacguucugcaaugacauuaacaaggcguugucucgaguaagcaccauacuggauucagcccuccugaguuuagucaaagagcuguccaucaauacaagagacgaagugacuaccuuuucuuucgauggggacuauaacuuuacaggccuuaugggauguuugggccccaauugcggggcuacuaccuacaggagcgccuucuccgaucuccuguaugacaaggugcgcauuacggauccaggauuuaugcagucauaccaaaagugcaucgacagccagugggguggcaguauucgggaccuacuguguacacagaccuauaacgggaucgcaguccugcccccuauaguuucuccagcuaugcaggcccucuacacuucccuuuuggugggagcaguagccagcucgggcuacacauucgguaucaccucagcuggggugauucccuucgcgacucaacugcaguuuagauuaaauggcaucggagucaccacacaggugcucguugagaaccagaaacugauugccucuaguuucaauaacgcacuugugaauauccaaaagggcuuuacggaaaccuccauagcucugagcaaaaugcaggaugucauuaaccagcaugccgcccaguugcacacucucgugguucaacuggggaacucuuucggagcuaucagcuccucaauuaaugagaucuuuaguaggcuagaaccuccggcagccaacgcggagguggaccgccugauaaauggccgaaugaugguccucaacacauauguaacccagcugcuuauccaggcuagcgaggccaaggcacaaaaugccuuggcugcacagaaaauuucugaaugcgugaaggcccagucccugcggaacgauuucugugguaaugggacacauguuuuaucaaucccacagcucgcgcccaacggagugcuguuuauucacuacgcuuauacuccuaccgaguacgccuucguccaaacgagugcaggccuuugccauaaugguacaggcuaugccccacgucaggggauguuugugcugcccaacaauaccaacauguggcacuucacuaccaugcaguuuuacaauccuguaaacaucagcgcuuccaauacacaggugcuaacuucuuguucggucaacuauaccagcguuaauuacacagugcucgaaccgucagugcccggagacuacgauuuccaaaaagaguucgacaaguuuuauaagaaccuguccacgauauucaacaauaccuuuaacccaaaugauuucaacuuuaguacugucgacgugacagcccagauuaaaucuuugcacgauguuguaaaucagcugaaccagagcuucaucgacuuaaagaaacucaauguguacgaaaagaccaucaaauggccuugguaugucuggcuggcaaugauugcuggcaucguggggcuuguucuggccgugauuauguugaugugcaugacuaacuguugcuccuguuuuaagggaaugugcgauuguagaaggugcugcggcucauacgacucuuaugaugacgucuaccccgcggugcgcguaaauaagaaacggacagucuga

SEQ ID NO: 15027 - RNA, 3624 nt, Artificial Sequence
  BatCoV/HKU9-1 BF_005I__YP_001039971.1 spike protein CDS human (variant)
augcugcucauccuugugcugggcgucagcuuggccgcugcauccagacccgagugcuucaacccuagguuuaccuuaacaccacugaaucacacucuaaacuacacgucuauuaaggccaaaguuucaaaugugcuccugccggaccccuauauagcguacagugggcagacccuucggcaaaaccuguucauggcugauaugagcaauacaaucuuguauccuguaacuccacccgccaacggagcaaaugguggcuuuauuuacaacaccuccaucauuccugugucugccggacucuucgucaauacauggauguaucgccagccagcuucgucacgagcauacugucaggaacccuuugggguggccuucggcgacaccuuugagaacgaucguaucgcuauacugaucauggccccugacaaucuggguagcuggagugcgguugcaccaagaaaccagacuaauauuuaucucuuagugugcuccaacgccacacuguguaucaauccgggguucaacagguggggacccgcuggcucuuuuauugccccugaugcacuugucgaccauagcaacuccugcuucgugaauaacaccuuuucaguaaauaucaguacgagccggauaucuuuggcuuuccuguuuaaggauggcgaccuacucauuuaccacuccggguggcugccaacuucaaacuucgaacauggauucagccgcgguagucaccccaugaccuacuuuaugucucuuccuguuggcgggaaucugccaagagcccaauucuuucaguccaucgugaggagcaacgcgauugauaaaggagacggcauguguacaaauuucgaugucaacuugcauguggcccaccucaucaaucgggaccuguuagugucguauuuuaacaaugguucugucgcaaacgcugccgauugcgcugacuccgccgcagaggaacuguacuguguuacugggucauucgaucccccgaccggaguguauccucucagucgcuaccgagcccagguagcuggcuuugugagagucacacagaggggcagcuauugcacgcccccauacuccgugcuucaagacccuccccagccaguuguguggcggcguuauaugcuguacgacugugucuucgauuuuaccgugguaguugacucuuugcccacucaccagcuacagugcuacggggugagcccucgcagacuggcgucaauguguuauggaagugucacacucgaugugaugaggaucaaugagacccaucugaacaaucuuuucaaccgggucccagacacuuuuucccuguacaacuaugcauugccggauaauuucuacgguugccuccacgccuuuuaucugaacagcacagcucccuacgccguggcaaaucgauucccuauuaagccaggcgggcgccaaucuaacucagccuucauagacaccguuaucaaugcugcccauuauagucccuuuagcuacguguacggauuagcaguaauuacgcugaaaccugcggcuggcuccaagcuagucugcccaguggccaacgauaccguugugaucacagacagauguguccaguauaaucucuacgguuauacugggaccggcgugcugucuaagaacacaucgcuuguaauacccgauggaaaaguguucacugcaagcuccaccggcacaauuaucgggguuucaaucaauaguaccacuuacucuauuaugccgugcgucacggugccugugagcgucggauaucacccaaacuuugagagggccuugcuguucaauggucucuccuguucacagcggagccgcgcuguuacagaacccgugucugugcugugguccgccagugcaaccgcucaagacgccuuugacacuccuagcggcugcguagucaacguggagcuuagaaauaccacaaucguuaacaccugugcgaugcccauuggaaauucucugugcuucauaaacggguccaucgccacugcuaacgcagauucauugccaaggcuccagcuggugaauuacgacccuuuauaugauaacaguacagccacgcccaugaccccagucuacugggugaagguuccgacuaauuuuacacugagcgcuaccgaagaguacauucagacaacugccccuaaaaucaccaucgacugugcacguuaucuaugcggcgauucgucccggugucucaacgugcugcuucacuacgguacguucugcaaugacauuaacaaggcguugucucgaguaagcaccauacuggauucagcccuccugaguuuagucaaagagcuguccaucaauacaagagacgaagugacuaccuuuucuuucgauggggacuauaacuuuacaggccuuaugggauguuugggccccaauugcggggcuacuaccuacaggagcgccuucuccgaucuccuguaugacaaggugcgcauuacggauccaggauuuaugcagucauaccaaaagugcaucgacagccagugggguggcaguauucgggaccuacuguguacacagaccuauaacgggaucgcaguccugcccccuauaguuucuccagcuaugcaggcccucuacacuucccuuuuggugggagcaguagccagcucgggcuacacauucgguaucaccucagcuggggugauucccuucgcgacucaacugcaguuuagauuaaauggcaucggagucaccacacaggugcucguugagaaccagaaacugauugccucuaguuucaauaacgcacuugugaauauccaaaagggcuuuacggaaaccuccauagcucugagcaaaaugcaggaugucauuaaccagcaugccgcccaguugcacacucucgugguucaacuggggaacucuuucggagcuaucagcuccucaauuaaugagaucuuuaguaggcuagaaccuccggcagccaacgcggagguggaccgccugauaaauggccgaaugaugguccucaacacauauguaacccagcugcuuauccaggcuagcgaggccaaggcacaaaaugccuuggcugcacagaaaauuucugaaugcgugaaggcccagucccugcggaacgauuucugugguaaugggacacauguuuuaucaaucccacagcucgcgcccaacggagugcuguuuauucacuacgcuuauacuccuaccgaguacgccuucguccaaacgagugcaggccuuugccauaaugguacaggcuaugccccacgucaggggauguuugugcugcccaacaauaccaacauguggcacuucacuaccaugcaguuuuacaauccuguaaacaucagcgcuuccaauacacaggugcuaacuucuuguucggucaacuauaccagcguuaauuacacagugcucgaaccgucagugcccggagacuacgauuuccaaaaagaguucgacaaguuuuauaagaaccuguccacgauauucaacaauaccuuuaacccaaaugauuucaacuuuaguacugucgacgugacagcccagauuaaaucuuugcacgauguuguaaaucagcugaaccagagcuucaucgacuuaaagaaacucaauguguacgaaaaguga

SEQ ID NO: 15028 - RNA, 3705 nt, Artificial Sequence
  BatCoV/HKU9-1 BF_005I__YP_001039971.1 spike protein CDS human (variant)
augcugcucauccuugugcugggcgucagcuuggccgcugcauccagacccgagugcuucaacccuagguuuaccuuaacaccacugaaucacacucuaaacuacacgucuauuaaggccaaaguuucaaaugugcuccugccggaccccuauauagcguacagugggcaaacccuucggcaaaaccuguucauggcugauaugagcaauacaaucuuguauccuguaacuccacccgccaacggagcaaaugguggcuuuauuuacaacaccuccaucauuccugugucugccggacucuucgucaauacauggauguaucgccagccagcuucgucacgagcauacugucaggaacccuuugggguggccuucggcgacaccuuugagaacgaucguaucgcuauacugaucauggccccugacaaucuggguagcuggagugcgguugcaccaagaaaccagacuaauauuuaucucuuagugugcuccaacgccacacuguguaucaauccgggguucaacagguggggacccgcuggcucuuuuauugccccugaugcacuugucgaccauagcaacuccugcuucgugaauaacaccuuuucaguaaauaucaguacgagccggauaucuuuggcuuuccuguuuaaggauggcgaccuacucauuuaccacuccggguggcugccaacuucaaacuucgaacauggauucagccgcgguagucaccccaugaccuacuuuaugucucuuccuguuggcgggaaucugccaagagcccaauucuuucaguccaucgugaggagcaacgcgauugauaaaggagacggcauguguacaaauuucgaugucaacuugcauguggcccaccucaucaaucgggaccuguuagugucguauuuuaacaaugguucugucgcaaacgcugccgauugcgcugacuccgccgcagaggaacuguacuguguuacugggucauucgaucccccgaccggaguguauccucucagucgcuaccgagcccagguagcuggcuuugugagagucacacagaggggcagcuauugcacgcccccauacuccgugcuucaagacccuccccagccaguuguguggcggcguuauaugcuguacgacugugucuucgauuuuaccgugguaguugacucuuugcccacucaccagcuacagugcuacggggugagcccucgcagacuggcgucaauguguuauggaagugucacacucgaugugaugaggaucaaugagacccaucugaacaaucuuuucaaccgggucccagacacuuuuucccuguacaacuaugcauugccggauaauuucuacgguugccuccacgccuuuuaucugaacagcacagcucccuacgccguggcaaaucgauucccuauuaagccaggcgggcgccaaucuaacucagccuucauagacaccguuaucaaugcugcccauuauagucccuuuagcuacguguacggauuagcaguaauuacgcugaaaccugcggcuggcuccaagcuagucugcccaguggccaacgauaccguugugaucacagacagauguguccaguauaaucucuacgguuauacugggaccggcgugcugucuaagaacacaucgcuuguaauacccgauggaaaaguguucacugcaagcuccaccggcacaauuaucgggguuucaaucaauaguaccacuuacucuauuaugccgugcgucacggugccugugagcgucggauaucacccaaacuuugagagggccuugcuguucaauggucucuccuguucacagcggagccgcgcuguuacagaacccgugucugugcugugguccgccagugcaaccgcucaagacgccuuugacacuccuagcggcugcguagucaacguggagcuuagaaauaccacaaucguuaacaccugugcgaugcccauuggaaauucucugugcuucauaaacggguccaucgccacugcuaacgcagauucauugccaaggcuccagcuggugaauuacgacccuuuauaugauaacaguacagccacgcccaugaccccagucuacugggugaagguuccgacuaauuuuacacugagcgcuaccgaagaguacauucagacaacugccccuaaaaucaccaucgacugugcacguuaucuaugcggcgauucgucccggugucucaacgugcugcuucacuacgguacguucugcaaugacauuaacaaggcguugucucgaguaagcaccauacuggauucagcccuccugaguuuagucaaagagcuguccaucaauacaagagacgaagugacuaccuuuucuuucgauggggacuauaacuuuacaggccuuaugggauguuugggccccaauugcggggcuacuaccuacaggagcgccuucuccgaucuccuguaugacaaggugcgcauuacggauccaggauuuaugcagucauaccaaaagugcaucgacagccagugggguggcaguauucgggaccuacuguguacacagaccuauaacgggaucgcaguccugcccccuauaguuucuccagcuaugcaggcccucuacacuucccuuuuggugggagcaguagccagcucgggcuacacauucgguaucaccucagcuggggugauucccuucgcgacucaacugcaguuuagauuaaauggcaucggagucaccacacaggugcucguugagaaccagaaacugauugccucuaguuucaauaacgcacuugugaauauccaaaagggcuuuacggaaaccuccauagcucugagcaaaaugcaggaugucauuaaccagcaugccgcccaguugcacacucucgugguucaacuggggaacucuuucggagcuaucagcuccucaauuaaugagaucuuuaguaggcuagaaccuccggcagccaacgcggagguggaccgccugauaaauggccgaaugaugguccucaacacauauguaacccagcugcuuauccaggcuagcgaggccaaggcacaaaaugccuuggcugcacagaaaauuucugaaugcgugaaggcccagucccugcggaacgauuucugugguaaugggacacauguuuuaucaaucccacagcucgcgcccaacggagugcuguuuauucacuacgcuuauacuccuaccgaguacgccuucguccaaacgagugcaggccuuugccauaaugguacaggcuaugccccacgucaggggauguuugugcugcccaacaauaccaacauguggcacuucacuaccaugcaguuuuacaauccuguaaacaucagcgcuuccaauacacaggugcuaacuucuuguucggucaacuauaccagcguuaauuacacagugcucgaaccgucagugcccggagacuacgauuuccaaaaagaguucgacaaguuuuauaagaaccuguccacgauauucaacaauaccuuuaacccaaaugauuucaacuuuaguacugucgacgugacagcccagauuaaaucuuugcacgauguuguaaaucagcugaaccagagcuucaucgacuuaaagaaacucaauguguacgaaaagggcggguauaucccugaggcacccagagauggacaggcuuacgucaggaaagacggcgagugggugcugcuuuccaccuuuuga

SEQ ID NO: 15029 - RNA, 3483 nt, Artificial Sequence
  PDCoV/Swine/Thailand/S5011/2015__AMN91621.1 spike protein CDS human (1-1160)
augcagagagcccugcucaucaugacccuucugugcuuggcuagggcaaaguucgccgacgauuuacuggaccuacucacauuucccggcgcgcaccgguuccugcauaaaccuacucgcaacgauagcauucuuuacucccgagcuaauaacaauuuugacguggggguccugccaggauauccgacgaagaacguuaauuuguucucuccccucaccaacucaacacugccuauaaauggucugcaccguaguuaccaaccacucauguuaaacugucugacuaaaaucaccaaucagacacuuagcauguauuugcagcccuccgagauucagaccuacucuugcggcggggccauggugaaguaucaaacucaugaugcaguaagaaucauucuggaccuaaucgccacagauaggauaucgguggaagucgugggacaggcuggcgagaacuacguuuuuguguguucagaccaguucaauuauaccacggcacuccacaacagcaccuuuuucagucuuaauucccagcuguacugcuuuacuaacaauacauaccuggguaucuugccuccagaucucacugacuucaccgucuaucggacagggcaauuuuacgccaacggauaucuguuaggcacccugcccauuacggugaacuacguacgccucuauagaggccagcuuucugcuaauagcgcccauuucgcgcuggcaaacuugacugauacacuaaucacccugacuaauacaaccauuucccagaucacguacugugacaaaucaguuguggauaguauagccugccagaggagcucucaccaagucgaagacggguuuuauuccgacccuaagucagcugugcgggcccgccagcgaaccauugugacacucccaaagcugccggagcuugaagucguucagcugaacaucagcgcacacauggauuucggagaggcuagauuggacagugugacuauuaaugguaacaccucuuacuguguaacaaaacccuacuucaggcucgagacuaauuuucugugccggggcuguaccaugaacuuacguacagauaccugcuccuucgaccugagcgccgugaauaacgggaugucguuuucucaauucugucuauccacugaaucaggagcgugcgagaugaagaucaucgucacguauguguggaauuaccuccugcgccagagacuuuauguuacagccguggaaggccagacccauacugguaccacaaguguccacgcaaccgauacuagcuccgugauuacagacguaugcacggauuacaccauauaugggguuucuggaacuggcaucauuaaaccuagcgacuugcugcuccauaacggcaucgcuuuuacaucaccaaccggggagcuguacgccuucaagaauauaacaacuggaaaaacccuucaggugcugcccugugagacgccuagucaauugauugucaucaacaauaccguggucggugcuaucacauccagcaacucuacugaaaacaauagguuuaccacaacuauugugaccccaacguucuuuuauucaacaaacgccaccacucucaauugcacaaagcccguucugaguuacggcccgaucagcguguguuccgauggggcaauugccggaaccucuacuuuacagaacacccggccuucgauaguaagccuguacgacggcgagaucgaaauucccuccgcuuucucacuaaguguccagacagaguaucuccaggugcaagcggaacagguuaucguggauugcccacaguacgucuguaaugguaacucucgaugccugcagcuuuuggcacaauauacgagcgccuguuccaauaucgagguggcucugcacucaagcgcccagcucgacucucgcgagauuauauccauguuuaagaccaguacucagagccugcaguuagcaaacaucacaaauuucaaaggggacuacaacuuuucuuccauucugaccucaagaguaggcggaaggagugccaucgaagaucuuuuguucaauaaggugguuacaagcggccucgggacugucgaccaagauuauaaaucgugcucccggaacauggcuauugccgaccugguguguucucaguacuauaauggaaucauggugcuaccuggugucguugaugcagagaagauggcgauguacaccggcagccugacgggggcuaugguguucggaggccucacagccgcagccgcuauacccuuugccaccgcagugcaggcucgccugaacuacguagcccuucaaacuaaugucuugcaggaaaaccagaaaauccuggcggagucauucaaccaggccguggguaauauuaguuuagcucucuccucuguuaacgacgcaauccaacagaccagcgaagcccugaauacaguggcuauugccaucaagaaaauacagacugucgugaaccagcaaggggaggcacuuucccaccugaccgcgcaguugucaaauaacuuucaggccauuagcacaaguauccaggauauuuauaauagacucgaggaaguugaggcuaaccaacagguggacaggcugaucaauggccgucuagccgcacugaacgcuuacguaacgcagcuccugaaucaaaugucucagauacggcagucccgacuuuuggcccagcaaaagaucaacgaaugcgucaagagccagucgccaagauauggauucuguggcaaugggacccauaucuuuucacugacucagacagcacccaacggaauuuucuuuaugcacgccguguuagugccuaauaaauucaccagggucaacgcuucugcggguauuugcguugauaacacucgcggcuacagucuccagccacaacugauccuuuaucaguuuaauaacuccuggcgggugacaccgagaaauauguacgagcccaggcugccucgccaggccgacuucauacagcuaaccgauugcagcguaacguuuuauaacacuaccgcagcuaaucucccaaacauuauccccgacgugaucgaugucaaucaaacagugucugacauuaucgacaaccugccuaccgccacuccaccccagugggauguugggauuuacaauaacacaauauugaaucugaccguggaaaucaacgacuuacaggagcgaagcaagaaucucucccagauugccgaucggcugcaaaacuacaucgacaaucuuaacaauacacuggucgauuuggaguggcucaaccguguggaaacuuaucugaaauggccgugguacauuuggcuagcuaucgcacuggcccuuauagcguucguuaccauccucauuacgaucuuucuguguacaggaugcuguggcgguugcuucggguguugcggcggauguuucggcuuguuuucaaagaaaaagagauauaccgacgaucagccuacuccaaguuucaaguuuaaagagugguga

SEQ ID NO: 15030 - RNA, 3483 nt, Artificial Sequence
  PDCoV/Swine/Thailand/S5011/2015__AMN91621.1 spike protein CDS human (1-1160)(E855P_V856P)
augcagagagcccugcucaucaugacccuucugugcuuggcuagggcaaaguucgccgacgauuuacuggaccuacucacauuucccggcgcgcaccgguuccugcauaaaccuacucgcaacgauagcauucuuuacucccgagcuaauaacaauuuugacguggggguccugccaggauauccgacgaagaacguuaauuuguucucuccccucaccaacucaacacugccuauaaauggucugcaccguaguuaccaaccacucauguuaaacugucugacuaaaaucaccaaucagacacuuagcauguauuugcagcccuccgagauucagaccuacucuugcggcggggccauggugaaguaucaaacucaugaugcaguaagaaucauucuggaccuaaucgccacagauaggauaucgguggaagucgugggacaggcuggcgagaacuacguuuuuguguguucagaccaguucaauuauaccacggcacuccacaacagcaccuuuuucagucuuaauucccagcuguacugcuuuacuaacaauacauaccuggguaucuugccuccagaucucacugacuucaccgucuaucggacagggcaauuuuacgccaacggauaucuguuaggcacccugcccauuacggugaacuacguacgccucuauagaggccagcuuucugcuaauagcgcccauuucgcgcuggcaaacuugacugauacacuaaucacccugacuaauacaaccauuucccagaucacguacugugacaaaucaguuguggauaguauagccugccagaggagcucucaccaagucgaagacggguuuuauuccgacccuaagucagcugugcgggcccgccagcgaaccauugugacacucccaaagcugccggagcuugaagucguucagcugaacaucagcgcacacauggauuucggagaggcuagauuggacagugugacuauuaaugguaacaccucuuacuguguaacaaaacccuacuucaggcucgagacuaauuuucugugccggggcuguaccaugaacuuacguacagauaccugcuccuucgaccugagcgccgugaauaacgggaugucguuuucucaauucugucuauccacugaaucaggagcgugcgagaugaagaucaucgucacguauguguggaauuaccuccugcgccagagacuuuauguuacagccguggaaggccagacccauacugguaccacaaguguccacgcaaccgauacuagcuccgugauuacagacguaugcacggauuacaccauauaugggguuucuggaacuggcaucauuaaaccuagcgacuugcugcuccauaacggcaucgcuuuuacaucaccaaccggggagcuguacgccuucaagaauauaacaacuggaaaaacccuucaggugcugcccugugagacgccuagucaauugauugucaucaacaauaccguggucggugcuaucacauccagcaacucuacugaaaacaauagguuuaccacaacuauugugaccccaacguucuuuuauucaacaaacgccaccacucucaauugcacaaagcccguucugaguuacggcccgaucagcguguguuccgauggggcaauugccggaaccucuacuuuacagaacacccggccuucgauaguaagccuguacgacggcgagaucgaaauucccuccgcuuucucacuaaguguccagacagaguaucuccaggugcaagcggaacagguuaucguggauugcccacaguacgucuguaaugguaacucucgaugccugcagcuuuuggcacaauauacgagcgccuguuccaauaucgagguggcucugcacucaagcgcccagcucgacucucgcgagauuauauccauguuuaagaccaguacucagagccugcaguuagcaaacaucacaaauuucaaaggggacuacaacuuuucuuccauucugaccucaagaguaggcggaaggagugccaucgaagaucuuuuguucaauaaggugguuacaagcggccucgggacugucgaccaagauuauaaaucgugcucccggaacauggcuauugccgaccugguguguucucaguacuauaauggaaucauggugcuaccuggugucguugaugcagagaagauggcgauguacaccggcagccugacgggggcuaugguguucggaggccucacagccgcagccgcuauacccuuugccaccgcagugcaggcucgccugaacuacguagcccuucaaacuaaugucuugcaggaaaaccagaaaauccuggcggagucauucaaccaggccguggguaauauuaguuuagcucucuccucuguuaacgacgcaauccaacagaccagcgaagcccugaauacaguggcuauugccaucaagaaaauacagacugucgugaaccagcaaggggaggcacuuucccaccugaccgcgcaguugucaaauaacuuucaggccauuagcacaaguauccaggauauuuauaauagacucgagccacccgaagcuaaccaacagguugacaggcugaucaauggccgucuagccgcacugaacgcuuacgugacgcagcuccugaaucaaaugucucagauacggcagucccgacuuuuggcccagcaaaagaucaacgagugcguaaagagccagucgccuagauauggauucuguggcaaugggacccauaucuuuucacugacucagacagcaccaaacggaauuuucuuuaugcacgccgucuuagugccgaauaaauucaccagggugaacgcuucugcggguauuugcgucgauaacacucgcggcuacagucuccagccccaacugauccuuuaucaguuuaauaacuccuggcggguuacaccuagaaauauguacgaaccaaggcugccccgccaggccgacuucauacagcuaaccgauugcagcgugacguuuuauaacacuaccgcagcuaaucucccuaacauuaucccagacguaaucgaugugaaucaaacagucucugacauuaucgacaaccugcccaccgccacuccgccucagugggauguggggauuuacaauaacacaauauugaaucugaccguugagaucaacgacuuacaggaacgaagcaagaaucucucccagauugccgaucggcugcaaaacuacaucgacaaucuuaacaauacacugguggauuuggaguggcucaaccgugucgagacuuaucugaaauggccaugguacauuuggcuagcuaucgcacuggcccuuauagcguucgugaccauccucauuacgaucuuucuguguacaggaugcuguggcgguugcuucggguguugcggcggauguuucggcuuguuuucaaagaaaaagagauauaccgacgaucagcccacuccuaguuucaaguuuaaagaaugguga

SEQ ID NO: 15031 - RNA, 3282 nt, Artificial Sequence
  PDCoV/Swine/Thailand/S5011/2015__AMN91621.1 spike protein CDS human (variant)
augcagagagcccugcucaucaugacccuucugugcuuggcuagggcaaaguucgccgacgauuuacuggaccuacucacauuucccggcgcgcaccgguuccugcauaaaccuacucgcaacgauagcauucuuuacucccgagcuaauaacaauuuugacguggggguccugccaggauauccgacgaagaacguuaauuuguucucuccccucaccaacucaacacugccuauaaauggucugcaccguaguuaccaaccacucauguuaaacugucugacuaaaaucaccaaucagacacuuagcauguauuugcagcccuccgagauucagaccuacucuugcggcggggccauggugaaguaucaaacucaugaugcaguaagaaucauucuggaccuaaucgccacagauaggauaucgguggaagucgugggacaggcuggcgagaacuacguuuuuguguguucagaccaguucaauuauaccacggcacuccacaacagcaccuuuuucagucuuaauucccagcuguacugcuuuacuaacaauacauaccuggguaucuugccuccagaucucacugacuucaccgucuaucggacagggcaauuuuacgccaacggauaucuguuaggcacccugcccauuacggugaacuacguacgccucuauagaggccagcuuucugcuaauagcgcccauuucgcgcuggcaaacuugacugauacacuaaucacccugacuaauacaaccauuucccagaucacguacugugacaaaucaguuguggauaguauagccugccagaggagcucucaccaagucgaagacggguuuuauuccgacccuaagucagcugugcgggcccgccagcgaaccauugugacacucccaaagcugccggagcuugaagucguucagcugaacaucagcgcacacauggauuucggagaggcuagauuggacagugugacuauuaaugguaacaccucuuacuguguaacaaaacccuacuucaggcucgagacuaauuuucugugccggggcuguaccaugaacuuacguacagauaccugcuccuucgaccugagcgccgugaauaacgggaugucguuuucucaauucugucuauccacugaaucaggagcgugcgagaugaagaucaucgucacguauguguggaauuaccuccugcgccagagacuuuauguuacagccguggaaggccagacccauacugguaccacaaguguccacgcaaccgauacuagcuccgugauuacagacguaugcacggauuacaccauauaugggguuucuggaacuggcaucauuaaaccuagcgacuugcugcuccauaacggcaucgcuuuuacaucaccaaccggggagcuguacgccuucaagaauauaacaacuggaaaaacccuucaggugcugcccugugagacgccuagucaauugauugucaucaacaauaccguggucggugcuaucacauccagcaacucuacugaaaacaauagguuuaccacaacuauugugaccccaacguucuuuuauucaacaaacgccaccacucucaauugcacaaagcccguucugaguuacggcccgaucagcguguguuccgauggggcaauugccggaaccucuacuuuacagaacacccggccuucgauaguaagccuguacgacggcgagaucgaaauucccuccgcuuucucacuaaguguccagacagaguaucuccaggugcaagcggaacagguuaucguggauugcccacaguacgucuguaaugguaacucucgaugccugcagcuuuuggcacaauauacgagcgccuguuccaauaucgagguggcucugcacucaagcgcccagcucgacucucgcgagauuauauccauguuuaagaccaguacucagagccugcaguuagcaaacaucacaaauuucaaaggggacuacaacuuuucuuccauucugaccucaagaguaggcggaaggagugccaucgaagaucuuuuguucaauaaggugguuacaagcggccucgggacugucgaccaagauuauaaaucgugcucccggaacauggcuauugccgaccugguguguucucaguacuauaauggaaucauggugcuaccuggugucguugaugcagagaagauggcgauguacaccggcagccugacgggggcuaugguguucggaggccucacagccgcagccgcuauacccuuugccaccgcagugcaggcucgccugaacuacguagcccuucaaacuaaugucuugcaggaaaaccagaaaauccuggcggagucauucaaccaggccguggguaauauuaguuuagcucucuccucuguuaacgacgcaauccaacagaccagcgaagcccugaauacaguggcuauugccaucaagaaaauacagacugucgugaaccagcaaggggaggcacuuucccaccugaccgcgcaguugucaaauaacuuucaggccauuagcacaaguauccaggauauuuauaauagacucgagccacccgaagcuaaccaacagguugacaggcugaucaauggccgucuagccgcacugaacgcuuacgugacgcagcuccugaaucaaaugucucagauacggcagucccgacuuuuggcccagcaaaagaucaacgagugcguaaagagccagucgccuagauauggauucuguggcaaugggacccauaucuuuucacugacucagacagcaccaaacggaauuuucuuuaugcacgccgucuuagugccgaauaaauucaccagggugaacgcuucugcggguauuugcgucgauaacacucgcggcuacagucuccagccccaacugauccuuuaucaguuuaauaacuccuggcggguuacaccuagaaauauguacgaaccaaggcugccccgccaggccgacuucauacagcuaaccgauugcagcgugacguuuuauaacacuaccgcagcuaaucucccuaacauuaucccagacguaaucgaugugaaucaaacagucucugacauuaucgacaaccugcccaccgccacuccgccucagugggauguggggauuuacaauaacacaauauugaaucugaccguugagaucaacgacuuacaggaacgaagcaagaaucucucccagauugccgaucggcugcaaaacuacaucgacaaucuuaacaauacacugguggauuuggaguggcucaaccgugucgagacuuga

SEQ ID NO: 15032 - RNA, 3363 nt, Artificial Sequence
  PDCoV/Swine/Thailand/S5011/2015__AMN91621.1 spike protein CDS human (variant)
augcagagagcccugcucaucaugacccuucugugcuuggcuagggcaaaguucgccgacgauuuacuggaccuacucacauuucccggcgcgcaccgguuccugcauaaaccuacucgcaacgauagcauucuuuacucccgagcuaauaacaauuuugacguggggguccugccaggauauccgacgaagaacguuaauuuguucucuccccucaccaacucaacacugccuauaaauggucugcaccguaguuaccaaccacucauguuaaacugucugacuaaaaucaccaaucagacacuuagcauguauuugcagcccuccgagauucagaccuacucuugcggcggggccauggugaaguaucaaacucaugaugcaguaagaaucauucuggaccuaaucgccacagauaggauaucgguggaagucgugggacaggcuggcgagaacuacguuuuuguguguucagaccaguucaauuauaccacggcacuccacaacagcaccuuuuucagucuuaauucccagcuguacugcuuuacuaacaauacauaccuggguaucuugccuccagaucucacugacuucaccgucuaucggacagggcaauuuuacgccaacggauaucuguuaggcacccugcccauuacggugaacuacguacgccucuauagaggccagcuuucugcuaauagcgcccauuucgcgcuggcaaacuugacugauacacuaaucacccugacuaauacaaccauuucccagaucacguacugugacaaaucaguuguggauaguauagccugccagaggagcucucaccaagucgaagacggguuuuauuccgacccuaagucagcugugcgggcccgccagcgaaccauugugacacucccaaagcugccggagcuugaagucguucagcugaacaucagcgcacacauggauuucggagaggcuagauuggacagugugacuauuaaugguaacaccucuuacuguguaacaaaacccuacuucaggcucgagacuaauuuucugugccggggcuguaccaugaacuuacguacagauaccugcuccuucgaccugagcgccgugaauaacgggaugucguuuucucaauucugucuauccacugaaucaggagcgugcgagaugaagaucaucgucacguauguguggaauuaccuccugcgccagagacuuuauguuacagccguggaaggccagacccauacugguaccacaaguguccacgcaaccgauacuagcuccgugauuacagacguaugcacggauuacaccauauaugggguuucuggaacuggcaucauuaaaccuagcgacuugcugcuccauaacggcaucgcuuuuacaucaccaaccggggagcuguacgccuucaagaauauaacaacuggaaaaacccuucaggugcugcccugugagacgccuagucaauugauugucaucaacaauaccguggucggugcuaucacauccagcaacucuacugaaaacaauagguuuaccacaacuauugugaccccaacguucuuuuauucaacaaacgccaccacucucaauugcacaaagcccguucugaguuacggcccgaucagcguguguuccgauggggcaauugccggaaccucuacuuuacagaacacccggccuucgauaguaagccuguacgacggcgagaucgaaauucccuccgcuuucucacuaaguguccagacagaguaucuccaggugcaagcggaacagguuaucguggauugcccacaguacgucuguaaugguaacucucgaugccugcagcuuuuggcacaauauacgagcgccuguuccaauaucgagguggcucugcacucaagcgcccagcucgacucucgcgagauuauauccauguuuaagaccaguacucagagccugcaguuagcaaacaucacaaauuucaaaggggacuacaacuuuucuuccauucugaccucaagaguaggcggaaggagugccaucgaagaucuuuuguucaauaaggugguuacaagcggccucgggacugucgaccaagauuauaaaucgugcucccggaacauggcuauugccgaccugguguguucucaguacuauaauggaaucauggugcuaccuggugucguugaugcagagaagauggcgauguacaccggcagccugacgggggcuaugguguucggaggccucacagccgcagccgcuauacccuuugccaccgcagugcaggcucgccugaacuacguagcccuucaaacuaaugucuugcaggaaaaccagaaaauccuggcggagucauucaaccaggccguggguaauauuaguuuagcucucuccucuguuaacgacgcaauccaacagaccagcgaagcccugaauacaguggcuauugccaucaagaaaauacagacugucgugaaccagcaaggggaggcacuuucccaccugaccgcgcaguugucaaauaacuuucaggccauuagcacaaguauccaggauauuuauaauagacucgagccacccgaagcuaaccaacagguugacaggcugaucaauggccgucuagccgcacugaacgcuuacgugacgcagcuccugaaucaaaugucucagauacggcagucccgacuuuuggcccagcaaaagaucaacgagugcguaaagagccagucgccuagauauggauucuguggcaaugggacccauaucuuuucacugacucagacagcaccaaacggaauuuucuuuaugcacgccgucuuagugccgaauaaauucaccagggugaacgcuucugcggguauuugcgucgauaacacucgcggcuacagucuccagccccaacugauccuuuaucaguuuaauaacuccuggcggguuacaccuagaaauauguacgaaccaaggcugccccgccaggccgacuucauacagcuaaccgauugcagcgugacguuuuauaacacuaccgcagcuaaucucccuaacauuaucccagacguaaucgaugugaaucaaacagucucugacauuaucgacaaccugcccaccgccacuccgccucagugggauguggggauuuacaauaacacaauauugaaucugaccguugagaucaacgacuuacaggaacgaagcaagaaucucucccagauugccgaucggcugcaaaacuacaucgacaaucuuaacaauacacugguggauuuggaguggcucaaccgugucgagacuggaggcuauauuccagaagcucccagagacggucaggcauacgugaggaaagauggggaguggguucugcuaucaaccuucuga

SEQ ID NO: 15033 - RNA, 4161 nt, Artificial Sequence
  PEDV/NPL-PEDv/2013/P10__AHZ94887.1 spike protein CDS human (1-1386)
augaaaagccugaccuacuucuggcucuuucuucccgugcuguccacauugucuuuaccucaggacgucacuagaugcucagccaacacgaauuucaggcgguuuuucaguaaauuuaacguucaagcuccagcagugguagugcugggcggguaucuaccgaucggagagaaucagggugucaacagcaccugguacugugccggccagcaccccacagcguccggggugcauggaauuuucguuucucacauacgcggcggucauggguuugaaaucggaauuucgcaggagccuuucgauccaucaggcuaucaacucuaccugcacaaggcuacuaauggcaacaccaaugccacagcacgacuucguaucugccaguuucccagcauuaaaacccuggggccuacugccaacaaugacgugacaaccggaagaaacuguuuguucaauaaggcuaucccagcacauaugagugaacacuccgucguggguauaacgugggauaacgacaggguaacuguguuuucugauaaaaucuauuacuucuauuuuaagaaugacuggagccggguugccaccaagugcuacaacuccggcgggugugcuaugcaguacgucuaugagcccacauacuauaugcucaaugugacuucagccggagaagauggcauuaguuaccagccuugcaccgcgaacuguaucgguuaugcagccaacguguucgcuacagagccaaaugggcacauuccggagggauucagcuuuaacaauugguuccugcugucuaacgacuccacccucguccauggcaaaguugugucaaaucaacccuuacugguaaacugccuuuuggccaucccuaagauauacggccuggggcaguuuuucagcuuuaaucagacgauugauggaguguguaacggugcagcuguccagcgcgccccagaagcgcuaagauucaauaucaacgacauuagugugauccucgccgagggcucuaucguucugcacacugcacuugggacaaauuuuuccuucgugugcagcaacucgucuaauccccaucuggcuaccuuugccauuccuuugggagcuacucaagucccauauuacuguuucuuuaaaguggauacauacaacuccaccguauauaaguuccucgccguucugcccccgacggugagggaaauagucaucaccaaauacggcgacguguaugucaaugguuuuggguacuuacaccugggccuccuugaugcagugacaauuaacuucacuggacacggcaccgacgacgauguuucaggguucuggacaaucgccaguacuaacuuuguggacgcucugauagagguacagggaaccgcgauucagcggaucuuguauugcgaugacccugucagccaacuaaagugcucccagguggcauucgaucuggacgaugguuuuuacacaaucucuagccgcaaucuccugucacaugagcagcccauuaguuucguuacccuuccauccuuuaacgaccacagcuucgugaauaucacugucucugccucauuuggcgggcauaguggagcuaaccugauugccagcgauacgacaauaaauggcuucuccucuuuuuguguggacacccgacaguucacuaucucguuguuuuauaacguaaccaauagcuacgguuacguguccaagucacaagauaguaacugcccuuucacacuccagucuguuaaugacuaucugagcuuuuccaaauucugugucucaaccagcuuacuggcaucugccugcacuauugaccuauucggguaccccgaauuuggcuccggagugaaguucacaagucucuauuuucaguucacgaaaggcgagcugaucaccgggacuccaaagccccuugaaggagugacagaugucagcuuuaugaccuuggacguuuguacaaaauacacuaucuaugguuucaagggcgaggggauuauaacccugacgaacucuuccuuucucgcuggaguguacuauaccucagauaguggccagcugcuugccuucaaaaaugugacaagcggugcaguauacucggucacuccuugcuccuuuucugaacaagcggcuuacguggacgaugacaucguuggggugauuagcucacugaguuccucuaccuucaacagcacaagagaguugccaggcuuuuucuaucacuccaaugauggaucaaacuguacugagccgguccucguguacagcaauaucggcguuugcaagagugggucuauuggauaugugcccucccagagcggccagguaaagaucgccccuaccgucacggguaacauaucgaucccaacaaacuucucaaugucuauuaggaccgaauaccugcaguuauauaauacucccgugaguguggacugugcaacauacgucugcaacggaaauucccgguguaaacaacugcuaacccaguauacugccgcuugcaagaccaucgagagcgcccuccagcugucugcacgucuugaaagcguugaggugaacuccauguugacaauuucagaugaagcucugcagcucgccacgaucaguagcuuuaauggggacggcuacaacuucaccaauguacugggugugucugucuacgauccugcgucccgcagagugguucaaaagaggucauuuauagaggacuuacuguucaacaagguggucacuaauggccuugggacaguggaugaggacuauaaacggugcaguaacggacgaagcguugccgacuuggugugugcucaguacuauuccggcgucaugguacucccaggggugguugaugcagaaaagcugcauauguacucugccucgcuaauuggaggcauggugcuggguggguuuaccagcgcugccgcacuccccuucucauaugcgguccaggcccgccugaauuaccuugcuuugcaaacagacgugcugcagagaaaccagcaguuacucgccgaguccuuuaauagugcaaucggaaacauuacuucugcuuucgaaagcguaaaggaggccaucucccaaaccucaaaaggccugaauacgguggcacacgcccuuacaaagguccaggaaguugugaacucucagggugcugcgcugacccaguugacugugcaacuccagcacaacuuucaggccauaagcaguuccaucgaugacauuuauagcaggcuggauauccuaucugcagacgcucaggucgaucggcugauuaccggccgccucucagcccugaaugccuucguggcucaaacacuuacuaaauacaccgagguucaggcauccagaaaguuggcccagcaaaaaguaaacgagugcgugaagagucagagccagagguacggguuuuguggaggcgacggggaacauaucuucucgcugguccaggcggcuccgcaaggauuacucuuucugcacacagugcuuguuccuucugauuucguggacgucauagccauugcaggccugugcgugaaugaugagaucgcccuaacgcuccgugaaccaggucugguauuguucacccaugagcugcagaaccacacugcuacagaguauuuugucuccagccggcgaauguucgaacccagaaagccuaccgugucagacuuuguucagaucgagaguuguguggucacuuacgugaauuuaacaagggaucagcuccccgacguuauuccagacuauaucgaugugaacaaaacccuguacgaaauucuugcaucucugccuaaucgcacggggcccuccuugccacucgacgucuucaacgccacuuaucugaaucuaaccggagagauagcggaucuggaacaacggagcgagucacuuagaaacacaaccgaggaacuccagagucugaucuacaauauuaacaauacuuugguggaccuggagugguuaaacaggguagaaacauauaucaaguggccgugguggguguggcucauuaucuuuauaguucugaucuucgucgugagccuucugguguuuugcuguauuuccaccggcugcugugguugcuguggcugcugcugugcuugcuucucuggguguugccgcggaccucgauugcagcccuacgaggucuuugaaaaaguacacgugcaguga

SEQ ID NO: 15034 - RNA, 4161 nt, Artificial Sequence
  PEDV/NPL-PEDv/2013/P10__AHZ94887.1 spike protein CDS human (1-1386)(I1076P_L1077P)
augaagucucugaccuacuucuggcucuuucuucccgugcuguccacauugucuuuaccucaggacgucacuagaugcucagccaacacgaauuucaggcgguuuuucaguaaauuuaacguucaagcuccagcagugguagugcugggcggguaucuaccgaucggagagaaucagggugucaacagcaccugguacugugccggccagcaccccacagcguccggggugcauggaauuuucguuucucacauacgcggcggucauggguuugaaaucggaauuucgcaggagccuuucgauccaucaggcuaucaacucuaccugcacaaggcuacuaauggcaacaccaaugccacagcacgacuucguaucugccaguuucccagcauuaaaacccuggggccuacugccaacaaugacgugacaaccggaagaaacuguuuguucaauaaggcuaucccagcacauaugagugaacacuccgucguggguauaacgugggauaacgacaggguaacuguuuuuagcgauaaaaucuauuacuucuauuuuaagaaugacuggagccggguggccaccaagugcuacaacuccggcgggugugcuaugcaguacgucuaugagcccacauacuauaugcucaaugugacuucagccggagaagauggcauuaguuaccagccuugcaccgcgaacuguaucgguuaugcagccaacguguucgcuacagagccaaaugggcacauuccggagggauucagcuuuaacaauugguuccugcugucuaacgacuccacccucguccauggcaaaguugugucaaaucaacccuuacugguaaacugccuuuuggccaucccuaagauauacggccuggggcaguuuuucagcuuuaaucagacgauugauggaguguguaacggugcagcuguccagcgcgccccagaagcgcuaagauucaauaucaacgacauuagugugauccucgccgagggcucuaucguucugcacacugcacuugggacaaauuuuuccuucgugugcagcaacucgucuaauccccaucuggcuaccuuugccauuccuuugggagcuacucaagucccauauuacuguuucuuuaaaguggauacauacaacuccaccguauauaaguuccucgccguucugcccccgacggugagggaaauagucaucaccaaauacggcgacguguaugucaaugguuuuggguacuuacaccugggccuccuugaugcagugacaauuaacuucacuggacacggcaccgacgacgauguuucaggguucuggacaaucgccaguacuaacuuuguggacgcucugauagagguacagggaaccgcgauucagcggaucuuguauugcgaugacccugucagccaacuaaagugcucccagguggcauucgaucuggacgaugguuuuuacacaaucucuagccgcaaucuccugucacaugagcagcccauuaguuucguuacccuuccauccuuuaacgaccacagcuucgugaauaucacugucucugccucauuuggcgggcauaguggagcuaaccugauugccagcgauacgacaauaaauggcuucuccucuuuuuguguggacacccgacaguucacuaucucguuguuuuauaacguaaccaauagcuacgguuacguguccaagucacaagauaguaacugcccuuucacacuccagucuguuaaugacuaucugagcuuuuccaaauucugugucucaaccagcuuacuggcaucugccugcacuauugaccuauucggguaccccgaauuuggcuccggagugaaguucacaagucucuauuuucaguucacgaaaggcgagcugaucaccgggacuccaaagccccuugaaggagugacagaugucagcuuuaugaccuuggacguuuguacaaaauacacuaucuaugguuucaagggcgaggggauuauaacccugacgaacucuuccuuucucgcuggaguguacuauaccucagauaguggccagcugcuugccuucaaaaaugugacaagcggugcaguauacucggucacuccuugcuccuuuucugaacaagcggcuuacguggacgaugacaucguuggggugauuagcucacugaguuccucuaccuucaacagcacaagagaguugccaggcuuuuucuaucacuccaaugauggaucaaacuguacugagccgguccucguguacagcaauaucggcguuugcaagagugggucuauuggauaugugcccucccagagcggccagguaaagaucgccccuaccgucacggguaacauaucgaucccaacaaacuucucaaugucuauuaggaccgaauaccugcaguuauauaauacucccgugaguguggacugugcaacauacgucugcaacggaaauucccgguguaaacaacugcuaacccaguauacugccgcuugcaagaccaucgagagcgcccuccagcugucugcacgucuugaaagcguugaggugaacuccauguugacaauuucagaugaagcucugcagcucgccacgaucaguagcuuuaauggggacggcuacaacuucaccaauguacugggugugucugucuacgauccugcgucccgcagagugguucaaaagaggucauuuauagaggacuuacuguucaacaagguggucacuaauggccuugggacaguggaugaggacuauaaacggugcaguaacggacgaagcguugccgacuuggugugugcucaguacuauuccggcgucaugguacucccaggggugguugaugcagaaaagcugcauauguacucugccucgcuaauuggaggcauggugcuggguggguuuaccagcgcugccgcacuccccuucucauaugcgguccaggcccgccugaauuaccuugcuuugcaaacagacgugcugcagagaaaccagcaguuacucgccgaguccuuuaauagugcaaucggaaacauuacuucugcuuucgaaagcguaaaggaggccaucucccaaaccucaaaaggccugaauacgguggcacacgcccuuacaaagguccaggaaguugugaacucucagggugcugcgcugacccaguugacugugcaacuccagcacaacuuucaggccauaagcaguuccaucgaugacauuuauagcaggcuggauccgccuucugcagacgcucaggucgaucggcuaaucaccggccgccugucagcccucaaugccuucguggcucaaacacugacuaaauacaccgagguucaggcauccagaaaacuugcccagcaaaaaguaaacgagugcgugaagagucagagccagagguacggguuuuguggaggcgacggggaacauauuuucucguugguccaggcggcuccacaaggacuguuauuucuccacacagugcugguucccucugauuucguggacgucaucgccauagcaggccuuugcgugaaugaugagauugcccugacgcuacgugaaccuggucucguacuguucacccaugaguugcagaaccacacugcuacagaguauuuugucuccagccggcgaauguucgaacccagaaagccaaccgugucagacuuuguucagaucgagaguuguguggucacuuacgugaaucugacaagggaucaguuaccugacguuauccccgacuauauugaugugaacaaaacccucuacgaaauccuggcaucucuuccaaaucgcacggggccgucccugccuuuggacgucuucaacgccacuuaucucaaucugaccggagagauugcggaucuagaacaacggagcgagucacugagaaacacaaccgaggaacuucagagucucauauacaauaucaacaauacucugguggacuuggaguggcugaacaggguagaaacauauauuaaguggcccuggugggugugguuaaucauuuuuaucguucucauauucgucgugagccugcuuguguuuugcuguaucuccaccggcugcugugguugcuguggcugcugcugugcuugcuucucuggguguugccgcggaccacgacugcagcccuacgaggucuuugaaaaaguacacgugcaguga

SEQ ID NO: 15035 - RNA, 3969 nt, Artificial Sequence
  PEDV/NPL-PEDv/2013/P10__AHZ94887.1 spike protein CDS human (variant)
augaagucucugaccuacuucuggcucuuucuucccgugcuguccacauugucuuuaccucaggacgucacuagaugcucagccaacacgaauuucaggcgguuuuucaguaaauuuaacguucaagcuccagcagugguagugcugggcggguaucuaccgaucggagagaaucagggugucaacagcaccugguacugugccggccagcaccccacagcguccggggugcauggaauuuucguuucucacauacgcggcggucauggguuugaaaucggaauuucgcaggagccuuucgauccaucaggcuaucaacucuaccugcacaaggcuacuaauggcaacaccaaugccacagcacgacuucguaucugccaguuucccagcauuaaaacccuggggccuacugccaacaaugacgugacaaccggaagaaacuguuuguucaauaaggcuaucccagcacauaugagugaacacuccgucguggguauaacgugggauaacgacaggguaacuguuuuuagcgauaaaaucuauuacuucuauuuuaagaaugacuggagccggguggccaccaagugcuacaacuccggcgggugugcuaugcaguacgucuaugagcccacauacuauaugcucaaugugacuucagccggagaagauggcauuaguuaccagccuugcaccgcgaacuguaucgguuaugcagccaacguguucgcuacagagccaaaugggcacauuccggagggauucagcuuuaacaauugguuccugcugucuaacgacuccacccucguccauggcaaaguugugucaaaucaacccuuacugguaaacugccuuuuggccaucccuaagauauacggccuggggcaguuuuucagcuuuaaucagacgauugauggaguguguaacggugcagcuguccagcgcgccccagaagcgcuaagauucaauaucaacgacauuagugugauccucgccgagggcucuaucguucugcacacugcacuugggacaaauuuuuccuucgugugcagcaacucgucuaauccccaucuggcuaccuuugccauuccuuugggagcuacucaagucccauauuacuguuucuuuaaaguggauacauacaacuccaccguauauaaguuccucgccguucugcccccgacggugagggaaauagucaucaccaaauacggcgacguguaugucaaugguuuuggguacuuacaccugggccuccuugaugcagugacaauuaacuucacuggacacggcaccgacgacgauguuucaggguucuggacaaucgccaguacuaacuuuguggacgcucugauagagguacagggaaccgcgauucagcggaucuuguauugcgaugacccugucagccaacuaaagugcucccagguggcauucgaucuggacgaugguuuuuacacaaucucuagccgcaaucuccugucacaugagcagcccauuaguuucguuacccuuccauccuuuaacgaccacagcuucgugaauaucacugucucugccucauuuggcgggcauaguggagcuaaccugauugccagcgauacgacaauaaauggcuucuccucuuuuuguguggacacccgacaguucacuaucucguuguuuuauaacguaaccaauagcuacgguuacguguccaagucacaagauaguaacugcccuuucacacuccagucuguuaaugacuaucugagcuuuuccaaauucugugucucaaccagcuuacuggcaucugccugcacuauugaccuauucggguaccccgaauuuggcuccggagugaaguucacaagucucuauuuucaguucacgaaaggcgagcugaucaccgggacuccaaagccccuugaaggagugacagaugucagcuuuaugaccuuggacguuuguacaaaauacacuaucuaugguuucaagggcgaggggauuauaacccugacgaacucuuccuuucucgcuggaguguacuauaccucagauaguggccagcugcuugccuucaaaaaugugacaagcggugcaguauacucggucacuccuugcuccuuuucugaacaagcggcuuacguggacgaugacaucguuggggugauuagcucacugaguuccucuaccuucaacagcacaagagaguugccaggcuuuuucuaucacuccaaugauggaucaaacuguacugagccgguccucguguacagcaauaucggcguuugcaagagugggucuauuggauaugugcccucccagagcggccagguaaagaucgccccuaccgucacggguaacauaucgaucccaacaaacuucucaaugucuauuaggaccgaauaccugcaguuauauaauacucccgugaguguggacugugcaacauacgucugcaacggaaauucccgguguaaacaacugcuaacccaguauacugccgcuugcaagaccaucgagagcgcccuccagcugucugcacgucuugaaagcguugaggugaacuccauguugacaauuucagaugaagcucugcagcucgccacgaucaguagcuuuaauggggacggcuacaacuucaccaauguacugggugugucugucuacgauccugcgucccgcagagugguucaaaagaggucauuuauagaggacuuacuguucaacaagguggucacuaauggccuugggacaguggaugaggacuauaaacggugcaguaacggacgaagcguugccgacuuggugugugcucaguacuauuccggcgucaugguacucccaggggugguugaugcagaaaagcugcauauguacucugccucgcuaauuggaggcauggugcuggguggguuuaccagcgcugccgcacuccccuucucauaugcgguccaggcccgccugaauuaccuugcuuugcaaacagacgugcugcagagaaaccagcaguuacucgccgaguccuuuaauagugcaaucggaaacauuacuucugcuuucgaaagcguaaaggaggccaucucccaaaccucaaaaggccugaauacgguggcacacgcccuuacaaagguccaggaaguugugaacucucagggugcugcgcugacccaguugacugugcaacuccagcacaacuuucaggccauaagcaguuccaucgaugacauuuauagcaggcuggauccgccuucugcagacgcucaggucgaucggcuaaucaccggccgccugucagcccucaaugccuucguggcucaaacacugacuaaauacaccgagguucaggcauccagaaaacuugcccagcaaaaaguaaacgagugcgugaagagucagagccagagguacggguuuuguggaggcgacggggaacauauuuucucguugguccaggcggcuccacaaggacuguuauuucuccacacagugcugguucccucugauuucguggacgucaucgccauagcaggccuuugcgugaaugaugagauugcccugacgcuacgugaaccuggucucguacuguucacccaugaguugcagaaccacacugcuacagaguauuuugucuccagccggcgaauguucgaacccagaaagccaaccgugucagacuuuguucagaucgagaguuguguggucacuuacgugaaucugacaagggaucaguuaccugacguuauccccgacuauauugaugugaacaaaacccucuacgaaauccuggcaucucuuccaaaucgcacggggccgucccugccuuuggacgucuucaacgccacuuaucucaaucugaccggagagauugcggaucuagaacaacggagcgagucacugagaaacacaaccgaggaacuucagagucucauauacaauaucaacaauacucugguggacuuggaguggcugaacaggguagaaacauga

SEQ ID NO: 15036 - RNA, 4050 nt, Artificial Sequence
  PEDV/NPL-PEDv/2013/P10__AHZ94887.1 spike protein CDS human (variant)
augaagucucugaccuacuucuggcucuuucuucccgugcuguccacauugucuuuaccucaggacgucacuagaugcucagccaacacgaauuucaggcgguuuuucaguaaauuuaacguucaagcuccagcagugguagugcugggcggguaucuaccgaucggagagaaucagggugucaacagcaccugguacugugccggccagcaccccacagcguccggggugcauggaauuuucguuucucacauacgcggcggucauggguuugaaaucggaauuucgcaggagccuuucgauccaucaggcuaucaacucuaccugcacaaggcuacuaauggcaacaccaaugccacagcacgacuucguaucugccaguuucccagcauuaaaacccuggggccuacugccaacaaugacgugacaaccggaagaaacuguuuguucaauaaggcuaucccagcacauaugagugaacacuccgucguggguauaacgugggauaacgacaggguaacuguuuuuagcgauaaaaucuauuacuucuauuuuaagaaugacuggagccggguggccaccaagugcuacaacuccggcgggugugcuaugcaguacgucuaugagcccacauacuauaugcucaaugugacuucagccggagaagauggcauuaguuaccagccuugcaccgcgaacuguaucgguuaugcagccaacguguucgcuacagagccaaaugggcacauuccggagggauucagcuuuaacaauugguuccugcugucuaacgacuccacccucguccauggcaaaguugugucaaaucaacccuuacugguaaacugccuuuuggccaucccuaagauauacggccuggggcaguuuuucagcuuuaaucagacgauugauggaguguguaacggugcagcuguccagcgcgccccagaagcgcuaagauucaauaucaacgacauuagugugauccucgccgagggcucuaucguucugcacacugcacuugggacaaauuuuuccuucgugugcagcaacucgucuaauccccaucuggcuaccuuugccauuccuuugggagcuacucaagucccauauuacuguuucuuuaaaguggauacauacaacuccaccguauauaaguuccucgccguucugcccccgacggugagggaaauagucaucaccaaauacggcgacguguaugucaaugguuuuggguacuuacaccugggccuccuugaugcagugacaauuaacuucacuggacacggcaccgacgacgauguuucaggguucuggacaaucgccaguacuaacuuuguggacgcucugauagagguacagggaaccgcgauucagcggaucuuguauugcgaugacccugucagccaacuaaagugcucccagguggcauucgaucuggacgaugguuuuuacacaaucucuagccgcaaucuccugucacaugagcagcccauuaguuucguuacccuuccauccuuuaacgaccacagcuucgugaauaucacugucucugccucauuuggcgggcauaguggagcuaaccugauugccagcgauacgacaauaaauggcuucuccucuuuuuguguggacacccgacaguucacuaucucguuguuuuauaacguaaccaauagcuacgguuacguguccaagucacaagauaguaacugcccuuucacacuccagucuguuaaugacuaucugagcuuuuccaaauucugugucucaaccagcuuacuggcaucugccugcacuauugaccuauucggguaccccgaauuuggcuccggagugaaguucacaagucucuauuuucaguucacgaaaggcgagcugaucaccgggacuccaaagccccuugaaggagugacagaugucagcuuuaugaccuuggacguuuguacaaaauacacuaucuaugguuucaagggcgaggggauuauaacccugacgaacucuuccuuucucgcuggaguguacuauaccucagauaguggccagcugcuugccuucaaaaaugugacaagcggugcaguauacucggucacuccuugcuccuuuucugaacaagcggcuuacguggacgaugacaucguuggggugauuagcucacugaguuccucuaccuucaacagcacaagagaguugccaggcuuuuucuaucacuccaaugauggaucaaacuguacugagccgguccucguguacagcaauaucggcguuugcaagagugggucuauuggauaugugcccucccagagcggccagguaaagaucgccccuaccgucacggguaacauaucgaucccaacaaacuucucaaugucuauuaggaccgaauaccugcaguuauauaauacucccgugaguguggacugugcaacauacgucugcaacggaaauucccgguguaaacaacugcuaacccaguauacugccgcuugcaagaccaucgagagcgcccuccagcugucugcacgucuugaaagcguugaggugaacuccauguugacaauuucagaugaagcucugcagcucgccacgaucaguagcuuuaauggggacggcuacaacuucaccaauguacugggugugucugucuacgauccugcgucccgcagagugguucaaaagaggucauuuauagaggacuuacuguucaacaagguggucacuaauggccuugggacaguggaugaggacuauaaacggugcaguaacggacgaagcguugccgacuuggugugugcucaguacuauuccggcgucaugguacucccaggggugguugaugcagaaaagcugcauauguacucugccucgcuaauuggaggcauggugcuggguggguuuaccagcgcugccgcacuccccuucucauaugcgguccaggcccgccugaauuaccuugcuuugcaaacagacgugcugcagagaaaccagcaguuacucgccgaguccuuuaauagugcaaucggaaacauuacuucugcuuucgaaagcguaaaggaggccaucucccaaaccucaaaaggccugaauacgguggcacacgcccuuacaaagguccaggaaguugugaacucucagggugcugcgcugacccaguugacugugcaacuccagcacaacuuucaggccauaagcaguuccaucgaugacauuuauagcaggcuggauccgccuucugcagacgcucaggucgaucggcuaaucaccggccgccugucagcccucaaugccuucguggcucaaacacugacuaaauacaccgagguucaggcauccagaaaacuugcccagcaaaaaguaaacgagugcgugaagagucagagccagagguacggguuuuguggaggcgacggggaacauauuuucucguugguccaggcggcuccacaaggacuguuauuucuccacacagugcugguucccucugauuucguggacgucaucgccauagcaggccuuugcgugaaugaugagauugcccugacgcuacgugaaccuggucucguacuguucacccaugaguugcagaaccacacugcuacagaguauuuugucuccagccggcgaauguucgaacccagaaagccaaccgugucagacuuuguucagaucgagaguuguguggucacuuacgugaaucugacaagggaucaguuaccugacguuauccccgacuauauugaugugaacaaaacccucuacgaaauccuggcaucucuuccaaaucgcacggggccgucccugccuuuggacgucuucaacgccacuuaucucaaucugaccggagagauugcggaucuagaacaacggagcgagucacugagaaacacaaccgaggaacuucagagucucauauacaauaucaacaauacucugguggacuuggaguggcugaacaggguagaaacaggcgguuauauucccgaggcuccacgcgauggccaggccuacgugcgaaaggacggggaauggguuuuacucagcaccuuuuga

SEQ ID NO: 15037 - RNA, 4086 nt, Artificial Sequence
  MHV/S__BAK18575.1 spike protein CDS human (1-1361)
augcuuagcguguucauccucuuucuucccuccugccugggcuacauuggggacuucagauguauaaacuuggucaauaccgauacaucuaacgccucagcuccuaguguuagcacugaggugguagacguguccaagggaaucgguacguauuacgucuuagauaggguguaucugaaugcaacccuacuccugacaggcuacuauccaguugacgggucuaacuaccggaaucuugcccugacuggaaccaacacauugucgcucaauugguauaaaccgcccuuucugucagaauuuaacgauggcauuuuugcgaaggugaaaaaucugaaggcuagccucccuaaagacaguaccuccuacuucccaacuaucgucauugguucuaacuuugugacaaccagcuacacgguaguuuuagagcccuauaaugggaucauaauggccuccaucugccaguacacuauuugucugcuuccuuauaccgauugcaagccaaacacaggaggcaauaaguugaucggcuucuggcacauugaccugaaaucacccguguguauccuaaagcgcaacuuuacuuucaaugucaacgcagauuggcucuacuuucauuucuaucaacaagggggaaccuuuuacgccuauuacgcugacgcagguagugccacaaccuuccuguucagcucuuacauaggcgaugugcuuacgcaguauuuugugcugccuuucgucugcacuccaacaaccacugggguuuucuccccgcaguacugggugacacccuugguaaaacgacaguaucucuucaacuuuaaucagaagggaaccauuacgucagcuguggacugugccagcaguuacaccucugaaaucaaaugcaagacacaguccaugaacccuaauacuggcgucuaugaucugagcgguuacaccgugcagccaguuggguuaguguaucguagagucaggaaccugcccgacugucggauugaggacuggcucgcggcaaagacagugccuucgccacuuaauugggaacgcaaaacuuuccaaaacugcaauuuuaaccugucuuccuugcuaagacugguacaggccggaucacucaguuguagcaauaucgaugcugccaagguuuacggcaugugcuucggcuccaugucuaucgacaaauuugcaauucccaacagcaggcggguggaucugcagcuuggaaauucaggguuccugcagaguuuuaacuacaagauagacacccgcgcuacauccugccaauuguauuacagccucgcccagucuaaugucaccgugaacaaucacaacccgucaaguuggaaccgaagauaugguuucaaugaugucgcgacuuuuggcagggggaaacaugacguggccuacgcagaggcuuguuucacgguuggagccagcuauugcccuugugcuaaccccuccaucgugucuccaugcacaaccggcaagccuaaauucgccaauugucccacugguaccacaaaccgggagugcaauguacuggcauuagggucgaaccuguuuaagugugauugcaccuguaauccaagcccccuaacuacauacgaccuccguugccugcagggccgcuccaugcuuggagucggcgaucacugugaaggguugggagugcuggaggacaagugcgguggcucaaacacgugcaauuguagugccgaugcuuucguugggugggcgaaagacucuugccucagcaacggaagaugucauaucuuuuccaaucugaugcuuaacggcauuaauucagguaccacuugcagcacagaccugcaauugccuaacaccgaaguggucacagggauaugugugaaguaugaucucuacggcauuacuggacagggcguauucaaagaggugaaggcagacuacuauaauucuuggcagaaccuguuauacgauguuaacgggaaucugaacggauuuagggacaucgucaccaauaaaacguaucuaacccgguccugcuacaguggucgagugagcgccgcuuaucaccaggaugccccagagccggcacuccuguaccgcaaccuuaagugugacuauguguucaauaacaauaucuuuagagaagagacacccuugaacuacuucgauucuuaccugggcugcgucguuaaugccgacaacuccacugaacaagcuguggaugccugugaccucaggauggggucaggacugugcgugaauuauaguaccgcacaccgggcgcgcacaagcguaucgacuggcuacaaguuaaccacguuugagccuuucacagucuccauugugaacgauucuguugaaagcgugggugggcuguaugagaugcagaucccaaccaauuuuacuauugcuucacaucaggaguucauacagacaagagcccccaaagucaccaucgacugugcagccuuugugugcggcgauuacacuaccugcaggcaacagcuuguugaauauggaaguuucugugacaacauuaaugcuaucuugggcgaggugaacaaccucaucgacacaaugcagcugcagguagccuccgcacuaauucaaggggucacgcugucuagccgucucgcugauggaauauccggccagaucgacgauauuaauuucucaccucugcuugguugcuuggggagccaguguagugaaggaaccauggccgcgcagggccggucuacuguggaggaccuguuauuugauaaggugaaacucuccgacgucgguuucguugaagccuacaacaauugcacaggcgggcaagaggugcgagaucugcuuuguguacagagcuuuaacggaaucaaggugcugccacccgucuugucggagaaucaggugucaggcuauaccgcuggggcaacagccucuaguauguucccgccuugguccgcugccgcaggaguuccauuuagccucucugugcaauacagaauuaacggccugggugucacuaugaaugugcuaagcgaaaaccagaaaaugaucgcguccgccuucaauaacgcuauaggggccauccaggagggauuugacgcaaccaauucagcucuggccaagauucagaguguugugaacgcaaaugccgaagcucucaacaaucugcuuaaccaauugagcaauagguucggcgcgaucucugccucccugcaggagauuuuaucacgccucgaugcacuggaagcucaggcccagaucgaccggcuuauaaacgguagacugacggcccuaaacgcuuacgucaguaagcaacucagcgauaugacacugauuaaaguauccgcagcccaggcgaucgagaaggugaaugagugcguuaaaucucagucgcccaggauuaacuuuuguggcaaugggaaccacaucuugagccuggugcagaaugcuccuuauggauuauacuuccuccauuuuucauauguccccaccuccuucacuaccgccaacgugaguccaggccugugcauaucuggggaccgcggacuugcaccuaaggccggcuacuucguacaagaugacggugaauggaaauuuacagggagcaauuauuacuaucccgagccaaucacugacaagaacuccguggucaugucaucuugugcuguuaauuacaccaaggcaccggaaguguuccugaacacaagcauuaguaauuugccugauuuuaaagaggagcucgacaagugguucaaaaaccagacguccguggcccccgaucugagccuagacuuugaaaagcugaaugucaccuuccuugaucucucugacgagaugaaccgaauccaggaagcgauuaaaaagcugaaugagucauacaucaacuugaaagaaauaggaacuuaugagauguacgugaaguggccaugguauguuuggcuguuaauuggccucgcugguguagccgugugcguccugcuguuuuucaucuguugcugcacaggcuguggguccugcuguuuuaagaaaugcggaaacuguugcgaugaguacggcgggcaccaagacaguaucgugauucacaauaucagcucgcaugaagauuga

SEQ ID NO: 15038 - RNA, 4086 nt, Artificial Sequence
  MHV/S__BAK18575.1 spike protein CDS human (1-1361)(A1073P_L1074P)
augcugagcguguucauccucuuucuucccuccugccugggcuacauuggggacuucagauguauaaacuuggucaauaccgauacaucuaacgccucagcuccuaguguuagcacugaggugguagacguguccaagggaaucgguacguauuacgucuuagauaggguguaucugaaugcaacccuacuccugacaggcuacuauccaguugacgggucuaacuaccggaaucuugcccugacuggaaccaacacauugucgcucaauugguauaaaccgcccuuucugucagaauuuaacgauggcauuuuugcgaaggugaaaaaucugaaggcuagccucccuaaagacaguaccuccuacuucccaacuaucgucauugguucuaacuuugugacaaccagcuacacgguaguuuuagagcccuauaaugggaucauaauggccuccaucugccaguacacuauuugucugcuuccuuauaccgauugcaagccaaacacaggaggcaauaaguugaucggcuucuggcacauugaccugaaaucacccguguguauccuaaagcgcaacuuuacuuucaaugucaacgcagauuggcucuacuuucauuucuaucaacaagggggaaccuuuuacgccuauuacgcugacgcagguagugccacaaccuuccuguucagcucuuacauaggcgaugugcuuacgcaguauuuugugcugccuuucgucugcacuccaacaaccacugggguuuucuccccgcaguacugggugacacccuugguaaaacgacaguaucucuucaacuuuaaucagaagggaaccauuacgucagcuguggacugugccagcaguuacaccucugaaaucaaaugcaagacacaguccaugaacccuaauacuggcgucuaugaucugagcgguuacaccgugcagccaguuggguuaguguaucguagagucaggaaccugcccgacugucggauugaggacuggcucgcggcaaagacagugccuucgccacuuaauugggaacgcaaaacuuuccaaaacugcaauuuuaaccugucuuccuugcuaagacugguacaggccggaucacucaguuguagcaauaucgaugcugccaagguuuacggcaugugcuucggcuccaugucuaucgacaaauuugcaauucccaacagcaggcggguggaucugcagcuuggaaauucaggguuccugcagaguuuuaacuacaagauagacacccgcgcuacauccugccaauuguauuacagccucgcccagucuaaugucaccgugaacaaucacaacccgucaaguuggaaccgaagauaugguuucaaugaugucgcgacuuuuggcagggggaaacaugacguggccuacgcagaggcuuguuucacgguuggagccagcuauugcccuugugcuaaccccuccaucgugucuccaugcacaaccggcaagccuaaauucgccaauugucccacugguaccacaaaccgggagugcaauguacuggcauuagggucgaaccuguuuaagugugauugcaccuguaauccaagcccccuaacuacauacgaccuccguugccugcagggccgcuccaugcuuggagucggcgaucacugugaaggguugggagugcuggaggacaagugcgguggcucaaacacgugcaauuguagugccgaugcuuucguugggugggcgaaagacucuugccucagcaacggaagaugucauaucuuuuccaaucugaugcuuaacggcauuaauucagguaccacuugcagcacagaccugcaauugccuaacaccgaaguggucacagggauaugugugaaguaugaucucuacggcauuacuggacagggcguauucaaagaggugaaggcagacuacuauaauucuuggcagaaccuguuauacgauguuaacgggaaucugaacggauuuagggacaucgucaccaauaaaacguaucuaacccgguccugcuacaguggucgagugagcgccgcuuaucaccaggaugccccagagccggcacuccuguaccgcaaccuuaagugugacuauguguucaauaacaauaucuuuagagaagagacacccuugaacuacuucgauucuuaccugggcugcgucguuaaugccgacaacuccacugaacaagcuguggaugccugugaccucaggauggggucaggacugugcgugaauuauaguaccgcacaccgggcgcgcacaagcguaucgacuggcuacaaguuaaccacguuugagccuuucacagucuccauugugaacgauucuguugaaagcgugggugggcuguaugagaugcagaucccaaccaauuuuacuauugcuucacaucaggaguucauacagacaagagcccccaaagucaccaucgacugugcagccuuugugugcggcgauuacacuaccugcaggcaacagcuuguugaauauggaaguuucugugacaacauuaaugcuaucuugggcgaggugaacaaccucaucgacacaaugcagcugcagguagccuccgcacuaauucaaggggucacgcugucuagccgucucgcugauggaauauccggccagaucgacgauauuaauuucucaccucugcuugguugcuuggggagccaguguagugaaggaaccauggccgcgcagggccggucuacuguggaggaccuguuauuugauaaggugaaacucuccgacgucgguuucguugaagccuacaacaauugcacaggcgggcaagaggugcgagaucugcuuuguguacagagcuuuaacggaaucaaggugcugccacccgucuugucggagaaucaggugucaggcuauaccgcuggggcaacagccucuaguauguucccgccuugguccgcugccgcaggaguuccauuuagccucucugugcaauacagaauuaacggccugggugucacuaugaaugugcuaagcgaaaaccagaaaaugaucgcguccgccuucaauaacgcuauaggggccauccaggagggauuugacgcaaccaauucagcucuggccaagauucagaguguugugaacgcaaaugccgaagcucucaacaaucugcuuaaccaauugagcaauagguucggcgcgaucucugccucccugcaggagauuuuaucacgccucgaucccccugaagcacaggcucagaucgaccggcugauaaacgguagacuuacggcccugaacgccuacgucaguaagcaacuaagcgauaugacacucauuaaaguauccgcugcacaggccaucgagaaggugaaugagugcguuaaaucucagucgcccaggauuaacuuuuguggcaaugggaaccacauccugagcuuggugcagaaugcgccauauggacuguacuucuuacauuuuucauaugucccuaccuccuucacuaccgcuaacgugagucccggccucugcauaucuggggaccgcggacuggccccaaaggcaggcuacuucguacaagaugacggugaauggaaauuuacagggagcaauuauuacuauccggagccuaucacugacaagaacuccguggucaugucaucuugugccguuaauuacaccaaggcucccgaaguguuccuuaacacaagcauuaguaaucugccagauuuuaaagaggaguuggacaagugguucaaaaaccagacguccguggcacccgaucucagccuggacuuugaaaagcuaaaugucaccuuccuggaucuuucugacgagaugaaccgaauccaggaagccauuaaaaagcucaaugagucauacaucaaccugaaagaaauaggaacuuaugagauguacgugaaguggccuugguauguuugguugcugauuggcuuagcggguguagcugugugcguccuccuguuuuucaucuguugcugcacaggcuguggguccugcuguuuuaagaaaugcggaaacuguugcgaugaguacggcgggcaccaagacaguaucgugauucacaauaucagcucgcaugaagauuga

SEQ ID NO: 15039 - RNA, 3894 nt, Artificial Sequence
  MHV/S__BAK18575.1 spike protein CDS human (variant)
augcugagcguguucauccucuuucuucccuccugccugggcuacauuggggacuucagauguauaaacuuggucaauaccgauacaucuaacgccucagcuccuaguguuagcacugaggugguagacguguccaagggaaucgguacguauuacgucuuagauaggguguaucugaaugcaacccuacuccugacaggcuacuauccaguugacgggucuaacuaccggaaucuugcccugacuggaaccaacacauugucgcucaauugguauaaaccgcccuuucugucagaauuuaacgauggcauuuuugcgaaggugaaaaaucugaaggcuagccucccuaaagacaguaccuccuacuucccaacuaucgucauugguucuaacuuugugacaaccagcuacacgguaguuuuagagcccuauaaugggaucauaauggccuccaucugccaguacacuauuugucugcuuccuuauaccgauugcaagccaaacacaggaggcaauaaguugaucggcuucuggcacauugaccugaaaucacccguguguauccuaaagcgcaacuuuacuuucaaugucaacgcagauuggcucuacuuucauuucuaucaacaagggggaaccuuuuacgccuauuacgcugacgcagguagugccacaaccuuccuguucagcucuuacauaggcgaugugcuuacgcaguauuuugugcugccuuucgucugcacuccaacaaccacugggguuuucuccccgcaguacugggugacacccuugguaaaacgacaguaucucuucaacuuuaaucagaagggaaccauuacgucagcuguggacugugccagcaguuacaccucugaaaucaaaugcaagacacaguccaugaacccuaauacuggcgucuaugaucugagcgguuacaccgugcagccaguuggguuaguguaucguagagucaggaaccugcccgacugucggauugaggacuggcucgcggcaaagacagugccuucgccacuuaauugggaacgcaaaacuuuccaaaacugcaauuuuaaccugucuuccuugcuaagacugguacaggccggaucacucaguuguagcaauaucgaugcugccaagguuuacggcaugugcuucggcuccaugucuaucgacaaauuugcaauucccaacagcaggcggguggaucugcagcuuggaaauucaggguuccugcagaguuuuaacuacaagauagacacccgcgcuacauccugccaauuguauuacagccucgcccagucuaaugucaccgugaacaaucacaacccgucaaguuggaaccgaagauaugguuucaaugaugucgcgacuuuuggcagggggaaacaugacguggccuacgcagaggcuuguuucacgguuggagccagcuauugcccuugugcuaaccccuccaucgugucuccaugcacaaccggcaagccuaaauucgccaauugucccacugguaccacaaaccgggagugcaauguacuggcauuagggucgaaccuguuuaagugugauugcaccuguaauccaagcccccuaacuacauacgaccuccguugccugcagggccgcuccaugcuuggagucggcgaucacugugaaggguugggagugcuggaggacaagugcgguggcucaaacacgugcaauuguagugccgaugcuuucguugggugggcgaaagacucuugccucagcaacggaagaugucauaucuuuuccaaucugaugcuuaacggcauuaauucagguaccacuugcagcacagaccugcaauugccuaacaccgaaguggucacagggauaugugugaaguaugaucucuacggcauuacuggacagggcguauucaaagaggugaaggcagacuacuauaauucuuggcagaaccuguuauacgauguuaacgggaaucugaacggauuuagggacaucgucaccaauaaaacguaucuaacccgguccugcuacaguggucgagugagcgccgcuuaucaccaggaugccccagagccggcacuccuguaccgcaaccuuaagugugacuauguguucaauaacaauaucuuuagagaagagacacccuugaacuacuucgauucuuaccugggcugcgucguuaaugccgacaacuccacugaacaagcuguggaugccugugaccucaggauggggucaggacugugcgugaauuauaguaccgcacaccgggcgcgcacaagcguaucgacuggcuacaaguuaaccacguuugagccuuucacagucuccauugugaacgauucuguugaaagcgugggugggcuguaugagaugcagaucccaaccaauuuuacuauugcuucacaucaggaguucauacagacaagagcccccaaagucaccaucgacugugcagccuuugugugcggcgauuacacuaccugcaggcaacagcuuguugaauauggaaguuucugugacaacauuaaugcuaucuugggcgaggugaacaaccucaucgacacaaugcagcugcagguagccuccgcacuaauucaaggggucacgcugucuagccgucucgcugauggaauauccggccagaucgacgauauuaauuucucaccucugcuugguugcuuggggagccaguguagugaaggaaccauggccgcgcagggccggucuacuguggaggaccuguuauuugauaaggugaaacucuccgacgucgguuucguugaagccuacaacaauugcacaggcgggcaagaggugcgagaucugcuuuguguacagagcuuuaacggaaucaaggugcugccacccgucuugucggagaaucaggugucaggcuauaccgcuggggcaacagccucuaguauguucccgccuugguccgcugccgcaggaguuccauuuagccucucugugcaauacagaauuaacggccugggugucacuaugaaugugcuaagcgaaaaccagaaaaugaucgcguccgccuucaauaacgcuauaggggccauccaggagggauuugacgcaaccaauucagcucuggccaagauucagaguguugugaacgcaaaugccgaagcucucaacaaucugcuuaaccaauugagcaauagguucggcgcgaucucugccucccugcaggagauuuuaucacgccucgaucccccugaagcacaggcucagaucgaccggcugauaaacgguagacuuacggcccugaacgccuacgucaguaagcaacuaagcgauaugacacucauuaaaguauccgcugcacaggccaucgagaaggugaaugagugcguuaaaucucagucgcccaggauuaacuuuuguggcaaugggaaccacauccugagcuuggugcagaaugcgccauauggacuguacuucuuacauuuuucauaugucccuaccuccuucacuaccgcuaacgugagucccggccucugcauaucuggggaccgcggacuggccccaaaggcaggcuacuucguacaagaugacggugaauggaaauuuacagggagcaauuauuacuauccggagccuaucacugacaagaacuccguggucaugucaucuugugccguuaauuacaccaaggcucccgaaguguuccuuaacacaagcauuaguaaucugccagauuuuaaagaggaguuggacaagugguucaaaaaccagacguccguggcacccgaucucagccuggacuuugaaaagcuaaaugucaccuuccuggaucuuucugacgagaugaaccgaauccaggaagccauuaaaaagcucaaugagucauacaucaaccugaaagaaauaggaacuuaugagauguga

SEQ ID NO: 15040 - RNA, 3975 nt, Artificial Sequence
  MHV/S__BAK18575.1 spike protein CDS human (variant)
augcugagcguguucauccucuuucuucccuccugccugggcuacauuggggacuucagauguauaaacuuggucaauaccgauacaucuaacgccucagcuccuaguguuagcacugaggugguagacguguccaagggaaucgguacguauuacgucuuagauaggguguaucugaaugcaacccuacuccugacaggcuacuauccaguugacgggucuaacuaccggaaucuugcccugacuggaaccaacacauugucgcucaauugguauaaaccgcccuuucugucagaauuuaacgauggcauuuuugcgaaggugaaaaaucugaaggcuagccucccuaaagacaguaccuccuacuucccaacuaucgucauugguucuaacuuugugacaaccagcuacacgguaguuuuagagcccuauaaugggaucauaauggccuccaucugccaguacacuauuugucugcuuccuuauaccgauugcaagccaaacacaggaggcaauaaguugaucggcuucuggcacauugaccugaaaucacccguguguauccuaaagcgcaacuuuacuuucaaugucaacgcagauuggcucuacuuucauuucuaucaacaagggggaaccuuuuacgccuauuacgcugacgcagguagugccacaaccuuccuguucagcucuuacauaggcgaugugcuuacgcaguauuuugugcugccuuucgucugcacuccaacaaccacugggguuuucuccccgcaguacugggugacacccuugguaaaacgacaauaucucuucaacuuuaaucagaagggaaccauuacgucagcuguggacugugccagcaguuacaccucugaaaucaaaugcaagacacaguccaugaacccuaauacuggcgucuaugaucugagcgguuacaccgugcagccaguuggguuaguguaucguagagucaggaaccugcccgacugucggauugaggacuggcucgcggcaaagacagugccuucgccacuuaauugggaacgcaaaacuuuccaaaacugcaauuuuaaccugucuuccuugcuaagacugguacaggccggaucacucaguuguagcaauaucgaugcugccaagguuuacggcaugugcuucggcuccaugucuaucgacaaauuugcaauucccaacagcaggcggguggaucugcagcuuggaaauucaggguuccugcagaguuuuaacuacaagauagacacccgcgcuacauccugccaauuguauuacagccucgcccagucuaaugucaccgugaacaaucacaacccgucaaguuggaaccgaagauaugguuucaaugaugucgcgacuuuuggcagggggaaacaugacguggccuacgcagaggcuuguuucacgguuggagccagcuauugcccuugugcuaaccccuccaucgugucuccaugcacaaccggcaagccuaaauucgccaauugucccacugguaccacaaaccgggagugcaauguacuggcauuagggucgaaccuguuuaagugugauugcaccuguaauccaagcccccuaacuacauacgaccuccguugccugcagggccgcuccaugcuuggagucggcgaucacugugaaggguugggagugcuggaggacaagugcgguggcucaaacacgugcaauuguagugccgaugcuuucguugggugggcgaaagacucuugccucagcaacggaagaugucauaucuuuuccaaucugaugcuuaacggcauuaauucagguaccacuugcagcacagaccugcaauugccuaacaccgaaguggucacagggauaugugugaaguaugaucucuacggcauuacuggacagggcguauucaaagaggugaaggcagacuacuauaauucuuggcagaaccuguuauacgauguuaacgggaaucugaacggauuuagggacaucgucaccaauaaaacguaucuaacccgguccugcuacaguggucgagugagcgccgcuuaucaccaggaugccccagagccggcacuccuguaccgcaaccuuaagugugacuauguguucaauaacaauaucuuuagagaagagacacccuugaacuacuucgauucuuaccugggcugcgucguuaaugccgacaacuccacugaacaagcuguggaugccugugaccucaggauggggucaggacugugcgugaauuauaguaccgcacaccgggcgcgcacaagcguaucgacuggcuacaaguuaaccacguuugagccuuucacagucuccauugugaacgauucuguugaaagcgugggugggcuguaugagaugcagaucccaaccaauuuuacuauugcuucacaucaggaguucauacagacaagagcccccaaagucaccaucgacugugcagccuuugugugcggcgauuacacuaccugcaggcaacagcuuguugaauauggaaguuucugugacaacauuaaugcuaucuugggcgaggugaacaaccucaucgacacaaugcagcugcagguagccuccgcacuaauucaaggggucacgcugucuagccgucucgcugauggaauauccggccagaucgacgauauuaauuucucaccucugcuugguugcuuggggagccaguguagugaaggaaccauggccgcgcagggccggucuacuguggaggaccuguuauuugauaaggugaaacucuccgacgucgguuucguugaagccuacaacaauugcacaggcgggcaagaggugcgagaucugcuuuguguacagagcuuuaacggaaucaaggugcugccacccgucuugucggagaaucaggugucaggcuauaccgcuggggcaacagccucuaguauguucccgccuugguccgcugccgcaggaguuccauuuagccucucugugcaauacagaauuaacggccugggugucacuaugaaugugcuaagcgaaaaccagaaaaugaucgcguccgccuucaauaacgcuauaggggccauccaggagggauuugacgcaaccaauucagcucuggccaagauucagaguguugugaacgcaaaugccgaagcucucaacaaucugcuuaaccaauugagcaauagguucggcgcgaucucugccucccugcaggagauuuuaucacgccucgaucccccugaagcacaggcucagaucgaccggcugauaaacgguagacuuacggcccugaacgccuacgucaguaagcaacuaagcgauaugacacucauuaaaguauccgcugcacaggccaucgagaaggugaaugagugcguuaaaucucagucgcccaggauuaacuuuuguggcaaugggaaccacauccugagcuuggugcagaaugcgccauauggacuguacuucuuacauuuuucauaugucccuaccuccuucacuaccgcuaacgugagucccggccucugcauaucuggggaccgcggacuggccccaaaggcaggcuacuucguacaagaugacggugaauggaaauuuacagggagcaauuauuacuauccggagccuaucacugacaagaacuccguggucaugucaucuugugccguuaauuacaccaaggcucccgaaguguuccuuaacacaagcauuaguaaucugccagauuuuaaagaggaguuggacaagugguucaaaaaccagacguccguggcacccgaucucagccuggacuuugaaaagcuaaaugucaccuuccuggaucuuucugacgagaugaaccgaauccaggaagccauuaaaaagcucaaugagucauacaucaaccugaaagaaauaggaacuuaugagaugggcgguuacauuccugaggcgccacgggauggccaggcuuaugugcguaaggacggggaauggguuuugcuguccacauuuuga

SEQ ID NO: 15041 - RNA, 4040 nt, Artificial Sequence
  SARS-CoV__P59594.1 spike protein mRNA gc (1-1255)
aggagagucccgcagucggcguccagcggcucugcuuguucgugugugugucguugcaggccuuauucaagcuuaccauguucaucuuccugcuguuccugacccugaccagcggcuccgaccucgaccgcugcacgaccuucgacgacgugcaggcccccaacuacacccagcacaccagcuccaugcgcggggucuacuacccggacgagaucuuccggagcgacacgcuguaccugacccaggaccucuuccugcccuucuacuccaacgugaccggcuuccacaccaucaaccacacguucgggaaccccgugauccccuucaaggacggcaucuacuucgccgcgaccgagaaguccaacgucgugcggggguggguguucggcagcaccaugaacaacaagagccaguccgucaucaucaucaacaacagcaccaacguggugauccgcgccugcaacuucgagcugugcgacaacccguucuucgccgucuccaagcccaugggcacgcagacccacaccaugaucuucgacaacgccuucaacugcaccuucgaguacaucagcgacgccuucucccucgacgugagcgagaaguccgggaacuucaagcaccuccgggaguucguguucaagaacaaggacggcuuccuguacgucuacaagggguaccagcccaucgacguggugcgcgaccuccccagcggcuucaacacgcugaagccgaucuucaagcugccccucgggaucaacaucaccaacuuccgggcgauccugaccgccuucucccccgcccaggacaucuggggcaccagcgccgcggccuacuucgucggcuaccugaagcccacgaccuucaugcucaaguacgacgagaacgggaccaucaccgacgccguggacugcucccagaacccgcuggccgagcugaagugcagcgucaagagcuucgagaucgacaagggcaucuaccagacguccaacuuccgcguggugcccagcggggacgugguccgguuccccaacaucaccaaccucugccccuucggcgagguguucaacgccaccaaguucccguccguguacgcgugggagcgcaagaagaucagcaacugcgucgccgacuacuccgugcuguacaacagcaccuucuucuccacguucaagugcuacggcgucagcgccaccaagcugaacgaccucugcuucuccaacguguacgccgacagcuucguggucaagggggacgacgugcggcagaucgcccccggccagaccggggugaucgcggacuacaacuacaagcugcccgacgacuucaugggcugcguccuggccuggaacacccgcaacaucgacgccacguccaccgggaacuacaacuacaaguaccgguaccuccgccacggcaagcugcggcccuucgagcgcgacaucagcaacgugccguucucccccgacggcaagcccugcacgcccccggcccugaacugcuacuggccccucaacgacuacggguucuacaccaccaccggcaucggguaccagcccuaccggguggucgugcugagcuucgagcugcucaacgcccccgcgaccgugugcggcccgaagcuguccaccgaccugaucaagaaccagugcgucaacuucaacuucaacgggcucaccggcacgggcgugcugacccccagcuccaagcgcuuccagcccuuccagcaguucgggcgggacgugagcgacuucaccgacuccguccgcgacccgaagaccagcgagauccuggacaucagccccugcuccuucggcggggugagcgugaucacgcccggcaccaacgccuccagcgaggucgccgugcucuaccaggacgugaacugcaccgacgucuccaccgccauccacgccgaccagcugacgcccgcguggcggaucuacagcaccgggaacaacguguuccagacccaggccggcugccugaucggcgccgagcacguggacaccuccuacgagugcgacaucccgaucggggccggcaucugcgcgagcuaccacacggucucccuccugcgcagcaccucccagaaguccaucguggccuacaccaugagccugggggccgacagcuccaucgccuacagcaacaacaccaucgccauccccacgaacuucuccaucagcaucaccaccgaggugaugcccgucagcauggcgaagaccuccguggacugcaacauguacaucugcggcgacagcacggagugcgccaaccuccugcugcaguacggcuccuucugcacccagcugaaccgcgcccucagcgggaucgccgccgagcaggaccggaacacccgcgagguguucgcgcaggucaagcagauguacaagacccccacgcugaaguacuucggcggguucaacuucucccagauccugccggacccccucaagcccaccaagcggagcuucaucgaggaccugcuguucaacaaggugacccucgccgacgccggcuucaugaagcaguacggggagugccugggcgacaucaacgcccgcgaccugaucugcgcccagaaguucaacggccucaccgugcugcccccgcugcucacggacgacaugaucgcggccuacaccgccgcccuggucuccgggaccgcgaccgccggcuggacguucggggccggcgccgcccugcagauccccuucgcgaugcagauggccuaccgguucaacgggaucggcgugacccagaacgugcucuacgagaaccagaagcagaucgccaaccaguucaacaaggccaucagccagauccaggagucccugaccaccacgagcaccgcccugggcaagcuccaggacgucgugaaccagaacgcgcaggcccugaacacccuggugaagcagcucuccagcaacuucggggccaucuccagcguccugaacgacauccugucccgccucgacaagguggaggccgaggugcagaucgaccggcugaucaccggccgccugcagagccuccagaccuacgucacgcagcagcugauccgggccgcggagauccgcgccuccgccaaccuggccgcgaccaagaugagcgagugcgugcucgggcaguccaagcggguggacuucugcggcaagggguaccaccugaugagcuucccccaggccgcgccccacggcgucguguuccugcacgugaccuacgucccgagccaggagcgcaacuucaccacggcccccgccaucugccacgagggcaaggccuacuucccccgggaggggguguucguguucaacggcaccuccugguucaucacccagcgcaacuucuucagcccccagaucaucaccacggacaacaccuucgucuccgggaacugcgacguggucaucggcaucaucaacaacaccguguacgacccgcuccagcccgagcuggacagcuucaaggaggagcuggacaaguacuucaagaaccacaccucccccgacguggaccucggggacaucagcggcaucaacgccuccgucgugaacauccagaaggagaucgaccggcugaacgagguggccaagaaccugaacgagagccucaucgaccugcaggagcugggcaaguacgagcaguacaucaaguggcccugguacgucuggcucggguucaucgccggccugaucgccaucgugauggugacgauccugcucugcugcaugaccuccugcugcagcugccugaagggggcgugcuccugcggcagcugcugcaaguucgacgaggacgacuccgagccgguccugaagggcgugaagcuccacuacaccugaggacuagucccuguucccagagcccacuuuuuuuucuuuuuuugaaauaaaauagccugucuuucagaucucaaaggcucuuuucagagccaccaaaaaaaaaaaaaaaaaaaaaaaaaaaaaaaaaaaaaaaaaaaaaaaaaaaaaaaaaaaaaaaaaaaaaaaaaaaaaaaaaaaaaaaaaaaaaaaaaaaaa

SEQ ID NO: 15042 - RNA, 4040 nt, Artificial Sequence
  SARS-CoV__P59594.1 spike protein mRNA gc (1-1255)(K968P_V969P)
aggagagucccgcagucggcguccagcggcucugcuuguucgugugugugucguugcaggccuuauucaagcuuaccauguucaucuuccugcuguuccugacccugaccagcggcuccgaccucgaccgcugcacgaccuucgacgacgugcaggcccccaacuacacccagcacaccagcuccaugcgcggggucuacuacccggacgagaucuuccggagcgacacgcuguaccugacccaggaccucuuccugcccuucuacuccaacgugaccggcuuccacaccaucaaccacacguucgggaaccccgugauccccuucaaggacggcaucuacuucgccgcgaccgagaaguccaacgucgugcggggguggguguucggcagcaccaugaacaacaagagccaguccgucaucaucaucaacaacagcaccaacguggugauccgcgccugcaacuucgagcugugcgacaacccguucuucgccgucuccaagcccaugggcacgcagacccacaccaugaucuucgacaacgccuucaacugcaccuucgaguacaucagcgacgccuucucccucgacgugagcgagaaguccgggaacuucaagcaccuccgggaguucguguucaagaacaaggacggcuuccuguacgucuacaagggguaccagcccaucgacguggugcgcgaccuccccagcggcuucaacacgcugaagccgaucuucaagcugccccucgggaucaacaucaccaacuuccgggcgauccugaccgccuucucccccgcccaggacaucuggggcaccagcgccgcggccuacuucgucggcuaccugaagcccacgaccuucaugcucaaguacgacgagaacgggaccaucaccgacgccguggacugcucccagaacccgcuggccgagcugaagugcagcgucaagagcuucgagaucgacaagggcaucuaccagacguccaacuuccgcguggugcccagcggggacgugguccgguuccccaacaucaccaaccucugccccuucggcgagguguucaacgccaccaaguucccguccguguacgcgugggagcgcaagaagaucagcaacugcgucgccgacuacuccgugcuguacaacagcaccuucuucuccacguucaagugcuacggcgucagcgccaccaagcugaacgaccucugcuucuccaacguguacgccgacagcuucguggucaagggggacgacgugcggcagaucgcccccggccagaccggggugaucgcggacuacaacuacaagcugcccgacgacuucaugggcugcguccuggccuggaacacccgcaacaucgacgccacguccaccgggaacuacaacuacaaguaccgguaccuccgccacggcaagcugcggcccuucgagcgcgacaucagcaacgugccguucucccccgacggcaagcccugcacgcccccggcccugaacugcuacuggccccucaacgacuacggguucuacaccaccaccggcaucggguaccagcccuaccggguggucgugcugagcuucgagcugcucaacgcccccgcgaccgugugcggcccgaagcuguccaccgaccugaucaagaaccagugcgucaacuucaacuucaacgggcucaccggcacgggcgugcugacccccagcuccaagcgcuuccagcccuuccagcaguucgggcgggacgugagcgacuucaccgacuccguccgcgacccgaagaccagcgagauccuggacaucagccccugcuccuucggcggggugagcgugaucacgcccggcaccaacgccuccagcgaggucgccgugcucuaccaggacgugaacugcaccgacgucuccaccgccauccacgccgaccagcugacgcccgcguggcggaucuacagcaccgggaacaacguguuccagacccaggccggcugccugaucggcgccgagcacguggacaccuccuacgagugcgacaucccgaucggggccggcaucugcgcgagcuaccacacggucucccuccugcgcagcaccucccagaaguccaucguggccuacaccaugagccugggggccgacagcuccaucgccuacagcaacaacaccaucgccauccccacgaacuucuccaucagcaucaccaccgaggugaugcccgucagcauggcgaagaccuccguggacugcaacauguacaucugcggcgacagcacggagugcgccaaccuccugcugcaguacggcuccuucugcacccagcugaaccgcgcccucagcgggaucgccgccgagcaggaccggaacacccgcgagguguucgcgcaggucaagcagauguacaagacccccacgcugaaguacuucggcggguucaacuucucccagauccugccggacccccucaagcccaccaagcggagcuucaucgaggaccugcuguucaacaaggugacccucgccgacgccggcuucaugaagcaguacggggagugccugggcgacaucaacgcccgcgaccugaucugcgcccagaaguucaacggccucaccgugcugcccccgcugcucacggacgacaugaucgcggccuacaccgccgcccuggucuccgggaccgcgaccgccggcuggacguucggggccggcgccgcccugcagauccccuucgcgaugcagauggccuaccgguucaacgggaucggcgugacccagaacgugcucuacgagaaccagaagcagaucgccaaccaguucaacaaggccaucagccagauccaggagucccugaccaccacgagcaccgcccugggcaagcuccaggacgucgugaaccagaacgcgcaggcccugaacacccuggugaagcagcucuccagcaacuucggggccaucuccagcguccugaacgacauccugucccgccucgacccgcccgaggccgaggugcagaucgaccggcugaucaccggccgccugcagagccuccagaccuacgugacgcagcagcugauccgggccgcggagauccgcgccuccgccaaccuggccgcgaccaagaugagcgagugcguccucgggcaguccaagcggguggacuucugcggcaagggguaccaccugaugagcuucccccaggccgcgccccacggcguggucuuccugcacgugaccuacgugcccagccaggagcgcaacuucaccacggcccccgccaucugccacgagggcaaggccuacuucccgcgggagggggucuucguguucaacggcaccuccugguucaucacccagcgcaacuucuucagcccccagaucaucaccacggacaacaccuucguguccgggaacugcgacgucgugaucggcaucaucaacaacaccgucuacgacccccuccagcccgagcuggacagcuucaaggaggagcuggacaaguacuucaagaaccacaccuccccggacguggaccucggggacaucagcggcaucaacgccuccguggucaacauccagaaggagaucgaccggcugaacgagguggccaagaaccugaacgagagccucaucgaccugcaggagcugggcaaguacgagcaguacaucaaguggcccugguacguguggcucggguucaucgccggccugaucgccaucgucauggugacgauccugcucugcugcaugaccuccugcugcagcugccugaagggggcgugcuccugcggcagcugcugcaaguucgacgaggacgacuccgagcccgugcugaagggcgucaagcuccacuacaccugaggacuagucccuguucccagagcccacuuuuuuuucuuuuuuugaaauaaaauagccugucuuucagaucucaaaggcucuuuucagagccaccaaaaaaaaaaaaaaaaaaaaaaaaaaaaaaaaaaaaaaaaaaaaaaaaaaaaaaaaaaaaaaaaaaaaaaaaaaaaaaaaaaaaaaaaaaaaaaaaaaaaa

SEQ ID NO: 15043 - RNA, 1853 nt, Artificial Sequence
  SARS-CoV__P59594.1 spike protein mRNA gc (1-17_747-1255)
aggagagucccgcagucggcguccagcggcucugcuuguucgugugugugucguugcaggccuuauucaagcuuaccauguucaucuuccugcuguuccugacccugaccagcggcuccgaccucgaccgcgcccugagcgggaucgccgcggagcaggaccggaacacgcgcgagguguucgcccaggucaagcagauguacaagacccccacccugaaguacuucggcggguucaacuucucccagauccucccggacccccugaagcccaccaagcggagcuucaucgaggaccuccucuucaacaaggugacgcuggccgacgccggcuucaugaagcaguacggggagugccugggcgacaucaacgcccgcgaccucaucugcgcgcagaaguucaacggccugaccgugcugcccccgcuccugaccgacgacaugaucgccgccuacaccgccgcgcuggucuccgggacggccaccgccggcuggaccuucggggccggcgccgcgcuccagauccccuucgccaugcagauggccuaccgguucaacgggaucggcgugacccagaacgugcuguacgagaaccagaagcagaucgccaaccaguucaacaaggccaucagccagauccaggagucccugacgaccaccagcaccgcgcucggcaagcugcaggacgucgugaaccagaacgcccaggcccugaacacgcucgugaagcagcuguccagcaacuucggggccaucuccagcguccugaacgacauccucucccgccuggacaagguggaggccgaggugcagaucgaccggcugaucaccggccgccuccagagccugcagaccuacgucacccagcagcugauccgggcggccgagauccgcgccuccgccaaccucgccgcgacgaagaugagcgagugcgugcuggggcaguccaagcggguggacuucugcggcaagggcuaccaccugaugagcuucccccaggccgcgccccacggggucguguuccuccacgugaccuacgucccgucccaggagcgcaacuucaccaccgcccccgccaucugccacgagggcaaggccuacuucccccgggaggggguguucguguucaacggcacgagcugguucaucacccagcgcaacuucuucagcccccagaucaucaccaccgacaacacguucgucuccgggaacugcgacguggugaucggcaucaucaacaacaccgucuacgacccgcugcagcccgagcuggacagcuucaaggaggagcucgacaaguacuucaagaaccacaccucccccgacguggaccugggcgacaucagcgggaucaacgccuccgucgugaacauccagaaggagaucgaccggcugaacgagguggccaagaaccucaacgagagccugaucgaccugcaggagcucggcaaguacgagcaguacaucaaguggcccugguacgucuggcugggguucaucgccggccugaucgcgaucgugauggugaccauccugcucugcugcaugacguccugcugcagcugccugaagggggccugcuccugcggcagcugcugcaaguucgacgaggacgacuccgagccgguccugaagggcgugaagcuccacuacaccugaggacuagucccuguucccagagcccacuuuuuuuucuuuuuuugaaauaaaauagccugucuuucagaucucaaaggcucuuuucagagccaccaaaaaaaaaaaaaaaaaaaaaaaaaaaaaaaaaaaaaaaaaaaaaaaaaaaaaaaaaaaaaaaaaaaaaaaaaaaaaaaaaaaaaaaaaaaaaaaaaaaaa

SEQ ID NO: 15044 - RNA, 4040 nt, Artificial Sequence
  SARS-CoV/Tor2__NP_828851.1 spike protein mRNA gc (1-1255)
aggagagucccgcagucggcguccagcggcucugcuuguucgugugugugucguugcaggccuuauucaagcuuaccauguucaucuuccugcuguuccugacccugaccagcggcuccgaccucgaccgcugcacgaccuucgacgacgugcaggcccccaacuacacccagcacaccagcuccaugcgcggggucuacuacccggacgagaucuuccggagcgacacgcuguaccugacccaggaccucuuccugcccuucuacuccaacgugaccggcuuccacaccaucaaccacacguucgggaaccccgugauccccuucaaggacggcaucuacuucgccgcgaccgagaaguccaacgucgugcggggguggguguucggcuccaccaugaacaacaagagccaguccgucaucaucaucaacaacagcaccaacguggugauccgcgccugcaacuucgagcugugcgacaacccguucuucgccgucuccaagcccaugggcacgcagacccacaccaugaucuucgacaacgccuucaacugcaccuucgaguacaucagcgacgccuucucccucgacgugagcgagaaguccgggaacuucaagcaccuccgggaguucguguucaagaacaaggacggcuuccuguacgucuacaagggguaccagcccaucgacguggugcgcgaccuccccagcggcuucaacacgcugaagccgaucuucaagcugccccucgggaucaacaucaccaacuuccgggcgauccugaccgccuucucccccgcccaggacaucuggggcaccagcgccgcggccuacuucgucggcuaccugaagcccacgaccuucaugcucaaguacgacgagaacgggaccaucaccgacgccguggacugcucccagaacccgcuggccgagcugaagugcagcgucaagagcuucgagaucgacaagggcaucuaccagacguccaacuuccgcguggugcccagcggggacgugguccgguuccccaacaucaccaaccucugccccuucggcgagguguucaacgccaccaaguucccguccguguacgcgugggagcgcaagaagaucagcaacugcgucgccgacuacuccgugcuguacaacagcaccuucuucuccacguucaagugcuacggcgucagcgccaccaagcugaacgaccucugcuucuccaacguguacgccgacagcuucguggucaagggggacgacgugcggcagaucgcccccggccagaccggggugaucgcggacuacaacuacaagcugcccgacgacuucaugggcugcguccuggccuggaacacccgcaacaucgacgccacguccaccgggaacuacaacuacaaguaccgguaccuccgccacggcaagcugcggcccuucgagcgcgacaucagcaacgugccguucucccccgacggcaagcccugcacgcccccggcccugaacugcuacuggccccucaacgacuacggguucuacaccaccaccggcaucggguaccagcccuaccggguggucgugcugagcuucgagcugcucaacgcccccgcgaccgugugcggcccgaagcuguccaccgaccugaucaagaaccagugcgucaacuucaacuucaacgggcucaccggcacgggcgugcugacccccagcuccaagcgcuuccagcccuuccagcaguucgggcgggacgugagcgacuucaccgacuccguccgcgacccgaagaccagcgagauccuggacaucagccccugcgccuucggcgggguguccgugaucacgcccggcaccaacgccagcuccgaggucgccgugcucuaccaggacgugaacugcaccgacgucagcaccgccauccacgcggaccagcugacgcccgccuggcggaucuacuccaccgggaacaacguguuccagacccaggccggcugccugaucggcgccgagcacguggacaccagcuacgagugcgacaucccgaucggggcgggcaucugcgccuccuaccacacggucagccuccugcgcuccaccagccagaaguccaucguggccuacaccaugagccugggggccgacuccagcaucgccuacuccaacaacaccaucgcgauccccacgaacuucagcaucuccaucaccaccgaggugaugcccgucagcauggccaagaccagcguggacugcaacauguacaucugcggcgacuccacggagugcgccaaccuccugcugcaguacggcagcuucugcacccagcugaaccgcgcccucuccgggaucgccgcggagcaggaccggaacacccgcgagguguucgcccaggucaagcagauguacaagacccccacgcugaaguacuucggcggguucaacuucagccagauccugccggacccccucaagcccaccaagcgguccuucaucgaggaccugcuguucaacaaggugacccucgccgacgccggcuucaugaagcaguacggggagugccugggcgacaucaacgcccgcgaccugaucugcgcgcagaaguucaacggccucaccgugcugcccccgcugcucacggacgacaugaucgccgccuacaccgccgcgcuggucagcgggaccgccaccgccggcuggacguucggggccggcgccgcgcugcagauccccuucgccaugcagauggccuaccgguucaacgggaucggcgugacccagaacgugcucuacgagaaccagaagcagaucgccaaccaguucaacaaggccaucucccagauccaggagagccugaccaccacguccaccgcgcugggcaagcuccaggacgucgugaaccagaacgcccaggcccugaacacccuggugaagcagcucagcuccaacuucggggccaucagcuccguccugaacgacauccugagccgccucgacaagguggaggccgaggugcagaucgaccggcugaucaccggccgccugcagucccuccagaccuacgucacgcagcagcugauccgggcggccgagauccgcgccagcgccaaccuggcggccaccaagauguccgagugcgugcucgggcagagcaagcggguggacuucugcggcaagggguaccaccugauguccuucccccaggccgcgccccacggcgucguguuccugcacgugaccuacgucccgagccaggagcgcaacuucaccacggcccccgccaucugccacgagggcaaggccuacuucccccgggaggggguguucguguucaacggcaccagcugguucaucacccagcgcaacuucuucagcccccagaucaucaccacggacaacaccuucgucagcgggaacugcgacguggucaucggcaucaucaacaacaccguguacgacccgcuccagcccgagcuggacuccuucaaggaggagcuggacaaguacuucaagaaccacaccagccccgacguggaccucggggacaucuccggcaucaacgccagcgucgugaacauccagaaggagaucgaccggcugaacgagguggccaagaaccugaacgagucccucaucgaccugcaggagcugggcaaguacgagcaguacaucaaguggcccugguacgucuggcucggguucaucgccggccugaucgcgaucgugauggugacgauccugcucugcugcaugaccagcugcugcuccugccugaagggggccugcagcugcggcuccugcugcaaguucgacgaggacgacagcgagccgguccugaagggcgugaagcuccacuacaccugaggacuagucccuguucccagagcccacuuuuuuuucuuuuuuugaaauaaaauagccugucuuucagaucucaaaggcucuuuucagagccaccaaaaaaaaaaaaaaaaaaaaaaaaaaaaaaaaaaaaaaaaaaaaaaaaaaaaaaaaaaaaaaaaaaaaaaaaaaaaaaaaaaaaaaaaaaaaaaaaaaaaa

SEQ ID NO: 15045 - RNA, 4040 nt, Artificial Sequence
  SARS-CoV/Tor2__NP_828851.1 spike protein mRNA gc (1-1255)(K968P_V969P)
aggagagucccgcagucggcguccagcggcucugcuuguucgugugugugucguugcaggccuuauucaagcuuaccauguucaucuuccugcuguuccugacccugaccagcggcuccgaccucgaccgcugcacgaccuucgacgacgugcaggcccccaacuacacccagcacaccagcuccaugcgcggggucuacuacccggacgagaucuuccggagcgacacgcuguaccugacccaggaccucuuccugcccuucuacuccaacgugaccggcuuccacaccaucaaccacacguucgggaaccccgugauccccuucaaggacggcaucuacuucgccgcgaccgagaaguccaacgucgugcggggguggguguucggcuccaccaugaacaacaagagccaguccgucaucaucaucaacaacagcaccaacguggugauccgcgccugcaacuucgagcugugcgacaacccguucuucgccgucuccaagcccaugggcacgcagacccacaccaugaucuucgacaacgccuucaacugcaccuucgaguacaucagcgacgccuucucccucgacgugagcgagaaguccgggaacuucaagcaccuccgggaguucguguucaagaacaaggacggcuuccuguacgucuacaagggguaccagcccaucgacguggugcgcgaccuccccagcggcuucaacacgcugaagccgaucuucaagcugccccucgggaucaacaucaccaacuuccgggcgauccugaccgccuucucccccgcccaggacaucuggggcaccagcgccgcggccuacuucgucggcuaccugaagcccacgaccuucaugcucaaguacgacgagaacgggaccaucaccgacgccguggacugcucccagaacccgcuggccgagcugaagugcagcgucaagagcuucgagaucgacaagggcaucuaccagacguccaacuuccgcguggugcccagcggggacgugguccgguuccccaacaucaccaaccucugccccuucggcgagguguucaacgccaccaaguucccguccguguacgcgugggagcgcaagaagaucagcaacugcgucgccgacuacuccgugcuguacaacagcaccuucuucuccacguucaagugcuacggcgucagcgccaccaagcugaacgaccucugcuucuccaacguguacgccgacagcuucguggucaagggggacgacgugcggcagaucgcccccggccagaccggggugaucgcggacuacaacuacaagcugcccgacgacuucaugggcugcguccuggccuggaacacccgcaacaucgacgccacguccaccgggaacuacaacuacaaguaccgguaccuccgccacggcaagcugcggcccuucgagcgcgacaucagcaacgugccguucucccccgacggcaagcccugcacgcccccggcccugaacugcuacuggccccucaacgacuacggguucuacaccaccaccggcaucggguaccagcccuaccggguggucgugcugagcuucgagcugcucaacgcccccgcgaccgugugcggcccgaagcuguccaccgaccugaucaagaaccagugcgucaacuucaacuucaacgggcucaccggcacgggcgugcugacccccagcuccaagcgcuuccagcccuuccagcaguucgggcgggacgugagcgacuucaccgacuccguccgcgacccgaagaccagcgagauccuggacaucagccccugcgccuucggcgggguguccgugaucacgcccggcaccaacgccagcuccgaggucgccgugcucuaccaggacgugaacugcaccgacgucagcaccgccauccacgcggaccagcugacgcccgccuggcggaucuacuccaccgggaacaacguguuccagacccaggccggcugccugaucggcgccgagcacguggacaccagcuacgagugcgacaucccgaucggggcgggcaucugcgccuccuaccacacggucagccuccugcgcuccaccagccagaaguccaucguggccuacaccaugagccugggggccgacuccagcaucgccuacuccaacaacaccaucgcgauccccacgaacuucagcaucuccaucaccaccgaggugaugcccgucagcauggccaagaccagcguggacugcaacauguacaucugcggcgacuccacggagugcgccaaccuccugcugcaguacggcagcuucugcacccagcugaaccgcgcccucuccgggaucgccgcggagcaggaccggaacacccgcgagguguucgcccaggucaagcagauguacaagacccccacgcugaaguacuucggcggguucaacuucagccagauccugccggacccccucaagcccaccaagcgguccuucaucgaggaccugcuguucaacaaggugacccucgccgacgccggcuucaugaagcaguacggggagugccugggcgacaucaacgcccgcgaccugaucugcgcgcagaaguucaacggccucaccgugcugcccccgcugcucacggacgacaugaucgccgccuacaccgccgcgcuggucagcgggaccgccaccgccggcuggacguucggggccggcgccgcgcugcagauccccuucgccaugcagauggccuaccgguucaacgggaucggcgugacccagaacgugcucuacgagaaccagaagcagaucgccaaccaguucaacaaggccaucucccagauccaggagagccugaccaccacguccaccgcgcugggcaagcuccaggacgucgugaaccagaacgcccaggcccugaacacccuggugaagcagcucagcuccaacuucggggccaucagcuccguccugaacgacauccugagccgccucgacccgcccgaggccgaggugcagaucgaccggcugaucaccggccgccugcagucccuccagaccuacgugacgcagcagcugauccgggcggccgagauccgcgccagcgccaaccuggcggccaccaagauguccgagugcguccucgggcagagcaagcggguggacuucugcggcaagggguaccaccugauguccuucccccaggccgcgccccacggcguggucuuccugcacgugaccuacgugcccagccaggagcgcaacuucaccacggcccccgccaucugccacgagggcaaggccuacuucccgcgggagggggucuucguguucaacggcaccagcugguucaucacccagcgcaacuucuucagcccccagaucaucaccacggacaacaccuucgugagcgggaacugcgacgucgugaucggcaucaucaacaacaccgucuacgacccccuccagcccgagcuggacuccuucaaggaggagcuggacaaguacuucaagaaccacaccagcccggacguggaccucggggacaucuccggcaucaacgccagcguggucaacauccagaaggagaucgaccggcugaacgagguggccaagaaccugaacgagucccucaucgaccugcaggagcugggcaaguacgagcaguacaucaaguggcccugguacguguggcucggguucaucgccggccugaucgcgaucgucauggugacgauccugcucugcugcaugaccagcugcugcuccugccugaagggggccugcagcugcggcuccugcugcaaguucgacgaggacgacagcgagcccgugcugaagggcgucaagcuccacuacaccugaggacuagucccuguucccagagcccacuuuuuuuucuuuuuuugaaauaaaauagccugucuuucagaucucaaaggcucuuuucagagccaccaaaaaaaaaaaaaaaaaaaaaaaaaaaaaaaaaaaaaaaaaaaaaaaaaaaaaaaaaaaaaaaaaaaaaaaaaaaaaaaaaaaaaaaaaaaaaaaaaaaaa

SEQ ID NO: 15046 - RNA, 3845 nt, Artificial Sequence
  SARS-CoV/Tor2__NP_828851.1 spike protein mRNA gc (variant)
aggagagucccgcagucggcguccagcggcucugcuuguucgugugugugucguugcaggccuuauucaagcuuaccauguucaucuuccugcuguuccugacccugaccagcggcuccgaccucgaccgcugcacgaccuucgacgacgugcaggcccccaacuacacccagcacaccagcuccaugcgcggggucuacuacccggacgagaucuuccggagcgacacgcuguaccugacccaggaccucuuccugcccuucuacuccaacgugaccggcuuccacaccaucaaccacacguucgggaaccccgugauccccuucaaggacggcaucuacuucgccgcgaccgagaaguccaacgucgugcggggguggguguucggcuccaccaugaacaacaagagccaguccgucaucaucaucaacaacagcaccaacguggugauccgcgccugcaacuucgagcugugcgacaacccguucuucgccgucuccaagcccaugggcacgcagacccacaccaugaucuucgacaacgccuucaacugcaccuucgaguacaucagcgacgccuucucccucgacgugagcgagaaguccgggaacuucaagcaccuccgggaguucguguucaagaacaaggacggcuuccuguacgucuacaagggguaccagcccaucgacguggugcgcgaccuccccagcggcuucaacacgcugaagccgaucuucaagcugccccucgggaucaacaucaccaacuuccgggcgauccugaccgccuucucccccgcccaggacaucuggggcaccagcgccgcggccuacuucgucggcuaccugaagcccacgaccuucaugcucaaguacgacgagaacgggaccaucaccgacgccguggacugcucccagaacccgcuggccgagcugaagugcagcgucaagagcuucgagaucgacaagggcaucuaccagacguccaacuuccgcguggugcccagcggggacgugguccgguuccccaacaucaccaaccucugccccuucggcgagguguucaacgccaccaaguucccguccguguacgcgugggagcgcaagaagaucagcaacugcgucgccgacuacuccgugcuguacaacagcaccuucuucuccacguucaagugcuacggcgucagcgccaccaagcugaacgaccucugcuucuccaacguguacgccgacagcuucguggucaagggggacgacgugcggcagaucgcccccggccagaccggggugaucgcggacuacaacuacaagcugcccgacgacuucaugggcugcguccuggccuggaacacccgcaacaucgacgccacguccaccgggaacuacaacuacaaguaccgguaccuccgccacggcaagcugcggcccuucgagcgcgacaucagcaacgugccguucucccccgacggcaagcccugcacgcccccggcccugaacugcuacuggccccucaacgacuacggguucuacaccaccaccggcaucggguaccagcccuaccggguggucgugcugagcuucgagcugcucaacgcccccgcgaccgugugcggcccgaagcuguccaccgaccugaucaagaaccagugcgucaacuucaacuucaacgggcucaccggcacgggcgugcugacccccagcuccaagcgcuuccagcccuuccagcaguucgggcgggacgugagcgacuucaccgacuccguccgcgacccgaagaccagcgagauccuggacaucagccccugcgccuucggcgggguguccgugaucacgcccggcaccaacgccagcuccgaggucgccgugcucuaccaggacgugaacugcaccgacgucagcaccgccauccacgcggaccagcugacgcccgccuggcggaucuacuccaccgggaacaacguguuccagacccaggccggcugccugaucggcgccgagcacguggacaccagcuacgagugcgacaucccgaucggggcgggcaucugcgccuccuaccacacggucagccuccugcgcuccaccagccagaaguccaucguggccuacaccaugagccugggggccgacuccagcaucgccuacuccaacaacaccaucgcgauccccacgaacuucagcaucuccaucaccaccgaggugaugcccgucagcauggccaagaccagcguggacugcaacauguacaucugcggcgacuccacggagugcgccaaccuccugcugcaguacggcagcuucugcacccagcugaaccgcgcccucuccgggaucgccgcggagcaggaccggaacacccgcgagguguucgcccaggucaagcagauguacaagacccccacgcugaaguacuucggcggguucaacuucagccagauccugccggacccccucaagcccaccaagcgguccuucaucgaggaccugcuguucaacaaggugacccucgccgacgccggcuucaugaagcaguacggggagugccugggcgacaucaacgcccgcgaccugaucugcgcgcagaaguucaacggccucaccgugcugcccccgcugcucacggacgacaugaucgccgccuacaccgccgcgcuggucagcgggaccgccaccgccggcuggacguucggggccggcgccgcgcugcagauccccuucgccaugcagauggccuaccgguucaacgggaucggcgugacccagaacgugcucuacgagaaccagaagcagaucgccaaccaguucaacaaggccaucucccagauccaggagagccugaccaccacguccaccgcgcugggcaagcuccaggacgucgugaaccagaacgcccaggcccugaacacccuggugaagcagcucagcuccaacuucggggccaucagcuccguccugaacgacauccugagccgccucgacccgcccgaggccgaggugcagaucgaccggcugaucaccggccgccugcagucccuccagaccuacgugacgcagcagcugauccgggcggccgagauccgcgccagcgccaaccuggcggccaccaagauguccgagugcguccucgggcagagcaagcggguggacuucugcggcaagggguaccaccugauguccuucccccaggccgcgccccacggcguggucuuccugcacgugaccuacgugcccagccaggagcgcaacuucaccacggcccccgccaucugccacgagggcaaggccuacuucccgcgggagggggucuucguguucaacggcaccagcugguucaucacccagcgcaacuucuucagcccccagaucaucaccacggacaacaccuucgugagcgggaacugcgacgucgugaucggcaucaucaacaacaccgucuacgacccccuccagcccgagcuggacuccuucaaggaggagcuggacaaguacuucaagaaccacaccagcccggacguggaccucggggacaucuccggcaucaacgccagcguggucaacauccagaaggagaucgaccggcugaacgagguggccaagaaccugaacgagucccucaucgaccugcaggagcugggcaaguacgagcagugaggacuagucccuguucccagagcccacuuuuuuuucuuuuuuugaaauaaaauagccugucuuucagaucucaaaggcucuuuucagagccaccaaaaaaaaaaaaaaaaaaaaaaaaaaaaaaaaaaaaaaaaaaaaaaaaaaaaaaaaaaaaaaaaaaaaaaaaaaaaaaaaaaaaaaaaaaaaaaaaaaaaa

SEQ ID NO: 15047 - RNA, 3926 nt, Artificial Sequence
  SARS-CoV/Tor2__NP_828851.1 spike protein mRNA gc (variant)
aggagagucccgcagucggcguccagcggcucugcuuguucgugugugugucguugcaggccuuauucaagcuuaccauguucaucuuccugcuguuccugacccugaccagcggcuccgaccucgaccgcugcacgaccuucgacgacgugcaggcccccaacuacacccagcacaccagcuccaugcgcggggucuacuacccggacgagaucuuccggagcgacacgcuguaccugacccaggaccucuuccugcccuucuacuccaacgugaccggcuuccacaccaucaaccacacguucgggaaccccgugauccccuucaaggacggcaucuacuucgccgcgaccgagaaguccaacgucgugcggggguggguguucggcuccaccaugaacaacaagagccaguccgucaucaucaucaacaacagcaccaacguggugauccgcgccugcaacuucgagcugugcgacaacccguucuucgccgucuccaagcccaugggcacgcagacccacaccaugaucuucgacaacgccuucaacugcaccuucgaguacaucagcgacgccuucucccucgacgugagcgagaaguccgggaacuucaagcaccuccgggaguucguguucaagaacaaggacggcuuccuguacgucuacaagggguaccagcccaucgacguggugcgcgaccuccccagcggcuucaacacgcugaagccgaucuucaagcugccccucgggaucaacaucaccaacuuccgggcgauccugaccgccuucucccccgcccaggacaucuggggcaccagcgccgcggccuacuucgucggcuaccugaagcccacgaccuucaugcucaaguacgacgagaacgggaccaucaccgacgccguggacugcucccagaacccgcuggccgagcugaagugcagcgucaagagcuucgagaucgacaagggcaucuaccagacguccaacuuccgcguggugcccagcggggacgugguccgguuccccaacaucaccaaccucugccccuucggcgagguguucaacgccaccaaguucccguccguguacgcgugggagcgcaagaagaucagcaacugcgucgccgacuacuccgugcuguacaacagcaccuucuucuccacguucaagugcuacggcgucagcgccaccaagcugaacgaccucugcuucuccaacguguacgccgacagcuucguggucaagggggacgacgugcggcagaucgcccccggccagaccggggugaucgcggacuacaacuacaagcugcccgacgacuucaugggcugcguccuggccuggaacacccgcaacaucgacgccacguccaccgggaacuacaacuacaaguaccgguaccuccgccacggcaagcugcggcccuucgagcgcgacaucagcaacgugccguucucccccgacggcaagcccugcacgcccccggcccugaacugcuacuggccccucaacgacuacggguucuacaccaccaccggcaucggguaccagcccuaccggguggucgugcugagcuucgagcugcucaacgcccccgcgaccgugugcggcccgaagcuguccaccgaccugaucaagaaccagugcgucaacuucaacuucaacgggcucaccggcacgggcgugcugacccccagcuccaagcgcuuccagcccuuccagcaguucgggcgggacgugagcgacuucaccgacuccguccgcgacccgaagaccagcgagauccuggacaucagccccugcgccuucggcgggguguccgugaucacgcccggcaccaacgccagcuccgaggucgccgugcucuaccaggacgugaacugcaccgacgucagcaccgccauccacgcggaccagcugacgcccgccuggcggaucuacuccaccgggaacaacguguuccagacccaggccggcugccugaucggcgccgagcacguggacaccagcuacgagugcgacaucccgaucggggcgggcaucugcgccuccuaccacacggucagccuccugcgcuccaccagccagaaguccaucguggccuacaccaugagccugggggccgacuccagcaucgccuacuccaacaacaccaucgcgauccccacgaacuucagcaucuccaucaccaccgaggugaugcccgucagcauggccaagaccagcguggacugcaacauguacaucugcggcgacuccacggagugcgccaaccuccugcugcaguacggcagcuucugcacccagcugaaccgcgcccucuccgggaucgccgcggagcaggaccggaacacccgcgagguguucgcccaggucaagcagauguacaagacccccacgcugaaguacuucggcggguucaacuucagccagauccugccggacccccucaagcccaccaagcgguccuucaucgaggaccugcuguucaacaaggugacccucgccgacgccggcuucaugaagcaguacggggagugccugggcgacaucaacgcccgcgaccugaucugcgcgcagaaguucaacggccucaccgugcugcccccgcugcucacggacgacaugaucgccgccuacaccgccgcgcuggucagcgggaccgccaccgccggcuggacguucggggccggcgccgcgcugcagauccccuucgccaugcagauggccuaccgguucaacgggaucggcgugacccagaacgugcucuacgagaaccagaagcagaucgccaaccaguucaacaaggccaucucccagauccaggagagccugaccaccacguccaccgcgcugggcaagcuccaggacgucgugaaccagaacgcccaggcccugaacacccuggugaagcagcucagcuccaacuucggggccaucagcuccguccugaacgacauccugagccgccucgacccgcccgaggccgaggugcagaucgaccggcugaucaccggccgccugcagucccuccagaccuacgugacgcagcagcugauccgggcggccgagauccgcgccagcgccaaccuggcggccaccaagauguccgagugcguccucgggcagagcaagcggguggacuucugcggcaagggguaccaccugauguccuucccccaggccgcgccccacggcguggucuuccugcacgugaccuacgugcccagccaggagcgcaacuucaccacggcccccgccaucugccacgagggcaaggccuacuucccgcgggagggggucuucguguucaacggcaccagcugguucaucacccagcgcaacuucuucagcccccagaucaucaccacggacaacaccuucgugagcgggaacugcgacgucgugaucggcaucaucaacaacaccgucuacgacccccuccagcccgagcuggacuccuucaaggaggagcuggacaaguacuucaagaaccacaccagcccggacguggaccucggggacaucuccggcaucaacgccagcguggucaacauccagaaggagaucgaccggcugaacgagguggccaagaaccugaacgagucccucaucgaccugcaggagcugggcaaguacgagcagggcggguacauccccgaggcgccccgcgacgggcaggccuacgugcggaaggacggcgaguggguccuccugagcacguucugaggacuagucccuguucccagagcccacuuuuuuuucuuuuuuugaaauaaaauagccugucuuucagaucucaaaggcucuuuucagagccaccaaaaaaaaaaaaaaaaaaaaaaaaaaaaaaaaaaaaaaaaaaaaaaaaaaaaaaaaaaaaaaaaaaaaaaaaaaaaaaaaaaaaaaaaaaaaaaaaaaaaa

SEQ ID NO: 15048 - RNA, 4334 nt, Artificial Sequence
  HCoV/OC43__P36334.1 spike protein mRNA gc (1-1353)
aggagagucccgcagucggcguccagcggcucugcuuguucgugugugugucguugcaggccuuauucaagcuuaccauguuccugauccuccugaucagccugcccaccgccuucgccgugaucggcgaccucaagugcaccuccgacaacaucaacgacaaggacacggggccgccgcccaucagcaccgacaccgucgacgugaccaacggccuggggacguacuacgugcuggaccgcgucuaccucaacaccacccuguuccugaacggcuacuaccccaccuccgggagcacguaccggaacauggcgcucaagggcuccgugcugcugagccgccucugguucaagccgcccuuccuguccgacuucaucaacggcaucuucgccaaggugaagaacaccaaggucaucaaggaccgggugauguacagcgaguuccccgccaucaccaucggguccaccuucgugaacacgagcuacuccgucguggugcagccccgcaccaucaacagcacccaggacggcgacaacaagcugcaggggcuccuggaggucuccgugugccaguacaacaugugcgaguacccccagaccaucugccaccccaaccugggcaaccaccggaaggagcucuggcaccuggacacggggguggucagcugccuguacaagcgcaacuucaccuacgacgugaacgccgacuaccucuacuuccacuucuaccaggagggcggcaccuucuacgccuacuucaccgacacggggguggucaccaaguuccuguucaacguguaccugggcauggcgcucucccacuacuacgugaugccccugaccugcaacagcaagcugacccucgaguacugggucacgccccugaccucccggcaguaccugcucgccuucaaccaggacgggaucaucuucaacgccgaggacugcaugagcgacuucauguccgagaucaagugcaagacccagagcaucgccccgcccaccggcguguacgagcugaacggcuacacggugcagcccaucgcggacgucuaccgccggaagcccaaccugccgaacugcaacaucgaggccuggcucaacgacaagagcgugcccagcccccugaacugggagcgcaagaccuucuccaacugcaacuucaacauguccagccugauguccuucauccaggccgacagcuucacgugcaacaacaucgacgccgccaagaucuacgggaugugcuucuccagcaucaccaucgacaaguucgcgauccccaacggccggaaggucgaccuccagcuggggaaccugggcuaccuccaguccuucaacuaccgcaucgacaccaccgccaccagcugccagcuguacuacaaccugccggccgccaacguguccgugagccgguucaaccccuccaccuggaacaagcgcuucggguucaucgaggacagcgucuucaagccccggcccgccggcgugcucacgaaccacgacguggucuacgcgcagcacugcuucaaggccccgaagaacuucugccccugcaagcugaacggcuccugcguggggagcggccccgggaagaacaacggcaucgggaccugccccgccggcaccaacuaccugaccugcgacaaccucugcaccccggaccccaucacguucaccggcaccuacaagugcccccagaccaagucccugguggggaucggcgagcacugcagcgggcuggccgucaaguccgacuacugcggcgggaacagcugcacgugccgcccgcaggccuuccugggcuggagcgcggacuccugccuccagggcgacaagugcaacaucuucgccaacuucauccugcacgacgugaacagcgggcugaccugcuccaccgaccuccagaaggccaacaccgacaucauccugggcgugugcgucaacuacgaccuguacgggauccucggccagggcaucuucguggaggugaacgccacguacuacaacagcuggcagaaccugcuguacgacuccaacgggaaccucuacggcuuccgggacuacaucaucaaccgcaccuucaugauccggagcugcuacuccgggcgcgucagcgccgcguuccacgccaacuccagcgagcccgcccugcuguuccggaacaucaagugcaacuacguguucaacaacucccucacccgccagcugcagcccaucaacuacuucgacagcuaccugggcugcguggucaacgccuacaacuccaccgcgaucagcgugcagacgugcgaccucaccgugggguccggcuacugcgucgacuacagcaagaaccgccggucccgcggcgccaucaccaccggguaccgguucacgaacuucgagcccuucaccgugaacagcgugaacgacagccuggagccggucggcgggcuguacgagauccagauccccuccgaguucaccaucggcaacaugguggaguucauccagaccagcucccccaaggugacgaucgacugcgccgccuucgucugcggggacuacgccgcgugcaagagccagcucguggaguacggcuccuucugcgacaacaucaacgccauccugaccgaggugaacgagcugcucgacaccacccagcugcaggucgccaacagccugaugaacggcgugacgcucuccaccaagcugaaggacggggugaacuucaacgucgacgacaucaacuucagccccgugcugggcugccucggguccgagugcagcaaggccuccagccgcuccgccaucgaggaccugcuguucgacaaggugaagcucagcgacgucggcuucguggaggcguacaacaacugcaccgggggcgccgagauccgggaccugaucugcgugcaguccuacaagggcaucaagguccugccgccccuccugagcgagaaccagaucuccggguacacccuggccgccacgagcgccucccucuucccgcccuggaccgcggccgccggcgugcccuucuaccugaacgugcaguaccgcaucaacgggcugggcgucaccauggacgugcucagccagaaccagaagcugaucgccaacgcguucaacaacgcccuguacgccauccaggagggguucgacgccaccaacagcgcccucgugaagauccaggcggucgugaacgccaacgccgaggcccugaacaaccugcuccagcagcuguccaaccgguucggcgccaucagcgcgucccugcaggagauccucagccgccuggacgcccuggaggccgaggcccagaucgaccggcucaucaacggccgccugacggcccugaacgcguacgugucccagcagcucagcgacuccacccuggucaaguucagcgccgcccaggccauggagaaggugaacgagugcgugaagucccagagcucccggaucaacuucugcgggaacggcaaccacaucaucagccugguccagaacgcgcccuacgggcucuacuucauccacuucuccuacgugcccaccaaguacgucaccgcccgcgugagccccggccugugcaucgccggcgaccgggggaucgccccgaaguccggcuacuucgugaacgucaacaacacguggauguacaccgggagcggcuacuacuaccccgagcccaucaccgagaacaacgugguggucauguccacgugcgccgugaacuacaccaaggcgcccuacgugaugcugaacaccagcaucccgaaccuccccgacuucaaggaggagcuggaccagugguucaagaaccagaccuccgucgcccccgaccugagccucgacuacaucaacgugaccuuccuggaccuccagguggagaugaaccgccugcaggaggccaucaagguccugaaccagagcuacaucaaccugaaggacaucgggaccuacgaguacuacgugaaguggcccugguacguguggcuccugaucugccuggccggcgucgccaugcucgugcugcuguucuucaucugcugcugcacgggcugcgggaccuccugcuucaagaagugcggcgggugcugcgacgacuacaccggcuaccaggagcucgugaucaagaccagccacgacgacugaggacuagucccuguucccagagcccacuuuuuuuucuuuuuuugaaauaaaauagccugucuuucagaucucaaaggcucuuuucagagccaccaaaaaaaaaaaaaaaaaaaaaaaaaaaaaaaaaaaaaaaaaaaaaaaaaaaaaaaaaaaaaaaaaaaaaaaaaaaaaaaaaaaaaaaaaaaaaaaaaaaaa

SEQ ID NO: 15049 - RNA, 4334 nt, Artificial Sequence
  HCoV/OC43__P36334.1 spike protein mRNA gc (1-1353)(A1070P_L1071P)
aggagagucccgcagucggcguccagcggcucugcuuguucgugugugugucguugcaggccuuauucaagcuuaccauguuccugauccuccugaucagccugcccaccgccuucgccgugaucggcgaccucaagugcaccuccgacaacaucaacgacaaggacacggggccgccgcccaucagcaccgacaccgucgacgugaccaacggccuggggacguacuacgugcuggaccgcgucuaccucaacaccacccuguuccugaacggcuacuaccccaccuccgggagcacguaccggaacauggcgcucaagggcuccgugcugcugagccgccucugguucaagccgcccuuccuguccgacuucaucaacggcaucuucgccaaggugaagaacaccaaggucaucaaggaccgggugauguacagcgaguuccccgccaucaccaucggguccaccuucgugaacacgagcuacuccgucguggugcagccccgcaccaucaacagcacccaggacggcgacaacaagcugcaggggcuccuggaggucuccgugugccaguacaacaugugcgaguacccccagaccaucugccaccccaaccugggcaaccaccggaaggagcucuggcaccuggacacggggguggucagcugccuguacaagcgcaacuucaccuacgacgugaacgccgacuaccucuacuuccacuucuaccaggagggcggcaccuucuacgccuacuucaccgacacggggguggucaccaaguuccuguucaacguguaccugggcauggcgcucucccacuacuacgugaugccccugaccugcaacagcaagcugacccucgaguacugggucacgccccugaccucccggcaguaccugcucgccuucaaccaggacgggaucaucuucaacgccgaggacugcaugagcgacuucauguccgagaucaagugcaagacccagagcaucgccccgcccaccggcguguacgagcugaacggcuacacggugcagcccaucgcggacgucuaccgccggaagcccaaccugccgaacugcaacaucgaggccuggcucaacgacaagagcgugcccagcccccugaacugggagcgcaagaccuucuccaacugcaacuucaacauguccagccugauguccuucauccaggccgacagcuucacgugcaacaacaucgacgccgccaagaucuacgggaugugcuucuccagcaucaccaucgacaaguucgcgauccccaacggccggaaggucgaccuccagcuggggaaccugggcuaccuccaguccuucaacuaccgcaucgacaccaccgccaccagcugccagcuguacuacaaccugccggccgccaacguguccgugagccgguucaaccccuccaccuggaacaagcgcuucggguucaucgaggacagcgucuucaagccccggcccgccggcgugcucacgaaccacgacguggucuacgcgcagcacugcuucaaggccccgaagaacuucugccccugcaagcugaacggcuccugcguggggagcggccccgggaagaacaacggcaucgggaccugccccgccggcaccaacuaccugaccugcgacaaccucugcaccccggaccccaucacguucaccggcaccuacaagugcccccagaccaagucccugguggggaucggcgagcacugcagcgggcuggccgucaaguccgacuacugcggcgggaacagcugcacgugccgcccgcaggccuuccugggcuggagcgcggacuccugccuccagggcgacaagugcaacaucuucgccaacuucauccugcacgacgugaacagcgggcugaccugcuccaccgaccuccagaaggccaacaccgacaucauccugggcgugugcgucaacuacgaccuguacgggauccucggccagggcaucuucguggaggugaacgccacguacuacaacagcuggcagaaccugcuguacgacuccaacgggaaccucuacggcuuccgggacuacaucaucaaccgcaccuucaugauccggagcugcuacuccgggcgcgucagcgccgcguuccacgccaacuccagcgagcccgcccugcuguuccggaacaucaagugcaacuacguguucaacaacucccucacccgccagcugcagcccaucaacuacuucgacagcuaccugggcugcguggucaacgccuacaacuccaccgcgaucagcgugcagacgugcgaccucaccgugggguccggcuacugcgucgacuacagcaagaaccgccggucccgcggcgccaucaccaccggguaccgguucacgaacuucgagcccuucaccgugaacagcgugaacgacagccuggagccggucggcgggcuguacgagauccagauccccuccgaguucaccaucggcaacaugguggaguucauccagaccagcucccccaaggugacgaucgacugcgccgccuucgucugcggggacuacgccgcgugcaagagccagcucguggaguacggcuccuucugcgacaacaucaacgccauccugaccgaggugaacgagcugcucgacaccacccagcugcaggucgccaacagccugaugaacggcgugacgcucuccaccaagcugaaggacggggugaacuucaacgucgacgacaucaacuucagccccgugcugggcugccucggguccgagugcagcaaggccuccagccgcuccgccaucgaggaccugcuguucgacaaggugaagcucagcgacgucggcuucguggaggcguacaacaacugcaccgggggcgccgagauccgggaccugaucugcgugcaguccuacaagggcaucaagguccugccgccccuccugagcgagaaccagaucuccggguacacccuggccgccacgagcgccucccucuucccgcccuggaccgcggccgccggcgugcccuucuaccugaacgugcaguaccgcaucaacgggcugggcgucaccauggacgugcucagccagaaccagaagcugaucgccaacgcguucaacaacgcccuguacgccauccaggagggguucgacgccaccaacagcgcccucgugaagauccaggcggucgugaacgccaacgccgaggcccugaacaaccugcuccagcagcuguccaaccgguucggcgccaucagcgcgucccugcaggagauccucagccgccuggacccgcccgaggccgaggcccagaucgaccggcugaucaacggccgccucacggcccugaacgccuacgugucccagcagcugagcgacuccacccucgucaaguucagcgcggcccaggccauggagaaggugaacgagugcgugaagucccagagcucccggaucaacuucugcgggaacggcaaccacaucaucagccugguccagaacgcccccuacgggcuguacuucauccacuucuccuacgugcccaccaaguacgucaccgcgcgcgugagccccggccucugcaucgccggcgaccgggggaucgcccccaaguccggcuacuucgugaacgucaacaacacguggauguacaccgggagcggcuacuacuaccccgagccgaucaccgagaacaacgugguggucauguccacgugcgccgugaacuacaccaaggcccccuacgugaugcugaacaccagcauccccaaccugcccgacuucaaggaggagcucgaccagugguucaagaaccagaccuccgucgcgccggaccugagccuggacuacaucaacgugaccuuccucgaccuccagguggagaugaaccgccugcaggaggccaucaagguccugaaccagagcuacaucaaccugaaggacaucgggaccuacgaguacuacgugaaguggcccugguacguguggcugcucaucugccuggccggcgucgccaugcuggugcuccuguucuucaucugcugcugcacgggcugcgggaccuccugcuucaagaagugcggcgggugcugcgacgacuacaccggcuaccaggagcuggugaucaagaccagccacgacgacugaggacuagucccuguucccagagcccacuuuuuuuucuuuuuuugaaauaaaauagccugucuuucagaucucaaaggcucuuuucagagccaccaaaaaaaaaaaaaaaaaaaaaaaaaaaaaaaaaaaaaaaaaaaaaaaaaaaaaaaaaaaaaaaaaaaaaaaaaaaaaaaaaaaaaaaaaaaaaaaaaaaaa

SEQ ID NO: 15050 - RNA, 4361 nt, Artificial Sequence
  HCoV/OC43/1783A_10__AIL49484.1 spike protein mRNA gc (1-1362)
aggagagucccgcagucggcguccagcggcucugcuuguucgugugugugucguugcaggccuuauucaagcuuaccauguuccugauccuccugaucagccugcccaccgccuucgccgugaucggcgaccucaagugcccgcuggacucccgcaccgggagccugaacaacaucgacacgggcccgcccuccaucagcaccgcgaccgucgacgugaccaacgggcucggcacguacuacgugcuggaccgggucuaccugaacaccacccucuuccugaacggguacuaccccaccuccggcagcacguaccgcaacauggcccugaagggcaccgacaagcucuccacccugugguucaagccgcccuuccugagcgacuucaucaacgggaucuucgccaaggugaagaacaccaagguguucaaggacggcgucauguacuccgaguuccccgccaucacgaucgggagcaccuucgugaacaccuccuacagcguggucgugcagccccggaccaucaacuccacgcaggacggcgugaacaagcuccaggggcugcuggaggucagcgugugccaguacaacaugugcgaguacccccacaccaucugccaccccaagcucggcaaccacuucaaggagcuguggcacauggacaccggcguggucuccugccuguacaagcgcaacuucaccuacgacgugaacgccacguaccucuacuuccacuucuaccaggagggcggcaccuucuacgcguacuucaccgacaccgggguggucacgaaguuccuguucaacguguaccugggcauggcccucagccacuacuacgugaugccccugaccugcaucucccggcgcgacaucggcuucacccuggaguacugggucacgccccucaccagccggcaguaccugcuggccuucaaccaggacgggaucaucuucaacgccguggacugcauguccgacuucaugagcgagaucaagugcaagacccagagcaucgcgccgcccaccggcguguacgagcucaacggguacaccguccagcccaucgccgacguguaccgccggaagcccgaccugccgaacugcaacaucgaggccuggcugaacgacaaguccguccccagcccccucaacugggagcgcaagacguucuccaacugcaacuucaacaugagcucccugaugagcuucauccaggccgacuccuucacgugcaacaacaucgacgccgcgaagaucuacggcaugugcuucagcuccaucaccaucgacaaguucgccauccccaacgggcggaagguggaccugcagcucggcaaccugggcuaccugcagagcuucaacuaccgcaucgacaccaccgccaccuccugccagcucuacuacaaccugccggccgccaacgugagcgucucccgguucaaccccagcaccuggaacaagcgcuucggguucaucgagaacuccguguucaagccccagcccgcgggcgugcugaccaaccacgacgucguguacgcccagcacugcuucaaggccccgaagaacuucugccccugcaagcucaacagcucccugugcguggggagcggccccgggaagaacaacggcaucgggaccugccccgccgggacgaacuaccugaccugccacaaccucugcaacccggaccccaucaccuucaccggccccuacaagugcccgcagacgaagucccuggucgggaucggcgagcacugcagcgggcuggccgucaagagcgacuacugcggcggcaaccccugcacgugccagccccaggcguuccuggggugguccgccgacagcugccuccagggcgacaagugcaacaucuucgccaaccugauccugcacgacgugaacuccgggcugaccugcagcaccgaccugcagaaggccaacaccgacaucaagcugggcgugugcgugaacuacgaccucuacggcaucuccgggcagggcaucuucguggaggucaacgccaccuacuacaacagcuggcagaaccugcuguacgacuccaacgggaaccucuacggcuuccgggacuacaucaccaaccgcaccuucaugauccggagcugcuacuccgggcgcgugagcgcggccuuccacgccaacuccagcgagcccgcccugcuguuccggaacaucaagugcaacuacguguucaacaacucccucauccgccagcugcagccgaucaacuacuucgacagcuaccugggcugcgucgugaacgcguacaacuccacggccaucagcgugcagaccugcgaccucaccgucggcuccggguacugcguggacuacagcaagaaccggcgcagccgccgggccaucaccacgggcuaccgcuucaccaacuucgagcccuucaccgugaacuccgucaacgacagccuggagcccgucgggggccuguacgagauccagauccccuccgaguucaccaucgggaacauggaggaguucauccagacgagcuccccgaaggugaccaucgacugcgccgccuucgugugcggcgacuacgcggccugcaagagccagcucguggaguacggcuccuucugcgacaacaucaacgccauccugaccgaggugaacgagcugcucgacaccacgcagcugcaggucgccaacagccugaugaacggggugacccucuccaccaagcugaaggacggcgugaacuucaacgucgacgacaucaacuucagcuccgugcuggggugccucggcagcgagugcuccaaggccagcucccggagcgcgaucgaggaccugcuguucgacaaggugaagcucuccgacgucggguucguggccgccuacaacaacugcaccggcggcgccgagauccgcgaccugaucugcgugcagagcuacaaggggaucaagguccugccgccccuccuguccgagaaccagaucagcggcuacacgcuggccgcgaccagcgccucccucuucccgcccuggaccgccgccgcgggggugcccuucuaccugaacgugcaguaccggaucaacggccugggggucaccauggacgugcucagccagaaccagaagcugaucgccaacgccuucaacaacgcccuggacgccauccaggagggcuucgacgcgacgaacuccgcccucgugaagauccaggccgucgugaacgccaacgccgaggcgcugaacaaccugcuccagcagcugagcaaccgcuucggcgccaucuccagcucccugcaggagauccucagccggcuggacgcccuggaggccgaggcccagaucgaccgccucaucaacgggcggcugaccgcgcugaacgccuacgugucccagcagcucagcgacuccacccuggucaaguucagcgccgcccaggcgauggagaaggugaacgagugcgugaagucccagagcucccgcaucaacuucugcggcaacgggaaccacaucaucagccugguccagaacgcccccuacggccucuacuucauccacuucuccuacgugcccaccaaguacgucacggccaaggugagccccggccugugcaucgccggggaccggggcaucgcccccaaguccggguacuucgugaacgucaacaacaccuggauguacaccggcagcggguacuacuaccccgagcccaucaccgagaacaacgugguggucaugagcacgugcgcggugaacuacaccaaggccccguacgugaugcugaacaccuccacccccaaccuccccgacuuccgcgaggagcuggaccagugguucaagaaccagaccagcgucgcccccgaccugucccucgacuacaucaacgugacguuccuggaccuccagguggagaugaaccggcuccaggaggccaucaagguccugaaccagagcuacaucaaccugaaggacaucggcaccuacgaguacuacgugaaguggccgugguacguguggcuccugaucggccuggccggggucgcgaugcucgugcugcuguucuucaucugcugcugcaccggcugcgggaccuccugcuucaagaagugcggcgggugcugcgacgacuacacgggcuaccaggagcucgugaucaagaccagccacgacgacugaggacuagucccuguucccagagcccacuuuuuuuucuuuuuuugaaauaaaauagccugucuuucagaucucaaaggcucuuuucagagccaccaaaaaaaaaaaaaaaaaaaaaaaaaaaaaaaaaaaaaaaaaaaaaaaaaaaaaaaaaaaaaaaaaaaaaaaaaaaaaaaaaaaaaaaaaaaaaaaaaaaaa

SEQ ID NO: 15051 - RNA, 4361 nt, Artificial Sequence
  HCoV/OC43/1783A_10__AIL49484.1 spike protein mRNA gc (1-1362)(A1079P_L1080P)
aggagagucccgcagucggcguccagcggcucugcuuguucgugugugugucguugcaggccuuauucaagcuuaccauguuccugauccuccugaucagccugcccaccgccuucgccgugaucggcgaccucaagugcccgcuggacucccgcaccgggagccugaacaacaucgacacgggcccgcccuccaucagcaccgcgaccgucgacgugaccaacgggcucggcacguacuacgugcuggaccgggucuaccugaacaccacccucuuccugaacggguacuaccccaccuccggcagcacguaccgcaacauggcccugaagggcaccgacaagcucuccacccugugguucaagccgcccuuccugagcgacuucaucaacgggaucuucgccaaggugaagaacaccaagguguucaaggacggcgucauguacuccgaguuccccgccaucacgaucgggagcaccuucgugaacaccuccuacagcguggucgugcagccccggaccaucaacuccacgcaggacggcgugaacaagcuccaggggcugcuggaggucagcgugugccaguacaacaugugcgaguacccccacaccaucugccaccccaagcucggcaaccacuucaaggagcuguggcacauggacaccggcguggucuccugccuguacaagcgcaacuucaccuacgacgugaacgccacguaccucuacuuccacuucuaccaggagggcggcaccuucuacgcguacuucaccgacaccgggguggucacgaaguuccuguucaacguguaccugggcauggcccucagccacuacuacgugaugccccugaccugcaucucccggcgcgacaucggcuucacccuggaguacugggucacgccccucaccagccggcaguaccugcuggccuucaaccaggacgggaucaucuucaacgccguggacugcauguccgacuucaugagcgagaucaagugcaagacccagagcaucgcgccgcccaccggcguguacgagcucaacggguacaccguccagcccaucgccgacguguaccgccggaagcccgaccugccgaacugcaacaucgaggccuggcugaacgacaaguccguccccagcccccucaacugggagcgcaagacguucuccaacugcaacuucaacaugagcucccugaugagcuucauccaggccgacuccuucacgugcaacaacaucgacgccgcgaagaucuacggcaugugcuucagcuccaucaccaucgacaaguucgccauccccaacgggcggaagguggaccugcagcucggcaaccugggcuaccugcagagcuucaacuaccgcaucgacaccaccgccaccuccugccagcucuacuacaaccugccggccgccaacgugagcgucucccgguucaaccccagcaccuggaacaagcgcuucggguucaucgagaacuccguguucaagccccagcccgcgggcgugcugaccaaccacgacgucguguacgcccagcacugcuucaaggccccgaagaacuucugccccugcaagcucaacagcucccugugcguggggagcggccccgggaagaacaacggcaucgggaccugccccgccgggacgaacuaccugaccugccacaaccucugcaacccggaccccaucaccuucaccggccccuacaagugcccgcagacgaagucccuggucgggaucggcgagcacugcagcgggcuggccgucaagagcgacuacugcggcggcaaccccugcacgugccagccccaggcguuccuggggugguccgccgacagcugccuccagggcgacaagugcaacaucuucgccaaccugauccugcacgacgugaacuccgggcugaccugcagcaccgaccugcagaaggccaacaccgacaucaagcugggcgugugcgugaacuacgaccucuacggcaucuccgggcagggcaucuucguggaggucaacgccaccuacuacaacagcuggcagaaccugcuguacgacuccaacgggaaccucuacggcuuccgggacuacaucaccaaccgcaccuucaugauccggagcugcuacuccgggcgcgugagcgcggccuuccacgccaacuccagcgagcccgcccugcuguuccggaacaucaagugcaacuacguguucaacaacucccucauccgccagcugcagccgaucaacuacuucgacagcuaccugggcugcgucgugaacgcguacaacuccacggccaucagcgugcagaccugcgaccucaccgucggcuccggguacugcguggacuacagcaagaaccggcgcagccgccgggccaucaccacgggcuaccgcuucaccaacuucgagcccuucaccgugaacuccgucaacgacagccuggagcccgucgggggccuguacgagauccagauccccuccgaguucaccaucgggaacauggaggaguucauccagacgagcuccccgaaggugaccaucgacugcgccgccuucgugugcggcgacuacgcggccugcaagagccagcucguggaguacggcuccuucugcgacaacaucaacgccauccugaccgaggugaacgagcugcucgacaccacgcagcugcaggucgccaacagccugaugaacggggugacccucuccaccaagcugaaggacggcgugaacuucaacgucgacgacaucaacuucagcuccgugcuggggugccucggcagcgagugcuccaaggccagcucccggagcgcgaucgaggaccugcuguucgacaaggugaagcucuccgacgucggguucguggccgccuacaacaacugcaccggcggcgccgagauccgcgaccugaucugcgugcagagcuacaaggggaucaagguccugccgccccuccuguccgagaaccagaucagcggcuacacgcuggccgcgaccagcgccucccucuucccgcccuggaccgccgccgcgggggugcccuucuaccugaacgugcaguaccggaucaacggccugggggucaccauggacgugcucagccagaaccagaagcugaucgccaacgccuucaacaacgcccuggacgccauccaggagggcuucgacgcgacgaacuccgcccucgugaagauccaggccgucgugaacgccaacgccgaggcgcugaacaaccugcuccagcagcugagcaaccgcuucggcgccaucuccagcucccugcaggagauccucagccggcuggacccgcccgaggccgaggcccagaucgaccgccugaucaacgggcggcucaccgcccugaacgcguacgugucccagcagcugagcgacuccacccucgucaaguucagcgccgcccaggccauggagaaggugaacgagugcgugaagucccagagcucccgcaucaacuucugcggcaacgggaaccacaucaucagccugguccagaacgcgcccuacggccuguacuucauccacuucuccuacgugcccaccaaguacgucacggccaaggugagccccggccucugcaucgccggggaccggggcaucgcccccaaguccggguacuucgugaacgucaacaacaccuggauguacaccggcagcggguacuacuaccccgagcccaucaccgagaacaacgugguggucauguccacgugcgccgugaacuacaccaaggcgcccuacgugaugcugaacaccagcacccccaaccugccggacuuccgcgaggagcucgaccagugguucaagaaccagaccagcgucgcccccgaccugucccuggacuacaucaacgugacguuccucgaccuccagguggagaugaaccggcugcaggaggccaucaagguccucaaccagagcuacaucaaccugaaggacaucggcaccuacgaguacuacgugaaguggcccugguacguguggcugcucaucggccuggccggggucgccaugcuggugcuccuguucuucaucugcugcugcaccggcugcgggaccuccugcuucaagaagugcggcgggugcugcgacgacuacacgggcuaccaggagcuggugaucaagaccagccacgacgacugaggacuagucccuguucccagagcccacuuuuuuuucuuuuuuugaaauaaaauagccugucuuucagaucucaaaggcucuuuucagagccaccaaaaaaaaaaaaaaaaaaaaaaaaaaaaaaaaaaaaaaaaaaaaaaaaaaaaaaaaaaaaaaaaaaaaaaaaaaaaaaaaaaaaaaaaaaaaaaaaaaaaa

SEQ ID NO: 15052 - RNA, 4136 nt, Artificial Sequence
  HCoV/OC43/1783A_10__AIL49484.1 spike protein mRNA gc (variant)
aggagagucccgcagucggcguccagcggcucugcuuguucgugugugugucguugcaggccuuauucaagcuuaccauguuccugauccuccugaucagccugcccaccgccuucgccgugaucggcgaccucaagugcccgcuggacucccgcaccgggagccugaacaacaucgacacgggcccgcccuccaucagcaccgcgaccgucgacgugaccaacgggcucggcacguacuacgugcuggaccgggucuaccugaacaccacccucuuccugaacggguacuaccccaccuccggcagcacguaccgcaacauggcccugaagggcaccgacaagcucuccacccugugguucaagccgcccuuccugagcgacuucaucaacgggaucuucgccaaggugaagaacaccaagguguucaaggacggcgucauguacuccgaguuccccgccaucacgaucgggagcaccuucgugaacaccuccuacagcguggucgugcagccccggaccaucaacuccacgcaggacggcgugaacaagcuccaggggcugcuggaggucagcgugugccaguacaacaugugcgaguacccccacaccaucugccaccccaagcucggcaaccacuucaaggagcuguggcacauggacaccggcguggucuccugccuguacaagcgcaacuucaccuacgacgugaacgccacguaccucuacuuccacuucuaccaggagggcggcaccuucuacgcguacuucaccgacaccgggguggucacgaaguuccuguucaacguguaccugggcauggcccucagccacuacuacgugaugccccugaccugcaucucccggcgcgacaucggcuucacccuggaguacugggucacgccccucaccagccggcaguaccugcuggccuucaaccaggacgggaucaucuucaacgccguggacugcauguccgacuucaugagcgagaucaagugcaagacccagagcaucgcgccgcccaccggcguguacgagcucaacggguacaccguccagcccaucgccgacguguaccgccggaagcccgaccugccgaacugcaacaucgaggccuggcugaacgacaaguccguccccagcccccucaacugggagcgcaagacguucuccaacugcaacuucaacaugagcucccugaugagcuucauccaggccgacuccuucacgugcaacaacaucgacgccgcgaagaucuacggcaugugcuucagcuccaucaccaucgacaaguucgccauccccaacgggcggaagguggaccugcagcucggcaaccugggcuaccugcagagcuucaacuaccgcaucgacaccaccgccaccuccugccagcucuacuacaaccugccggccgccaacgugagcgucucccgguucaaccccagcaccuggaacaagcgcuucggguucaucgagaacuccguguucaagccccagcccgcgggcgugcugaccaaccacgacgucguguacgcccagcacugcuucaaggccccgaagaacuucugccccugcaagcucaacagcucccugugcguggggagcggccccgggaagaacaacggcaucgggaccugccccgccgggacgaacuaccugaccugccacaaccucugcaacccggaccccaucaccuucaccggccccuacaagugcccgcagacgaagucccuggucgggaucggcgagcacugcagcgggcuggccgucaagagcgacuacugcggcggcaaccccugcacgugccagccccaggcguuccuggggugguccgccgacagcugccuccagggcgacaagugcaacaucuucgccaaccugauccugcacgacgugaacuccgggcugaccugcagcaccgaccugcagaaggccaacaccgacaucaagcugggcgugugcgugaacuacgaccucuacggcaucuccgggcagggcaucuucguggaggucaacgccaccuacuacaacagcuggcagaaccugcuguacgacuccaacgggaaccucuacggcuuccgggacuacaucaccaaccgcaccuucaugauccggagcugcuacuccgggcgcgugagcgcggccuuccacgccaacuccagcgagcccgcccugcuguuccggaacaucaagugcaacuacguguucaacaacucccucauccgccagcugcagccgaucaacuacuucgacagcuaccugggcugcgucgugaacgcguacaacuccacggccaucagcgugcagaccugcgaccucaccgucggcuccggguacugcguggacuacagcaagaacggcgggagcggcuccgccaucaccacgggguaccgguucaccaacuucgagcccuucaccgugaacagcgucaacgacucccuggagcccgugggcggccuguacgagauccagauccccagcgaguucaccaucgggaacauggaggaguucauccagacguccagcccgaaggugaccaucgacugcgccgccuucgucugcggcgacuacgcggccugcaagucccagcucguggaguacgggagcuucugcgacaacaucaacgccauccugaccgaggugaacgagcugcucgacaccacgcagcugcaggucgccaacucccugaugaacggcgugacccucagcaccaagcugaaggacggggugaacuucaacgucgacgacaucaacuucuccagcgugcugggcugccucggcuccgagugcagcaaggccuccagccgcuccgcgaucgaggaccugcuguucgacaaggugaagcucagcgacgucggguucguggccgccuacaacaacugcaccggcggggccgagauccgcgaccugaucugcgugcaguccuacaagggcaucaagguccugccgccccuccugagcgagaaccagaucagcggguacacgcuggccgcgaccuccgccagccucuucccgcccuggaccgccgccgcgggcgugcccuucuaccugaacgugcaguaccggaucaacggccugggggucaccauggacgugcucucccagaaccagaagcugaucgccaacgccuucaacaacgcccuggacgccauccaggagggcuucgacgcgacgaacagcgcccucgugaagauccaggccgucgugaacgccaacgccgaggcgcugaacaaccugcuccagcagcuguccaaccgcuucggggccaucagcuccagccugcaggagauccucucccggcuggacccgcccgaggccgaggcccagaucgaccgccugaucaacggccggcucaccgcccugaacgcguacgugagccagcagcuguccgacagcacccucgucaaguucuccgccgcccaggccauggagaaggugaacgagugcgucaagagccaguccagccgcaucaacuucugcggcaacgggaaccacaucaucucccuggugcagaacgcgcccuacggccuguacuucauccacuucagcuacgugcccaccaaguacgucacggccaaggugucccccgggcucugcaucgccggcgaccgggggaucgcccccaagagcggcuacuucgugaacgucaacaacaccuggauguacaccggcagcggguacuacuaccccgagcccaucaccgagaacaacgugguggucaugagcacgugcgccgugaacuacaccaaggcgcccuacgugaugcugaacaccuccacccccaaccugccggacuuccgcgaggagcucgaccagugguucaagaaccagaccuccgucgcccccgaccugagccuggacuacaucaacgugacguuccucgaccuccagguggagaugaaccggcugcaggaggccaucaagguccucaacugaggacuagucccuguucccagagcccacuuuuuuuucuuuuuuugaaauaaaauagccugucuuucagaucucaaaggcucuuuucagagccaccaaaaaaaaaaaaaaaaaaaaaaaaaaaaaaaaaaaaaaaaaaaaaaaaaaaaaaaaaaaaaaaaaaaaaaaaaaaaaaaaaaaaaaaaaaaaaaaaaaaaa

SEQ ID NO: 15053 - RNA, 4217 nt, Artificial Sequence
  HCoV/OC43/1783A_10__AIL49484.1 spike protein mRNA gc (variant)
aggagagucccgcagucggcguccagcggcucugcuuguucgugugugugucguugcaggccuuauucaagcuuaccauguuccugauccuccugaucagccugcccaccgccuucgccgugaucggcgaccucaagugcccgcuggacucccgcaccgggagccugaacaacaucgacacgggcccgcccuccaucagcaccgcgaccgucgacgugaccaacgggcucggcacguacuacgugcuggaccgggucuaccugaacaccacccucuuccugaacggguacuaccccaccuccggcagcacguaccgcaacauggcccugaagggcaccgacaagcucuccacccugugguucaagccgcccuuccugagcgacuucaucaacgggaucuucgccaaggugaagaacaccaagguguucaaggacggcgucauguacuccgaguuccccgccaucacgaucgggagcaccuucgugaacaccuccuacagcguggucgugcagccccggaccaucaacuccacgcaggacggcgugaacaagcuccaggggcugcuggaggucagcgugugccaguacaacaugugcgaguacccccacaccaucugccaccccaagcucggcaaccacuucaaggagcuguggcacauggacaccggcguggucuccugccuguacaagcgcaacuucaccuacgacgugaacgccacguaccucuacuuccacuucuaccaggagggcggcaccuucuacgcguacuucaccgacaccgggguggucacgaaguuccuguucaacguguaccugggcauggcccucagccacuacuacgugaugccccugaccugcaucucccggcgcgacaucggcuucacccuggaguacugggucacgccccucaccagccggcaguaccugcuggccuucaaccaggacgggaucaucuucaacgccguggacugcauguccgacuucaugagcgagaucaagugcaagacccagagcaucgcgccgcccaccggcguguacgagcucaacggguacaccguccagcccaucgccgacguguaccgccggaagcccgaccugccgaacugcaacaucgaggccuggcugaacgacaaguccguccccagcccccucaacugggagcgcaagacguucuccaacugcaacuucaacaugagcucccugaugagcuucauccaggccgacuccuucacgugcaacaacaucgacgccgcgaagaucuacggcaugugcuucagcuccaucaccaucgacaaguucgccauccccaacgggcggaagguggaccugcagcucggcaaccugggcuaccugcagagcuucaacuaccgcaucgacaccaccgccaccuccugccagcucuacuacaaccugccggccgccaacgugagcgucucccgguucaaccccagcaccuggaacaagcgcuucggguucaucgagaacuccguguucaagccccagcccgcgggcgugcugaccaaccacgacgucguguacgcccagcacugcuucaaggccccgaagaacuucugccccugcaagcucaacagcucccugugcguggggagcggccccgggaagaacaacggcaucgggaccugccccgccgggacgaacuaccugaccugccacaaccucugcaacccggaccccaucaccuucaccggccccuacaagugcccgcagacgaagucccuggucgggaucggcgagcacugcagcgggcuggccgucaagagcgacuacugcggcggcaaccccugcacgugccagccccaggcguuccuggggugguccgccgacagcugccuccagggcgacaagugcaacaucuucgccaaccugauccugcacgacgugaacuccgggcugaccugcagcaccgaccugcagaaggccaacaccgacaucaagcugggcgugugcgugaacuacgaccucuacggcaucuccgggcagggcaucuucguggaggucaacgccaccuacuacaacagcuggcagaaccugcuguacgacuccaacgggaaccucuacggcuuccgggacuacaucaccaaccgcaccuucaugauccggagcugcuacuccgggcgcgugagcgcggccuuccacgccaacuccagcgagcccgcccugcuguuccggaacaucaagugcaacuacguguucaacaacucccucauccgccagcugcagccgaucaacuacuucgacagcuaccugggcugcgucgugaacgcguacaacuccacggccaucagcgugcagaccugcgaccucaccgucggcuccggguacugcguggacuacagcaagaacggcgggagcggcuccgccaucaccacgggguaccgguucaccaacuucgagcccuucaccgugaacagcgucaacgacucccuggagcccgugggcggccuguacgagauccagauccccagcgaguucaccaucgggaacauggaggaguucauccagacguccagcccgaaggugaccaucgacugcgccgccuucgucugcggcgacuacgcggccugcaagucccagcucguggaguacgggagcuucugcgacaacaucaacgccauccugaccgaggugaacgagcugcucgacaccacgcagcugcaggucgccaacucccugaugaacggcgugacccucagcaccaagcugaaggacggggugaacuucaacgucgacgacaucaacuucuccagcgugcugggcugccucggcuccgagugcagcaaggccuccagccgcuccgcgaucgaggaccugcuguucgacaaggugaagcucagcgacgucggguucguggccgccuacaacaacugcaccggcggggccgagauccgcgaccugaucugcgugcaguccuacaagggcaucaagguccugccgccccuccugagcgagaaccagaucagcggguacacgcuggccgcgaccuccgccagccucuucccgcccuggaccgccgccgcgggcgugcccuucuaccugaacgugcaguaccggaucaacggccugggggucaccauggacgugcucucccagaaccagaagcugaucgccaacgccuucaacaacgcccuggacgccauccaggagggcuucgacgcgacgaacagcgcccucgugaagauccaggccgucgugaacgccaacgccgaggcgcugaacaaccugcuccagcagcuguccaaccgcuucggggccaucagcuccagccugcaggagauccucucccggcuggacccgcccgaggccgaggcccagaucgaccgccugaucaacggccggcucaccgcccugaacgcguacgugagccagcagcuguccgacagcacccucgucaaguucuccgccgcccaggccauggagaaggugaacgagugcgucaagagccaguccagccgcaucaacuucugcggcaacgggaaccacaucaucucccuggugcagaacgcgcccuacggccuguacuucauccacuucagcuacgugcccaccaaguacgucacggccaaggugucccccgggcucugcaucgccggcgaccgggggaucgcccccaagagcggcuacuucgugaacgucaacaacaccuggauguacaccggcagcggguacuacuaccccgagcccaucaccgagaacaacgugguggucaugagcacgugcgccgugaacuacaccaaggcgcccuacgugaugcugaacaccuccacccccaaccugccggacuuccgcgaggagcucgaccagugguucaagaaccagaccuccgucgcccccgaccugagccuggacuacaucaacgugacguuccucgaccuccagguggagaugaaccggcugcaggaggccaucaagguccucaacggcggguacauccccgaggccccgcgcgacggccaggccuacgugcggaaggacggggagugggugcugcuguccaccuucugaggacuagucccuguucccagagcccacuuuuuuuucuuuuuuugaaauaaaauagccugucuuucagaucucaaaggcucuuuucagagccaccaaaaaaaaaaaaaaaaaaaaaaaaaaaaaaaaaaaaaaaaaaaaaaaaaaaaaaaaaaaaaaaaaaaaaaaaaaaaaaaaaaaaaaaaaaaaaaaaaaaaa

SEQ ID NO: 15054 - RNA, 4328 nt, Artificial Sequence
  HCoV/HKU1/N5__Q0ZME7.1 spike protein mRNA gc (1-1351)
aggagagucccgcagucggcguccagcggcucugcuuguucgugugugugucguugcaggccuuauucaagcuuaccauguuccugaucaucuucauccuccccaccacccuggccgugaucggcgacuucaacugcacgaacagcuucaucaacgacuacaacaagaccaucccgcgcaucuccgaggacgucguggacgugagccuggggcucggcaccuacuacguccugaaccggguguaccugaacaccacgcuccuguucaccggguacuuccccaaguccggcgccaacuuccgcgaccuggcgcucaaggggagcaucuaccuguccacccugugguacaagccgcccuuccucagcgacuucaacaacggcaucuucuccaaggugaagaacaccaagcuguacgucaacaacacgcuguacagcgaguucuccaccaucgugaucggcagcguguucgucaacaccuccuacaccaucguggugcagccccacaacgggauccucgagaucacggccugccaguacaccaugugcgaguacccccacaccgucugcaagagcaagggcuccauccggaacgagagcuggcacaucgacuccagcgagccccugugccuguucaagaagaacuucaccuacaacguguccgccgacuggcucuacuuccacuucuaccaggagcgcgggguguucuacgccuacuacgccgacgucggcaugcccacgaccuuccuguucagccuguaccucgggaccauccugucccacuacuacgugaugccgcugaccugcaacgcgaucagcagcaacacggacaacgagacccucgaguacugggugacgccccugucccggcgccaguaccugcucaacuucgacgagcacggcgucaucaccaacgccguggacugcagcuccagcuuccuguccgagauccagugcaagacccagagcuucgcccccaacaccggcguguacgaccuguccggguucaccgucaagcccguggccaccguguaccggcgcaucccgaaccuccccgacugcgacaucgacaacuggcugaacaacgucagcgugcccagcccccugaacugggagcggcgcaucuucuccaacugcaacuucaaccucuccacgcugcugcggcucguccacguggacagcuucuccugcaacaaccuggacaagagcaagaucuucggcuccugcuucaacagcaucaccguggacaaguucgcgaucccgaaccgccggcgcgacgaccugcagcucggguccagcggcuuccugcaguccagcaacuacaagaucgacaucagcuccagcuccugccagcuguacuacagccucccccuggucaacgugaccaucaacaacuucaaccccuccagcuggaaccggcgcuacggcuucggguccuucaaccugagcuccuacgacguggucuacagcgaccacugcuucuccgugaacagcgacuucugccccugcgccgacccguccguggucaacagcugcgccaaguccaagccgcccagcgccaucugccccgccggcaccaaguaccggcacugcgaccucgacacgacccuguacgugaagaacuggugccgcugcuccugccugcccgaccccaucagcaccuacagccccaacacgugcccccagaagaagguggucguggggaucggcgagcacugcccggggcugggcaucaacgaggagaagugcggcacccagcucaaccacuccagcugcuucugcucccccgacgcguuccugggguggagcuucgacuccugcaucagcaacaaccggugcaacaucuucuccaacuucaucuucaacggcaucaacagcgggacgaccugcuccaacgaccugcucuacagcaacaccgagaucuccaccggcgugugcgucaacuacgaccuguacgggaucaccggccagggcaucuucaaggaggugagcgccgccuacuacaacaacuggcagaaccugcucuacgacuccaacgggaacaucaucggcuucaaggacuuccugaccaacaagaccuacaccauccugcccugcuacagcgggcgcguguccgccgccuucuaccagaacagcuccagcccggcgcuccuguaccggaaccugaagugcuccuacguccucaacaacaucagcuucaucagccagcccuucuacuucgacuccuaccugggcugcgugcugaacgccgugaaccucacgagcuacuccgucagcuccugcgaccugcgcauggggagcggcuucugcaucgacuacgcccugcccuccagccgccggaagcgccggggcaucuccagccccuaccgcuucgugaccuucgagccguucaacguguccuucgucaacgacagcguggagaccgucgggggccucuucgagauccagauccccaccaacuucacgaucgccgggcacgaggaguucauccagaccuccagccccaaggugaccaucgacugcuccgccuucgugugcagcaacuacgcggccugccacgaccugcuguccgaguacggcaccuucugcgacaacaucaacagcauccucaacgaggugaacgaccugcuggacaucacgcagcuccaggucgccaacgcccugaugcagggcgugacccuguccagcaaccucaacaccaaccugcacagcgacguggacaacaucgacuucaagucccugcucgggugccugggcagccagugcggguccagcucccggagccugcucgaggaccugcuguucaacaaggucaagcucuccgacgugggcuucguggaggccuacaacaacugcaccgggggcagcgagauccgcgaccugcugugcguccaguccuucaacggcaucaaggugcugcccccgauccucagcgagacgcagaucuccggguacaccaccgcggccaccguggccgccauguucccgcccuggagcgcggccgccggcguccccuucucccugaacgugcaguaccggaucaacgggcucggcgugacgauggacguccugaacaagaaccagaagcugaucgccaacgccuucaacaaggcgcuccugagcauccagaacggguucaccgccaccaacuccgcccuggccaagauccagagcguggugaacgccaacgcgcaggcccucaacucccugcugcagcagcuguucaacaaguucggcgccaucagcuccagccuccaggagauccugagccgccucgacaaccuggaggcccagguccagaucgaccggcugaucaacggccgccucaccgcccugaacgcguacgugucccagcagcugagcgacaucacgcucaucaaggccggggccucccgggccaucgagaaggugaacgagugcgucaagagccagagcccccgcaucaacuucugcggcaacgggaaccacauccugucccuggugcagaacgcgcccuacggccuccuguucauccacuucuccuacaagcccaccagcuucaagaccgugcuggucucccccgggcucugccugagcggcgaccggggcaucgccccgaagcagggguacuucaucaagcagaacgacuccuggauguucaccggcagcuccuacuacuaccccgagcccaucagcgacaagaacguggucuucaugaacuccugcagcgugaacuucacgaaggcccccuucaucuaccugaacaacuccaucccgaaccucagcgacuucgaggccgagcugucccugugguucaagaaccacaccagcaucgcccccaaccucaccuucaacagccacaucaacgcgaccuuccuggaccuguacuacgagaugaacgugauccaggaguccaucaagagccucaacuccagcuucaucaaccugaaggagaucgggacguacgagauguacgucaaguggcccugguacaucuggcugcucaucgugauccuguucaucaucuuccugaugauccucuucuucaucugcugcugcaccggcugcggguccgccugcuucagcaagugccacaacugcugcgacgaguacggcggccacaacgacuucgugaucaaggccucccacgacgacugaggacuagucccuguucccagagcccacuuuuuuuucuuuuuuugaaauaaaauagccugucuuucagaucucaaaggcucuuuucagagccaccaaaaaaaaaaaaaaaaaaaaaaaaaaaaaaaaaaaaaaaaaaaaaaaaaaaaaaaaaaaaaaaaaaaaaaaaaaaaaaaaaaaaaaaaaaaaaaaaaaaaa

SEQ ID NO: 15055 - RNA, 4328 nt, Artificial Sequence
  HCoV/HKU1/N5__Q0ZME7.1 spike protein mRNA gc (1-1351)(N1067P_L1068P)
aggagagucccgcagucggcguccagcggcucugcuuguucgugugugugucguugcaggccuuauucaagcuuaccauguuccugaucaucuucauccuccccaccacccuggccgugaucggcgacuucaacugcacgaacagcuucaucaacgacuacaacaagaccaucccgcgcaucuccgaggacgucguggacgugagccuggggcucggcaccuacuacguccugaaccggguguaccugaacaccacgcuccuguucaccggguacuuccccaaguccggcgccaacuuccgcgaccuggcgcucaaggggagcaucuaccuguccacccugugguacaagccgcccuuccucagcgacuucaacaacggcaucuucuccaaggugaagaacaccaagcuguacgucaacaacacgcuguacagcgaguucuccaccaucgugaucggcagcguguucgucaacaccuccuacaccaucguggugcagccccacaacgggauccucgagaucacggccugccaguacaccaugugcgaguacccccacaccgucugcaagagcaagggcuccauccggaacgagagcuggcacaucgacuccagcgagccccugugccuguucaagaagaacuucaccuacaacguguccgccgacuggcucuacuuccacuucuaccaggagcgcgggguguucuacgccuacuacgccgacgucggcaugcccacgaccuuccuguucagccuguaccucgggaccauccugucccacuacuacgugaugccgcugaccugcaacgcgaucagcagcaacacggacaacgagacccucgaguacugggugacgccccugucccggcgccaguaccugcucaacuucgacgagcacggcgucaucaccaacgccguggacugcagcuccagcuuccuguccgagauccagugcaagacccagagcuucgcccccaacaccggcguguacgaccuguccggguucaccgucaagcccguggccaccguguaccggcgcaucccgaaccuccccgacugcgacaucgacaacuggcugaacaacgucagcgugcccagcccccugaacugggagcggcgcaucuucuccaacugcaacuucaaccucuccacgcugcugcggcucguccacguggacagcuucuccugcaacaaccuggacaagagcaagaucuucggcuccugcuucaacagcaucaccguggacaaguucgcgaucccgaaccgccggcgcgacgaccugcagcucggguccagcggcuuccugcaguccagcaacuacaagaucgacaucagcuccagcuccugccagcuguacuacagccucccccuggucaacgugaccaucaacaacuucaaccccuccagcuggaaccggcgcuacggcuucggguccuucaaccugagcuccuacgacguggucuacagcgaccacugcuucuccgugaacagcgacuucugccccugcgccgacccguccguggucaacagcugcgccaaguccaagccgcccagcgccaucugccccgccggcaccaaguaccggcacugcgaccucgacacgacccuguacgugaagaacuggugccgcugcuccugccugcccgaccccaucagcaccuacagccccaacacgugcccccagaagaagguggucguggggaucggcgagcacugcccggggcugggcaucaacgaggagaagugcggcacccagcucaaccacuccagcugcuucugcucccccgacgcguuccugggguggagcuucgacuccugcaucagcaacaaccggugcaacaucuucuccaacuucaucuucaacggcaucaacagcgggacgaccugcuccaacgaccugcucuacagcaacaccgagaucuccaccggcgugugcgucaacuacgaccuguacgggaucaccggccagggcaucuucaaggaggugagcgccgccuacuacaacaacuggcagaaccugcucuacgacuccaacgggaacaucaucggcuucaaggacuuccugaccaacaagaccuacaccauccugcccugcuacagcgggcgcguguccgccgccuucuaccagaacagcuccagcccggcgcuccuguaccggaaccugaagugcuccuacguccucaacaacaucagcuucaucagccagcccuucuacuucgacuccuaccugggcugcgugcugaacgccgugaaccucacgagcuacuccgucagcuccugcgaccugcgcauggggagcggcuucugcaucgacuacgcccugcccuccagccgccggaagcgccggggcaucuccagccccuaccgcuucgugaccuucgagccguucaacguguccuucgucaacgacagcguggagaccgucgggggccucuucgagauccagauccccaccaacuucacgaucgccgggcacgaggaguucauccagaccuccagccccaaggugaccaucgacugcuccgccuucgugugcagcaacuacgcggccugccacgaccugcuguccgaguacggcaccuucugcgacaacaucaacagcauccucaacgaggugaacgaccugcuggacaucacgcagcuccaggucgccaacgcccugaugcagggcgugacccuguccagcaaccucaacaccaaccugcacagcgacguggacaacaucgacuucaagucccugcucgggugccugggcagccagugcggguccagcucccggagccugcucgaggaccugcuguucaacaaggucaagcucuccgacgugggcuucguggaggccuacaacaacugcaccgggggcagcgagauccgcgaccugcugugcguccaguccuucaacggcaucaaggugcugcccccgauccugagcgagacgcagaucuccggguacaccaccgcggccaccguggccgccauguucccgcccuggagcgcggccgccggcguccccuucucccugaacgugcaguaccggaucaacgggcucggcgugacgauggacguccugaacaagaaccagaagcugaucgccaacgccuucaacaaggcgcuccugagcauccagaacggguucaccgccaccaacuccgcccuggccaagauccagagcguggugaacgccaacgcgcaggcccucaacucccugcugcagcagcuguucaacaaguucggcgccaucagcuccagccuccaggagauccugagccgccucgacccgcccgaggcccagguccagaucgaccggcugaucaacggccgccugaccgcccucaacgcguacgugucccagcagcugagcgacaucacgcugaucaaggccggggccucccgggccaucgagaaggugaacgagugcgucaagagccagagcccccgcaucaacuucugcggcaacgggaaccacauccucucccuggugcagaacgcgcccuacggccuccucuucauccacuucuccuacaagcccaccagcuucaagaccgugcuggucucccccgggcugugccucagcggcgaccggggcaucgcccccaagcagggguacuucaucaagcagaacgacuccuggauguucaccggcagcuccuacuacuaccccgagccgaucagcgacaagaacguggucuucaugaacuccugcagcgugaacuucacgaaggcccccuucaucuaccugaacaacuccauccccaaccugagcgacuucgaggccgagcucucccugugguucaagaaccacaccagcaucgcccccaaccugaccuucaacagccacaucaacgcgaccuuccucgaccuguacuacgagaugaacgugauccaggaguccaucaagagccugaacuccagcuucaucaaccucaaggagaucgggacguacgagauguacgucaaguggccgugguacaucuggcugcugaucgugauccucuucaucaucuuccugaugauccuguucuucaucugcugcugcaccggcugcggguccgccugcuucagcaagugccacaacugcugcgacgaguacggcggccacaacgacuucgugaucaaggccucccacgacgacugaggacuagucccuguucccagagcccacuuuuuuuucuuuuuuugaaauaaaauagccugucuuucagaucucaaaggcucuuuucagagccaccaaaaaaaaaaaaaaaaaaaaaaaaaaaaaaaaaaaaaaaaaaaaaaaaaaaaaaaaaaaaaaaaaaaaaaaaaaaaaaaaaaaaaaaaaaaaaaaaaaaaa

SEQ ID NO: 15056 - RNA, 4103 nt, Artificial Sequence
  HCoV/HKU1/N5__Q0ZME7.1 spike protein mRNA gc (variant)
aggagagucccgcagucggcguccagcggcucugcuuguucgugugugugucguugcaggccuuauucaagcuuaccauguuccugaucaucuucauccuccccaccacccuggccgugaucggcgacuucaacugcacgaacagcuucaucaacgacuacaacaagaccaucccgcgcaucuccgaggacgucguggacgugagccuggggcucggcaccuacuacguccugaaccggguguaccugaacaccacgcuccuguucaccggguacuuccccaaguccggcgccaacuuccgcgaccuggcgcucaaggggagcaucuaccuguccacccugugguacaagccgcccuuccucagcgacuucaacaacggcaucuucuccaaggugaagaacaccaagcuguacgucaacaacacgcuguacagcgaguucuccaccaucgugaucggcagcguguucgucaacaccuccuacaccaucguggugcagccccacaacgggauccucgagaucacggccugccaguacaccaugugcgaguacccccacaccgucugcaagagcaagggcuccauccggaacgagagcuggcacaucgacuccagcgagccccugugccuguucaagaagaacuucaccuacaacguguccgccgacuggcucuacuuccacuucuaccaggagcgcgggguguucuacgccuacuacgccgacgucggcaugcccacgaccuuccuguucagccuguaccucgggaccauccugucccacuacuacgugaugccgcugaccugcaacgcgaucagcagcaacacggacaacgagacccucgaguacugggugacgccccugucccggcgccaguaccugcucaacuucgacgagcacggcgucaucaccaacgccguggacugcagcuccagcuuccuguccgagauccagugcaagacccagagcuucgcccccaacaccggcguguacgaccuguccggguucaccgucaagcccguggccaccguguaccggcgcaucccgaaccuccccgacugcgacaucgacaacuggcugaacaacgucagcgugcccagcccccugaacugggagcggcgcaucuucuccaacugcaacuucaaccucuccacgcugcugcggcucguccacguggacagcuucuccugcaacaaccuggacaagagcaagaucuucggcuccugcuucaacagcaucaccguggacaaguucgcgaucccgaaccgccggcgcgacgaccugcagcucggguccagcggcuuccugcaguccagcaacuacaagaucgacaucagcuccagcuccugccagcuguacuacagccucccccuggucaacgugaccaucaacaacuucaaccccuccagcuggaaccggcgcuacggcuucggguccuucaaccugagcuccuacgacguggucuacagcgaccacugcuucuccgugaacagcgacuucugccccugcgccgacccguccguggucaacagcugcgccaaguccaagccgcccagcgccaucugccccgccggcaccaaguaccggcacugcgaccucgacacgacccuguacgugaagaacuggugccgcugcuccugccugcccgaccccaucagcaccuacagccccaacacgugcccccagaagaagguggucguggggaucggcgagcacugcccggggcugggcaucaacgaggagaagugcggcacccagcucaaccacuccagcugcuucugcucccccgacgcguuccugggguggagcuucgacuccugcaucagcaacaaccggugcaacaucuucuccaacuucaucuucaacggcaucaacagcgggacgaccugcuccaacgaccugcucuacagcaacaccgagaucuccaccggcgugugcgucaacuacgaccuguacgggaucaccggccagggcaucuucaaggaggugagcgccgccuacuacaacaacuggcagaaccugcucuacgacuccaacgggaacaucaucggcuucaaggacuuccugaccaacaagaccuacaccauccugcccugcuacagcgggcgcguguccgccgccuucuaccagaacagcuccagcccggcgcuccuguaccggaaccugaagugcuccuacguccucaacaacaucagcuucaucagccagcccuucuacuucgacuccuaccugggcugcgugcugaacgccgugaaccucacgagcuacuccgucagcuccugcgaccugcgcauggggagcggcuucugcaucgacuacgcccugcccuccagcggcggguccggcagcgggaucuccagccccuaccgcuucgugaccuucgagccguucaacguguccuucgucaacgacagcguggagaccgugggcggccucuucgagauccagauccccaccaacuucacgaucgccgggcacgaggaguucauccagaccuccagccccaaggucaccaucgacugcuccgccuucgugugcagcaacuacgcggccugccacgaccugcuguccgaguacggcaccuucugcgacaacaucaacagcauccucaacgaggugaacgaccugcuggacaucacgcagcuccaggucgccaacgcccugaugcagggggugacccugagcuccaaccucaacaccaaccugcacagcgacguggacaacaucgacuucaagucccugcucggcugccuggggagccagugcggcuccagcucccggagccugcucgaggaccugcuguucaacaaggucaagcucuccgacgugggcuucguggaggccuacaacaacugcaccgggggcagcgagauccgcgaccugcugugcguccaguccuucaacgggaucaaggugcugcccccgauccugagcgagacgcagaucuccggcuacaccaccgcggccaccguggccgccauguucccgcccuggagcgcggccgccgggguccccuucucccugaacgugcaguaccggaucaacggccucggcgugacgauggacguccugaacaagaaccagaagcugaucgccaacgccuucaacaaggcgcuccugagcauccagaacggguucaccgccaccaacuccgcccuggccaagauccagagcguggugaacgccaacgcgcaggcccucaacucccugcugcagcagcuguucaacaaguucggcgccaucagcagcucccuccaggagauccugagccgccucgacccgcccgaggcccagguccagaucgaccggcugaucaacgggcgccugaccgcccucaacgcguacgugucccagcagcugagcgacaucacgcugaucaaggccggcgccucccgggccaucgagaaggugaacgagugcgucaagagccagagcccccgcaucaacuucugcgggaacggcaaccacauccucucccuggugcagaacgcgcccuacggccuccucuucauccacuucuccuacaagcccaccagcuucaagaccgugcuggucucccccgggcugugccucagcggcgaccgggggaucgcccccaagcagggcuacuucaucaagcagaacgacuccuggauguucaccgggagcuccuacuacuaccccgagccgaucagcgacaagaacguggucuucaugaacuccugcagcgugaacuucacgaaggcccccuucaucuaccugaacaacuccauccccaaccugagcgacuucgaggccgagcucagccugugguucaagaaccacaccuccaucgcccccaaccugaccuucaacagccacaucaacgcgaccuuccucgaccuguacuacgagaugaacgugauccaggaguccaucaagagccugaacugaggacuagucccuguucccagagcccacuuuuuuuucuuuuuuugaaauaaaauagccugucuuucagaucucaaaggcucuuuucagagccaccaaaaaaaaaaaaaaaaaaaaaaaaaaaaaaaaaaaaaaaaaaaaaaaaaaaaaaaaaaaaaaaaaaaaaaaaaaaaaaaaaaaaaaaaaaaaaaaaaaaaa

SEQ ID NO: 15057 - RNA, 4184 nt, Artificial Sequence
  HCoV/HKU1/N5__Q0ZME7.1 spike protein mRNA gc (variant)
aggagagucccgcagucggcguccagcggcucugcuuguucgugugugugucguugcaggccuuauucaagcuuaccauguuccugaucaucuucauccuccccaccacccuggccgugaucggcgacuucaacugcacgaacagcuucaucaacgacuacaacaagaccaucccgcgcaucuccgaggacgucguggacgugagccuggggcucggcaccuacuacguccugaaccggguguaccugaacaccacgcuccuguucaccggguacuuccccaaguccggcgccaacuuccgcgaccuggcccucaaggggagcaucuaccuguccacccugugguacaagccgcccuuccucagcgacuucaacaacggcaucuucuccaaggugaagaacaccaagcuguacgucaacaacacgcuguacagcgaguucuccaccaucgugaucggcagcguguucgucaacaccuccuacaccaucguggugcagccccacaacgggauccucgagaucacggccugccaguacaccaugugcgaguacccccacaccgucugcaagagcaagggcuccauccggaacgagagcuggcacaucgacuccagcgagccccugugccuguucaagaagaacuucaccuacaacguguccgccgacuggcucuacuuccacuucuaccaggagcgcgggguguucuacgccuacuacgccgacgucggcaugcccacgaccuuccuguucagccuguaccucgggaccauccugucccacuacuacgugaugccgcugaccugcaacgcgaucagcagcaacacggacaacgagacccucgaguacugggugacgccccugucccggcgccaguaccugcucaacuucgacgagcacggcgucaucaccaacgccguggacugcagcuccagcuuccuguccgagauccagugcaagacccagagcuucgcccccaacaccggcguguacgaccuguccggguucaccgucaagcccguggccaccguguaccggcgcaucccgaaccuccccgacugcgacaucgacaacuggcugaacaacgucagcgugcccagcccccugaacugggagcggcgcaucuucuccaacugcaacuucaaccucuccacgcugcugcggcucguccacguggacagcuucuccugcaacaaccuggacaagagcaagaucuucggcuccugcuucaacagcaucaccguggacaaguucgcgaucccgaaccgccggcgcgacgaccugcagcucggguccagcggcuuccugcaguccagcaacuacaagaucgacaucagcuccagcuccugccagcuguacuacagccucccccuggucaacgugaccaucaacaacuucaaccccuccagcuggaaccggcgcuacggcuucggguccuucaaccugagcuccuacgacguggucuacagcgaccacugcuucuccgugaacagcgacuucugccccugcgccgacccguccguggucaacagcugcgccaaguccaagccgcccagcgccaucugccccgccggcaccaaguaccggcacugcgaccucgacacgacccuguacgugaagaacuggugccgcugcuccugccugcccgaccccaucagcaccuacagccccaacacgugcccccagaagaagguggucguggggaucggcgagcacugcccggggcugggcaucaacgaggagaagugcggcacccagcucaaccacuccagcugcuucugcucccccgacgcguuccugggguggagcuucgacuccugcaucagcaacaaccggugcaacaucuucuccaacuucaucuucaacggcaucaacagcgggacgaccugcuccaacgaccugcucuacagcaacaccgagaucuccaccggcgugugcgucaacuacgaccuguacgggaucaccggccagggcaucuucaaggaggugagcgccgccuacuacaacaacuggcagaaccugcucuacgacuccaacgggaacaucaucggcuucaaggacuuccugaccaacaagaccuacaccauccugcccugcuacagcgggcgcguguccgccgccuucuaccagaacagcuccagcccggcgcuccuguaccggaaccugaagugcuccuacguccucaacaacaucagcuucaucagccagcccuucuacuucgacuccuaccugggcugcgugcugaacgccgugaaccucacgagcuacuccgucagcuccugcgaccugcgcauggggagcggcuucugcaucgacuacgcccugcccuccagcggcggguccggcagcgggaucuccagccccuaccgcuucgugaccuucgagccguucaacguguccuucgucaacgacagcguggagaccgugggcggccucuucgagauccagauccccaccaacuucacgaucgccgggcacgaggaguucauccagaccuccagccccaaggucaccaucgacugcuccgccuucgugugcagcaacuacgcggccugccacgaccugcuguccgaguacggcaccuucugcgacaacaucaacagcauccucaacgaggugaacgaccugcuggacaucacgcagcuccaggucgccaacgcccugaugcagggggugacccugagcuccaaccucaacaccaaccugcacagcgacguggacaacaucgacuucaagucccugcucggcugccuggggagccagugcggcuccagcucccggagccugcucgaggaccugcuguucaacaaggucaagcucuccgacgugggcuucguggaggccuacaacaacugcaccgggggcagcgagauccgcgaccugcugugcguccaguccuucaacgggaucaaggugcugcccccgauccugagcgagacgcagaucuccggcuacaccaccgcggccaccguggccgccauguucccgcccuggagcgcggccgccgggguccccuucucccugaacgugcaguaccggaucaacggccucggcgugacgauggacguccugaacaagaaccagaagcugaucgccaacgccuucaacaaggcgcuccugagcauccagaacggguucaccgccaccaacuccgcccuggccaagauccagagcguggugaacgccaacgcgcaggcccucaacucccugcugcagcagcuguucaacaaguucggcgccaucagcagcucccuccaggagauccugagccgccucgacccgcccgaggcccagguccagaucgaccggcugaucaacgggcgccugaccgcccucaacgcguacgugucccagcagcugagcgacaucacgcugaucaaggccggcgccucccgggccaucgagaaggugaacgagugcgucaagagccagagcccccgcaucaacuucugcgggaacggcaaccacauccucucccuggugcagaacgcgcccuacggccuccucuucauccacuucuccuacaagcccaccagcuucaagaccgugcuggucucccccgggcugugccucagcggcgaccgggggaucgcccccaagcagggcuacuucaucaagcagaacgacuccuggauguucaccgggagcuccuacuacuaccccgagccgaucagcgacaagaacguggucuucaugaacuccugcagcgugaacuucacgaaggcccccuucaucuaccugaacaacuccauccccaaccugagcgacuucgaggccgagcucagccugugguucaagaaccacaccuccaucgcccccaaccugaccuucaacagccacaucaacgcgaccuuccucgaccuguacuacgagaugaacgugauccaggaguccaucaagagccugaacggcggcuacaucccggaggcgccccgcgacgggcaggccuacguccggaaggacggcgagugggugcuccuguccacguucugaggacuagucccuguucccagagcccacuuuuuuuucuuuuuuugaaauaaaauagccugucuuucagaucucaaaggcucuuuucagagccaccaaaaaaaaaaaaaaaaaaaaaaaaaaaaaaaaaaaaaaaaaaaaaaaaaaaaaaaaaaaaaaaaaaaaaaaaaaaaaaaaaaaaaaaaaaaaaaaaaaaaa

SEQ ID NO: 15058 - RNA, 3788 nt, Artificial Sequence
  HCoV/229E/BN1/GER/2015__AOG74783.1 spike protein mRNA gc (1-1171)
aggagagucccgcagucggcguccagcggcucugcuuguucgugugugugucguugcaggccuuauucaagcuuaccauguucgugcugcucgucgccuacgcccugcugcacaucgcgggcugccagaccaccaacgggacgaacaccagccacuccgugugcaacggcugcguggggcacagcgagaacgucuucgccguggaguccggcggguacauccccagcaacuucgccuucaacaacugguuccuccugaccaacaccuccagcguggucgacggcguggugcgcuccuuccagccgcugcuccugaacugccuguggagcgucuccggcagccaguucacgaccggguucguguacuucaacggcaccgggcggggcgccugcaagggguucuacuccaacgccagcuccgacgugauccgcuacaacaucaacuucgaggagaaccuccggcgcggcaccauccuguucaagacgagcuacggcgcggucguguucuacugcaccaacaacacccugguguccggggacgcccacauccccagcggcaccguccucgggaacuucuacugcuucgugaacacgaccaucggcaacgagaccaccuccgccuucgugggcgcccugcccaagacgguccgggaguucgugaucagccgcaccgggcacuucuacaucaacggcuaccgguacuucucccugggggacguggaggcggucaacuucaacgugaccaacgccgccaccacggugugcaccgucgcccucgccagcuacgcggacgugcuggucaacgugagccagaccgccaucgccaacaucaucuacugcaacuccgugaucaaccgccugcggugcgaccagcucagcuucgacguccccgacggcuucuacuccaccagcccgauccagcccguggagcugcccguguccaucgucagccugcccguguaccacaagcacacguucaucgugcucuacgucaacuucgagcaccgccgggggccgggcaagugcuacaacugccgccccgccgugaucaacaucacccuggccaacuucaacgagaccaagggcccccugugcguggacaccucccacuucacgacccaguucgucgacaacgugaagcucgcgcgguggagcgccuccaucaacaccgggaacugccccuucagcuucggcaaggugaacaacuucgucaaguucggguccgugugcuucagccugaaggacaucccgggcgggugcgccaugcccaucauggccaaccuggugaacuccaagagccacaacaucggcucccucuacgucagcugguccgacggcgacgugaucaccggggugcccaagcccgucgagggcgugagcuccuucaugaacgugacgcugaacaagugcaccaaguacaacaucuacgacgucagcggggugggcgugauccgcaucagcaacgacaccuuccugaacgggaucaccuacacguccaccagcggcaaccuccugggcuucaaggacgucaccaacgggaccaucuacuccaucaccccgugcaacccgcccgaccagcuggugguguaccagcaggccgucgugggcgcgaugcucagcgagaacuucacguccuacggguucagcaacguggucgagaugcccaaguucuucuacgccuccaacggcaccuacaacugcaccgacgccgugcugaccuacagcuccuucggcgugugcgccgacgggagcaucaucgccguccagccccggaacguguccuacgacagcguguccgcgaucgucacggccaaccugagcauccccuucaacuggaccaccuccguccagguggaguaccuccagaucaccagcacgcccaucgugguggacugcuccaccuacgugugcaacggcaacguccgcugcguggagcugcugaagcaguacaccagcgccugcaagaccaucgaggacgcccuccggaacagcgcgaugcuggaguccgccgacgugagcgagaugcugacguucgacaagaaggccuucacccucgccaacgucuccagcuucggggacuacaaccuguccagcgugauccccucccugccgcgcagcggcucccggguggccgggcgcagcgcgaucgaggacauccucuucuccaagcuggucaccagcggccugggcaccguggacgccgacuacaagaagugcacgaaggggcuguccaucgccgaccucgccugcgcccaguacuacaacggcaucaugguccugcccgggguggcggacgccgagcggauggccauguacaccggcagccugaucgggggcaucgcccucggcgggcugaccuccgccgcgagcauccccuucucccuggccauccagagccgccucaacuacguggcccugcagaccgacguccugcaggagaaccagcgcauccucgccgcguccuucaacaaggccaugacgaacaucguggacgccuucaccggcgugaacgacgccaucacccagaccagccaggcccugcagacggucgcgaccgcccugaacaagauccaggacguggugaaccagcaggggaacagccucaaccaccugaccucccagcugcggcagaacuuccaggccaucagcuccagcauccaggccaucuacgaccgccucgacaucauccaggccgaccagcaggucgaccggcugaucaccggccgccuggcggcccucaacguguucgugucccacacgcugaccaaguacaccgagguccgggccagccgccagcuggcccagcagaaggugaacgagugcgugaagucccagagcaagcgguacggguucugcggcaacggcacccacaucuucucccucgucaacgccgcgcccgaggggcugguguuccugcacacggugcuccugccgacccaguacaaggacgucgaggccuggagcggccugugcguggacgggaucaacggcuacgugcuccgccagcccaaccuggcccuguacaaggaggggaacuacuaccggaucaccucccgcaucauguucgagccccggaucccgaccaucgccgacuucguccagaucgagaacugcaacgugacguucgugaacaucagccgcuccgagcuccagaccaucguccccgaguacaucgacgugaacaagacccugcaggagcugagcuacaagcuccccaacuacaccgugcccgaccuggucguggagcaguacaaccagaccauccugaaccucacguccgagaucagcacccuggagaacaaguccgcggagcugaacuacaccgugcagaagcuccagacccugaucgacaacaucaacagcacgcuggucgaccucaaguggcugaaccggguggagaccuacaucaaguggccgugguggguguggcugugcaucuccgucgugcucaucuucguggucagcaugcugcugcucugcugcugcagcaccggcugcugcggcuucuucuccugcuucgccagcuccauccgcgggugcugcgagagcaccaagcugcccuacuacgacguggagaagauccacauccagugaggacuagucccuguucccagagcccacuuuuuuuucuuuuuuugaaauaaaauagccugucuuucagaucucaaaggcucuuuucagagccaccaaaaaaaaaaaaaaaaaaaaaaaaaaaaaaaaaaaaaaaaaaaaaaaaaaaaaaaaaaaaaaaaaaaaaaaaaaaaaaaaaaaaaaaaaaaaaaaaaaaaa

SEQ ID NO: 15059 - RNA, 3788 nt, Artificial Sequence
  HCoV/229E/BN1/GER/2015__AOG74783.1 spike protein mRNA gc (1-1171)(I869P_I870P)
aggagagucccgcagucggcguccagcggcucugcuuguucgugugugugucguugcaggccuuauucaagcuuaccauguucgugcugcucgucgccuacgcccugcugcacaucgcgggcugccagaccaccaacgggacgaacaccagccacuccgugugcaacggcugcguggggcacagcgagaacgucuucgccguggaguccggcggguacauccccagcaacuucgccuucaacaacugguuccuccugaccaacaccuccagcguggucgacggcguggugcgcuccuuccagccgcugcuccugaacugccuguggagcgucuccggcagccaguucacgaccggguucguguacuucaacggcaccgggcggggcgccugcaagggguucuacuccaacgccagcuccgacgugauccgcuacaacaucaacuucgaggagaaccuccggcgcggcaccauccuguucaagacgagcuacggcgcggucguguucuacugcaccaacaacacccugguguccggggacgcccacauccccagcggcaccguccucgggaacuucuacugcuucgugaacacgaccaucggcaacgagaccaccuccgccuucgugggcgcccugcccaagacgguccgggaguucgugaucagccgcaccgggcacuucuacaucaacggcuaccgguacuucucccugggggacguggaggcggucaacuucaacgugaccaacgccgccaccacggugugcaccgucgcccucgccagcuacgcggacgugcuggucaacgugagccagaccgccaucgccaacaucaucuacugcaacuccgugaucaaccgccugcggugcgaccagcucagcuucgacguccccgacggcuucuacuccaccagcccgauccagcccguggagcugcccguguccaucgucagccugcccguguaccacaagcacacguucaucgugcucuacgucaacuucgagcaccgccgggggccgggcaagugcuacaacugccgccccgccgugaucaacaucacccuggccaacuucaacgagaccaagggcccccugugcguggacaccucccacuucacgacccaguucgucgacaacgugaagcucgcgcgguggagcgccuccaucaacaccgggaacugccccuucagcuucggcaaggugaacaacuucgucaaguucggguccgugugcuucagccugaaggacaucccgggcgggugcgccaugcccaucauggccaaccuggugaacuccaagagccacaacaucggcucccucuacgucagcugguccgacggcgacgugaucaccggggugcccaagcccgucgagggcgugagcuccuucaugaacgugacgcugaacaagugcaccaaguacaacaucuacgacgucagcggggugggcgugauccgcaucagcaacgacaccuuccugaacgggaucaccuacacguccaccagcggcaaccuccugggcuucaaggacgucaccaacgggaccaucuacuccaucaccccgugcaacccgcccgaccagcuggugguguaccagcaggccgucgugggcgcgaugcucagcgagaacuucacguccuacggguucagcaacguggucgagaugcccaaguucuucuacgccuccaacggcaccuacaacugcaccgacgccgugcugaccuacagcuccuucggcgugugcgccgacgggagcaucaucgccguccagccccggaacguguccuacgacagcguguccgcgaucgucacggccaaccugagcauccccuucaacuggaccaccuccguccagguggaguaccuccagaucaccagcacgcccaucgugguggacugcuccaccuacgugugcaacggcaacguccgcugcguggagcugcugaagcaguacaccagcgccugcaagaccaucgaggacgcccuccggaacagcgcgaugcuggaguccgccgacgugagcgagaugcugacguucgacaagaaggccuucacccucgccaacgucuccagcuucggggacuacaaccuguccagcgugauccccucccugccgcgcagcggcucccggguggccgggcgcagcgcgaucgaggacauccucuucuccaagcuggucaccagcggccugggcaccguggacgccgacuacaagaagugcacgaaggggcuguccaucgccgaccucgccugcgcccaguacuacaacggcaucaugguccugcccgggguggcggacgccgagcggauggccauguacaccggcagccugaucgggggcaucgcccucggcgggcugaccuccgccgcgagcauccccuucucccuggccauccagagccgccucaacuacguggcccugcagaccgacguccugcaggagaaccagcgcauccucgccgcguccuucaacaaggccaugacgaacaucguggacgccuucaccggcgugaacgacgccaucacccagaccagccaggcccugcagacggucgcgaccgcccugaacaagauccaggacguggugaaccagcaggggaacagccucaaccaccugaccucccagcugcggcagaacuuccaggccaucagcuccagcauccaggccaucuacgaccgccucgacccgccccaggccgaccagcaggucgaccggcugaucaccggccgccuggcggcccucaacguguucgugucccacacgcugaccaaguacaccgagguccgggccagccgccagcuggcccagcagaaggugaacgagugcgugaagucccagagcaagcgguacggguucugcggcaacggcacccacaucuucucccucgucaacgccgcgcccgaggggcugguguuccugcacacggugcuccugcccacccaguacaaggacgucgaggccuggagcggccugugcguggacgggaucaacggcuacgugcuccgccagccgaaccuggcccuguacaaggaggggaacuacuaccggaucaccucccgcaucauguucgagccccggauccccaccaucgccgacuucguccagaucgagaacugcaacgugacguucgugaacaucagccgcuccgagcuccagaccaucguccccgaguacaucgacgugaacaagacccugcaggagcugagcuacaagcucccgaacuacaccgugcccgaccuggucguggagcaguacaaccagaccauccugaaccucacguccgagaucagcacccuggagaacaaguccgcggagcugaacuacaccgugcagaagcuccagacccugaucgacaacaucaacagcacgcuggucgaccucaaguggcugaaccggguggagaccuacaucaaguggcccugguggguguggcugugcaucuccgucgugcucaucuucguggucagcaugcugcugcucugcugcugcagcaccggcugcugcggcuucuucuccugcuucgccagcuccauccgcgggugcugcgagagcaccaagcugcccuacuacgacguggagaagauccacauccagugaggacuagucccuguucccagagcccacuuuuuuuucuuuuuuugaaauaaaauagccugucuuucagaucucaaaggcucuuuucagagccaccaaaaaaaaaaaaaaaaaaaaaaaaaaaaaaaaaaaaaaaaaaaaaaaaaaaaaaaaaaaaaaaaaaaaaaaaaaaaaaaaaaaaaaaaaaaaaaaaaaaaa

SEQ ID NO: 15060 - RNA, 3599 nt, Artificial Sequence
  HCoV/229E/BN1/GER/2015__AOG74783.1 spike protein mRNA gc (variant)
aggagagucccgcagucggcguccagcggcucugcuuguucgugugugugucguugcaggccuuauucaagcuuaccauguucgugcugcucgucgccuacgcccugcugcacaucgcgggcugccagaccaccaacgggacgaacaccagccacuccgugugcaacggcugcguggggcacagcgagaacgucuucgccguggaguccggcggguacauccccagcaacuucgccuucaacaacugguuccuccugaccaacaccuccagcguggucgacggcguggugcgcuccuuccagccgcugcuccugaacugccuguggagcgucuccggcagccaguucacgaccggguucguguacuucaacggcaccgggcggggcgccugcaagggguucuacuccaacgccagcuccgacgugauccgcuacaacaucaacuucgaggagaaccuccggcgcggcaccauccuguucaagacgagcuacggcgcggucguguucuacugcaccaacaacacccugguguccggggacgcccacauccccagcggcaccguccucgggaacuucuacugcuucgugaacacgaccaucggcaacgagaccaccuccgccuucgugggcgcccugcccaagacgguccgggaguucgugaucagccgcaccgggcacuucuacaucaacggcuaccgguacuucucccugggggacguggaggcggucaacuucaacgugaccaacgccgccaccacggugugcaccgucgcccucgccagcuacgcggacgugcuggucaacgugagccagaccgccaucgccaacaucaucuacugcaacuccgugaucaaccgccugcggugcgaccagcucagcuucgacguccccgacggcuucuacuccaccagcccgauccagcccguggagcugcccguguccaucgucagccugcccguguaccacaagcacacguucaucgugcucuacgucaacuucgagcaccgccgggggccgggcaagugcuacaacugccgccccgccgugaucaacaucacccuggccaacuucaacgagaccaagggcccccugugcguggacaccucccacuucacgacccaguucgucgacaacgugaagcucgcgcgguggagcgccuccaucaacaccgggaacugccccuucagcuucggcaaggugaacaacuucgucaaguucggguccgugugcuucagccugaaggacaucccgggcgggugcgccaugcccaucauggccaaccuggugaacuccaagagccacaacaucggcucccucuacgucagcugguccgacggcgacgugaucaccggggugcccaagcccgucgagggcgugagcuccuucaugaacgugacgcugaacaagugcaccaaguacaacaucuacgacgucagcggggugggcgugauccgcaucagcaacgacaccuuccugaacgggaucaccuacacguccaccagcggcaaccuccugggcuucaaggacgucaccaacgggaccaucuacuccaucaccccgugcaacccgcccgaccagcuggugguguaccagcaggccgucgugggcgcgaugcucagcgagaacuucacguccuacggguucagcaacguggucgagaugcccaaguucuucuacgccuccaacggcaccuacaacugcaccgacgccgugcugaccuacagcuccuucggcgugugcgccgacgggagcaucaucgccguccagccccggaacguguccuacgacagcguguccgcgaucgucacggccaaccugagcauccccuucaacuggaccaccuccguccagguggaguaccuccagaucaccagcacgcccaucgugguggacugcuccaccuacgugugcaacggcaacguccgcugcguggagcugcugaagcaguacaccagcgccugcaagaccaucgaggacgcccuccggaacagcgcgaugcuggaguccgccgacgugagcgagaugcugacguucgacaagaaggccuucacccucgccaacgucuccagcuucggggacuacaaccuguccagcgugauccccucccugccgcgcagcggcucccggguggccgggcgcagcgcgaucgaggacauccucuucuccaagcuggucaccagcggccugggcaccguggacgccgacuacaagaagugcacgaaggggcuguccaucgccgaccucgccugcgcccaguacuacaacggcaucaugguccugcccgggguggcggacgccgagcggauggccauguacaccggcagccugaucgggggcaucgcccucggcgggcugaccuccgccgcgagcauccccuucucccuggccauccagagccgccucaacuacguggcccugcagaccgacguccugcaggagaaccagcgcauccucgccgcguccuucaacaaggccaugacgaacaucguggacgccuucaccggcgugaacgacgccaucacccagaccagccaggcccugcagacggucgcgaccgcccugaacaagauccaggacguggugaaccagcaggggaacagccucaaccaccugaccucccagcugcggcagaacuuccaggccaucagcuccagcauccaggccaucuacgaccgccucgacccgccccaggccgaccagcaggucgaccggcugaucaccggccgccuggcggcccucaacguguucgugucccacacgcugaccaaguacaccgagguccgggccagccgccagcuggcccagcagaaggugaacgagugcgugaagucccagagcaagcgguacggguucugcggcaacggcacccacaucuucucccucgucaacgccgcgcccgaggggcugguguuccugcacacggugcuccugcccacccaguacaaggacgucgaggccuggagcggccugugcguggacgggaucaacggcuacgugcuccgccagccgaaccuggcccuguacaaggaggggaacuacuaccggaucaccucccgcaucauguucgagccccggauccccaccaucgccgacuucguccagaucgagaacugcaacgugacguucgugaacaucagccgcuccgagcuccagaccaucguccccgaguacaucgacgugaacaagacccugcaggagcugagcuacaagcucccgaacuacaccgugcccgaccuggucguggagcaguacaaccagaccauccugaaccucacguccgagaucagcacccuggagaacaaguccgcggagcugaacuacaccgugcagaagcuccagacccugaucgacaacaucaacagcacgcuggucgaccucaaguggcugaaccggguggagaccugaggacuagucccuguucccagagcccacuuuuuuuucuuuuuuugaaauaaaauagccugucuuucagaucucaaaggcucuuuucagagccaccaaaaaaaaaaaaaaaaaaaaaaaaaaaaaaaaaaaaaaaaaaaaaaaaaaaaaaaaaaaaaaaaaaaaaaaaaaaaaaaaaaaaaaaaaaaaaaaaaaaaa

SEQ ID NO: 15061 - RNA, 3680 nt, Artificial Sequence
  HCoV/229E/BN1/GER/2015__AOG74783.1 spike protein mRNA gc (variant)
aggagagucccgcagucggcguccagcggcucugcuuguucgugugugugucguugcaggccuuauucaagcuuaccauguucgugcugcucgucgccuacgcccugcugcacaucgccggcugccagaccaccaacgggacgaacaccagccacuccgugugcaacggcugcguggggcacagcgagaacgucuucgccguggaguccggcggguacauccccagcaacuucgccuucaacaacugguuccuccugaccaacaccuccagcguggucgacggcguggugcgcuccuuccagccgcugcuccugaacugccuguggagcgucuccggcagccaguucacgaccggguucguguacuucaacggcaccgggcggggcgccugcaagggguucuacuccaacgccagcuccgacgugauccgcuacaacaucaacuucgaggagaaccuccggcgcggcaccauccuguucaagacgagcuacggcgcggucguguucuacugcaccaacaacacccugguguccggggacgcccacauccccagcggcaccguccucgggaacuucuacugcuucgugaacacgaccaucggcaacgagaccaccuccgccuucgugggcgcccugcccaagacgguccgggaguucgugaucagccgcaccgggcacuucuacaucaacggcuaccgguacuucucccugggggacguggaggcggucaacuucaacgugaccaacgccgccaccacggugugcaccgucgcccucgccagcuacgcggacgugcuggucaacgugagccagaccgccaucgccaacaucaucuacugcaacuccgugaucaaccgccugcggugcgaccagcucagcuucgacguccccgacggcuucuacuccaccagcccgauccagcccguggagcugcccguguccaucgucagccugcccguguaccacaagcacacguucaucgugcucuacgucaacuucgagcaccgccgggggccgggcaagugcuacaacugccgccccgccgugaucaacaucacccuggccaacuucaacgagaccaagggcccccugugcguggacaccucccacuucacgacccaguucgucgacaacgugaagcucgcgcgguggagcgccuccaucaacaccgggaacugccccuucagcuucggcaaggugaacaacuucgucaaguucggguccgugugcuucagccugaaggacaucccgggcgggugcgccaugcccaucauggccaaccuggugaacuccaagagccacaacaucggcucccucuacgucagcugguccgacggcgacgugaucaccggggugcccaagcccgucgagggcgugagcuccuucaugaacgugacgcugaacaagugcaccaaguacaacaucuacgacgucagcggggugggcgugauccgcaucagcaacgacaccuuccugaacgggaucaccuacacguccaccagcggcaaccuccugggcuucaaggacgucaccaacgggaccaucuacuccaucaccccgugcaacccgcccgaccagcuggugguguaccagcaggccgucgugggcgcgaugcucagcgagaacuucacguccuacggguucagcaacguggucgagaugcccaaguucuucuacgccuccaacggcaccuacaacugcaccgacgccgugcugaccuacagcuccuucggcgugugcgccgacgggagcaucaucgccguccagccccggaacguguccuacgacagcguguccgcgaucgucacggccaaccugagcauccccuucaacuggaccaccuccguccagguggaguaccuccagaucaccagcacgcccaucgugguggacugcuccaccuacgugugcaacggcaacguccgcugcguggagcugcugaagcaguacaccagcgccugcaagaccaucgaggacgcccuccggaacagcgcgaugcuggaguccgccgacgugagcgagaugcugacguucgacaagaaggccuucacccucgccaacgucuccagcuucggggacuacaaccuguccagcgugauccccucccugccgcgcagcggcucccggguggccgggcgcagcgcgaucgaggacauccucuucuccaagcuggucaccagcggccugggcaccguggacgccgacuacaagaagugcacgaaggggcuguccaucgccgaccucgccugcgcccaguacuacaacggcaucaugguccugcccgggguggcggacgccgagcggauggccauguacaccggcagccugaucgggggcaucgcccucggcgggcugaccuccgccgcgagcauccccuucucccuggccauccagagccgccucaacuacguggcccugcagaccgacguccugcaggagaaccagcgcauccucgccgcguccuucaacaaggccaugacgaacaucguggacgccuucaccggcgugaacgacgccaucacccagaccagccaggcccugcagacggucgcgaccgcccugaacaagauccaggacguggugaaccagcaggggaacagccucaaccaccugaccucccagcugcggcagaacuuccaggccaucagcuccagcauccaggccaucuacgaccgccucgacccgccccaggccgaccagcaggucgaccggcugaucaccggccgccuggcggcccucaacguguucgugucccacacgcugaccaaguacaccgagguccgggccagccgccagcuggcccagcagaaggugaacgagugcgugaagucccagagcaagcgguacggguucugcggcaacggcacccacaucuucucccucgucaacgccgcgcccgaggggcugguguuccugcacacggugcuccugcccacccaguacaaggacgucgaggccuggagcggccugugcguggacgggaucaacggcuacgugcuccgccagccgaaccuggcccuguacaaggaggggaacuacuaccggaucaccucccgcaucauguucgagccccggauccccaccaucgccgacuucguccagaucgagaacugcaacgugacguucgugaacaucagccgcuccgagcuccagaccaucguccccgaguacaucgacgugaacaagacccugcaggagcugagcuacaagcucccgaacuacaccgugcccgaccuggucguggagcaguacaaccagaccauccugaaccucacguccgagaucagcacccuggagaacaaguccgcggagcugaacuacaccgugcagaagcuccagacccugaucgacaacaucaacagcacgcuggucgaccucaaguggcugaaccggguggagaccggcggcuacauccccgaggcgccccgcgacgggcaggccuacgugcggaaggacggcgaguggguccugcucuccaccuucugaggacuagucccuguucccagagcccacuuuuuuuucuuuuuuugaaauaaaauagccugucuuucagaucucaaaggcucuuuucagagccaccaaaaaaaaaaaaaaaaaaaaaaaaaaaaaaaaaaaaaaaaaaaaaaaaaaaaaaaaaaaaaaaaaaaaaaaaaaaaaaaaaaaaaaaaaaaaaaaaaaaaa

SEQ ID NO: 15062 - RNA, 4343 nt, Artificial Sequence
  HCoV/NL63/RPTEC/2004__AFV53148.1 spike protein mRNA gc (1-1356)
aggagagucccgcagucggcguccagcggcucugcuuguucgugugugugucguugcaggccuuauucaagcuuaccaugaagcuguuccucauccugcuggugcucccccuggccagcugcuucuucacgugcaacuccaacgccaaccugagcaugcuccagcugggcgucccggacaacuccagcaccaucgugaccgggcugcuccccacccacugguucugcgcgaaccaguccaccagcguguacuccgccaacggcuucuucuacaucgacgucgggaaccaccgcagcgccuucgcccugcacaccggcuacuacgacgccaaccaguacuacaucuacgugacgaacgagaucgggcugaacgcguccgugacccucaagaucugcaaguucagccggaacaccaccuucgacuuccuguccaacgccagcuccagcuucgacugcaucgucaaccuccucuucacggagcagcugggcgcgccccugggcaucaccaucuccggggagaccgugcgccuccaccuguacaacgugacccggacguucuacguccccgccgccuacaagcugaccaagcucagcgugaagugcuacuucaacuacuccugcguguucagcgucgugaacgccaccgugaccgucaacgugacgacccacaacggccgcguggucaacuacaccgugugcgacgacugcaacggguacaccgacaacaucuucuccgugcagcaggacggccggaucccgaacggguuccccuucaacaacugguuccugcugacgaacggcagcacccucgucgacggcgugagccgccuguaccagccccugcggcugaccugccuguggcccgugccggggcugaaguccagcaccggcuucgucuacuucaacgccacgggguccgacgugaacugcaacggcuaccagcacaacagcgucguggacgugaugcgcuacaaccucaacuucuccgccaacagccuggacaaccugaaguccggcgucaucguguucaagacccuccaguacgacgugcuguucuacugcagcaacuccagcuccgggguccuggacaccaccauccccuucggccccagcucccagcccuacuacugcuucaucaacagcacgaucaacaccacccacguguccaccuucguggggauccucccgcccacgguccgggagaucgugguggcccgcaccggccaguucuacaucaacggguucaaguacuucgaccugggcuucaucgaggcggucaacuucaacgugaccaccgccagcgccacggacuucuggaccguggccuucgccaccuucgucgacgugcuggugaacgucuccgcgaccaacauccagaaccuccuguacugcgacagccccuucgagaagcugcagugcgagcaccuccaguucggccugcaggacggguucuacuccgccaacuuccuggacgacaacgugcuccccgagaccuacguggcccugccgaucuacuaccagcacacggacaucaacuucaccgccaccgccagcuucggcgggagcugcuacgucugcaagccccaccaggugaacaucucccugaacggcaacaccagcgugugcguccggacgucccacuucagcauccgcuacaucuacaaccgggugaaguccgggagccccggcgacuccagcuggcacaucuaccugaaguccgggaccugccccuucagcuucuccaagcucaacaacuuccagaaguucaagaccaucugcuucagcaccguggaggucccgggguccugcaacuucccccuggaggcgacguggcacuacaccagcuacaccaucgugggcgcccuguacgugaccugguccgaggggaacagcaucacgggcguccccuaccccguguccgggauccgcgaguucagcaaccucgugcugaacaacugcaccaaguacaacaucuacgacuacgucggcaccggcaucauccggagcuccaaccagagccuggccgggggcaucaccuacguguccaacagcgggaaccuccugggcuucaagaacguguccacgggcaacaucuucaucgucaccccgugcaaccagcccgaccagguggccguguaccagcagagcaucaucggggccaugaccgcggucaacgagucccgcuacggccugcagaaccuccugcagcugcccaacuucuacuacgugagcaacgggggcaacaacugcaccacggccgugaugaccuacuccaacuucgggaucugcgccgacggcagccucauccccguccggccgcgcaacuccagcgacaacggcaucuccgccaucaucaccgcgaaccugagcauccccuccaacuggaccacgagcguccagguggaguaccugcagaucaccuccacccccaucgugguggacugcgccaccuacgugugcaacgggaacccgcggugcaagaaccuccugaagcaguacacgagcgccugcaagaccaucgaggacgcccugcgccucuccgcccaccuggagaccaacgacgucagcagcaugcugaccuucgacuccaacgcguucagccucgccaacgugacguccuucggcgacuacaaccugagcuccgugcugccccagcggaacauccgcagcucccgcaucgccgggcggagcgcccucgaggaccugcuguucuccaaggucgugaccagcggccucgggaccgucgacguggacuacaaguccugcaccaagggccugagcaucgccgaccuggcgugcgcccaguacuacaacggcaucauggugcuccccggggucgccgacgccgagcgcauggccauguacacgggcucccugaucgggggcauggugcugggcggccucaccagcgcggccgccauccccuucucccuggcccugcaggcgcggcucaacuacguggcccugcagaccgacguccugcaggagaaccagaagauccucgccgccagcuucaacaaggccaucaacaacaucguggcguccuucagcuccgugaacgacgccaucacccagaccgccgaggccauccacacggucaccaucgcccugaacaagauccaggacguggugaaccagcagggcagcgcgcugaaccaccucaccagccagcugcgccacaacuuccaggccaucuccaacagcauccaggccaucuacgaccggcuggacuccauccaggccgaccagcaggucgaccgccucaucaccgggcggcuggccgcgcugaacgccuucgugagccaggugcucaacaaguacacggagguccgcggcucccggcgccuggcccagcagaagaucaacgagugcgucaagagccaguccaaccgguacggguucugcggcaacgggacccacaucuucagcaucgugaacuccgccccggacggccuccuguuccugcacaccgugcugcuccccaccgacuacaagaacgugaaggcguggagcggcaucugcguggacgggaucuacggcuacguccugcgccagcccaaccuggugcucuacuccgacaacgggguguuccgggucacgagccgcaucauguuccagccccggcugccggugcuguccgacuucgugcagaucuacaacugcaacgucaccuucgugaacaucagccgcguggagcuccacaccgucauccccgacuacguggacgugaacaagacccugcaggaguucgcccagaaccugcccaaguacgucaagcccaacuucgaccucacgccguucaaccugaccuaccugaaccucuccagcgagcugaagcagcuggaggccaagaccgccucccucuuccagaccacgguggagcugcagggccugaucgaccagaucaacagcaccuacguggaccucaagcugcugaaccgguucgagaacuacaucaaguggcccuggugggucuggcucaucaucuccgugguguucgucgugcugcugagccuccugguguucugcugccugagcaccggcugcugcgggugcugcaacugccucaccuccagcaugcgcggcugcugcgacugcggguccacgaagcugcccuacuacgaguucgagaagguccacgugcagugaggacuagucccuguucccagagcccacuuuuuuuucuuuuuuugaaauaaaauagccugucuuucagaucucaaaggcucuuuucagagccaccaaaaaaaaaaaaaaaaaaaaaaaaaaaaaaaaaaaaaaaaaaaaaaaaaaaaaaaaaaaaaaaaaaaaaaaaaaaaaaaaaaaaaaaaaaaaaaaaaaaaa

SEQ ID NO: 15063 - RNA, 4343 nt, Artificial Sequence
  HCoV/NL63/RPTEC/2004__AFV53148.1 spike protein mRNA gc (1-1356)(S1052P_I1053P)
aggagagucccgcagucggcguccagcggcucugcuuguucgugugugugucguugcaggccuuauucaagcuuaccaugaagcuguuccucauccugcuggugcucccccuggccagcugcuucuucacgugcaacuccaacgccaaccugagcaugcuccagcugggcgucccggacaacuccagcaccaucgugaccgggcugcuccccacccacugguucugcgcgaaccaguccaccagcguguacuccgccaacggcuucuucuacaucgacgucgggaaccaccgcagcgccuucgcccugcacaccggcuacuacgacgccaaccaguacuacaucuacgugacgaacgagaucgggcugaacgcguccgugacccucaagaucugcaaguucagccggaacaccaccuucgacuuccuguccaacgccagcuccagcuucgacugcaucgucaaccuccucuucacggagcagcugggcgcgccccugggcaucaccaucuccggggagaccgugcgccuccaccuguacaacgugacccggacguucuacguccccgccgccuacaagcugaccaagcucagcgugaagugcuacuucaacuacuccugcguguucagcgucgugaacgccaccgugaccgucaacgugacgacccacaacggccgcguggucaacuacaccgugugcgacgacugcaacggguacaccgacaacaucuucuccgugcagcaggacggccggaucccgaacggguuccccuucaacaacugguuccugcugacgaacggcagcacccucgucgacggcgugagccgccuguaccagccccugcggcugaccugccuguggcccgugccggggcugaaguccagcaccggcuucgucuacuucaacgccacgggguccgacgugaacugcaacggcuaccagcacaacagcgucguggacgugaugcgcuacaaccucaacuucuccgccaacagccuggacaaccugaaguccggcgucaucguguucaagacccuccaguacgacgugcuguucuacugcagcaacuccagcuccgggguccuggacaccaccauccccuucggccccagcucccagcccuacuacugcuucaucaacagcacgaucaacaccacccacguguccaccuucguggggauccucccgcccacgguccgggagaucgugguggcccgcaccggccaguucuacaucaacggguucaaguacuucgaccugggcuucaucgaggcggucaacuucaacgugaccaccgccagcgccacggacuucuggaccguggccuucgccaccuucgucgacgugcuggugaacgucuccgcgaccaacauccagaaccuccuguacugcgacagccccuucgagaagcugcagugcgagcaccuccaguucggccugcaggacggguucuacuccgccaacuuccuggacgacaacgugcuccccgagaccuacguggcccugccgaucuacuaccagcacacggacaucaacuucaccgccaccgccagcuucggcgggagcugcuacgucugcaagccccaccaggugaacaucucccugaacggcaacaccagcgugugcguccggacgucccacuucagcauccgcuacaucuacaaccgggugaaguccgggagccccggcgacuccagcuggcacaucuaccugaaguccgggaccugccccuucagcuucuccaagcucaacaacuuccagaaguucaagaccaucugcuucagcaccguggaggucccgggguccugcaacuucccccuggaggcgacguggcacuacaccagcuacaccaucgugggcgcccuguacgugaccugguccgaggggaacagcaucacgggcguccccuaccccguguccgggauccgcgaguucagcaaccucgugcugaacaacugcaccaaguacaacaucuacgacuacgucggcaccggcaucauccggagcuccaaccagagccuggccgggggcaucaccuacguguccaacagcgggaaccuccugggcuucaagaacguguccacgggcaacaucuucaucgucaccccgugcaaccagcccgaccagguggccguguaccagcagagcaucaucggggccaugaccgcggucaacgagucccgcuacggccugcagaaccuccugcagcugcccaacuucuacuacgugagcaacgggggcaacaacugcaccacggccgugaugaccuacuccaacuucgggaucugcgccgacggcagccucauccccguccggccgcgcaacuccagcgacaacggcaucuccgccaucaucaccgcgaaccugagcauccccuccaacuggaccacgagcguccagguggaguaccugcagaucaccuccacccccaucgugguggacugcgccaccuacgugugcaacgggaacccgcggugcaagaaccuccugaagcaguacacgagcgccugcaagaccaucgaggacgcccugcgccucuccgcccaccuggagaccaacgacgucagcagcaugcugaccuucgacuccaacgcguucagccucgccaacgugacguccuucggcgacuacaaccugagcuccgugcugccccagcggaacauccgcagcucccgcaucgccgggcggagcgcccucgaggaccugcuguucuccaaggucgugaccagcggccucgggaccgucgacguggacuacaaguccugcaccaagggccugagcaucgccgaccuggcgugcgcccaguacuacaacggcaucauggugcuccccggggucgccgacgccgagcgcauggccauguacacgggcucccugaucgggggcauggugcugggcggccucaccagcgcggccgccauccccuucucccuggcccugcaggcgcggcucaacuacguggcccugcagaccgacguccugcaggagaaccagaagauccucgccgccagcuucaacaaggccaucaacaacaucguggcguccuucagcuccgugaacgacgccaucacccagaccgccgaggccauccacacggucaccaucgcccugaacaagauccaggacguggugaaccagcagggcagcgcgcugaaccaccucaccagccagcugcgccacaacuuccaggccaucuccaacagcauccaggccaucuacgaccggcuggacccgccccaggccgaccagcaggucgaccgccucaucaccgggcggcuggccgcgcugaacgccuucgugucccaggugcucaacaaguacacggagguccgcggcagccggcgccuggcccagcagaagaucaacgagugcgugaagucccagagcaaccgguacggguucugcggcaacgggacccacaucuucuccaucgugaacagcgcccccgacggccuccuguuccugcacaccguccugcuccccaccgacuacaagaacgugaaggcgugguccggcaucugcguggacgggaucuacggcuacguccugcgccagccgaaccuggugcucuacagcgacaacgggguguuccgggucacgucccgcaucauguuccagccccggcugcccgugcugagcgacuucgugcagaucuacaacugcaacgucaccuucgugaacaucucccgcguggagcuccacaccgucauccccgacuacguggacgugaacaagacccugcaggaguucgcccagaaccugccgaaguacgucaagcccaacuucgaccucacgcccuucaaccugaccuaccugaaccucagcuccgagcugaagcagcuggaggccaagaccgccagccucuuccagaccacgguggagcugcagggccugaucgaccagaucaacuccaccuacguggaccucaagcugcugaaccgguucgagaacuacaucaaguggcccuggugggucuggcucaucaucagcgugguguucgucgugcugcugucccuccugguguucugcugccugagcaccggcugcugcgggugcugcaacugccucaccagcuccaugcgcggcugcugcgacugcgggagcacgaagcugccguacuacgaguucgagaagguccacgugcagugaggacuagucccuguucccagagcccacuuuuuuuucuuuuuuugaaauaaaauagccugucuuucagaucucaaaggcucuuuucagagccaccaaaaaaaaaaaaaaaaaaaaaaaaaaaaaaaaaaaaaaaaaaaaaaaaaaaaaaaaaaaaaaaaaaaaaaaaaaaaaaaaaaaaaaaaaaaaaaaaaaaaa

SEQ ID NO: 15064 - RNA, 4148 nt, Artificial Sequence
  HCoV/NL63/RPTEC/2004__AFV53148.1 spike protein mRNA gc (variant)
aggagagucccgcagucggcguccagcggcucugcuuguucgugugugugucguugcaggccuuauucaagcuuaccaugaagcuguuccucauccugcuggugcucccccuggccagcugcuucuucacgugcaacuccaacgccaaccugagcaugcuccagcugggcgucccggacaacuccagcaccaucgugaccgggcugcuccccacccacugguucugcgcgaaccaguccaccagcguguacuccgccaacggcuucuucuacaucgacgucgggaaccaccgcagcgccuucgcccugcacaccggcuacuacgacgccaaccaguacuacaucuacgugacgaacgagaucgggcugaacgcguccgugacccucaagaucugcaaguucagccggaacaccaccuucgacuuccuguccaacgccagcuccagcuucgacugcaucgucaaccuccucuucacggagcagcugggcgcgccccugggcaucaccaucuccggggagaccgugcgccuccaccuguacaacgugacccggacguucuacguccccgccgccuacaagcugaccaagcucagcgugaagugcuacuucaacuacuccugcguguucagcgucgugaacgccaccgugaccgucaacgugacgacccacaacggccgcguggucaacuacaccgugugcgacgacugcaacggguacaccgacaacaucuucuccgugcagcaggacggccggaucccgaacggguuccccuucaacaacugguuccugcugacgaacggcagcacccucgucgacggcgugagccgccuguaccagccccugcggcugaccugccuguggcccgugccggggcugaaguccagcaccggcuucgucuacuucaacgccacgggguccgacgugaacugcaacggcuaccagcacaacagcgucguggacgugaugcgcuacaaccucaacuucuccgccaacagccuggacaaccugaaguccggcgucaucguguucaagacccuccaguacgacgugcuguucuacugcagcaacuccagcuccgggguccuggacaccaccauccccuucggccccagcucccagcccuacuacugcuucaucaacagcacgaucaacaccacccacguguccaccuucguggggauccucccgcccacgguccgggagaucgugguggcccgcaccggccaguucuacaucaacggguucaaguacuucgaccugggcuucaucgaggcggucaacuucaacgugaccaccgccagcgccacggacuucuggaccguggccuucgccaccuucgucgacgugcuggugaacgucuccgcgaccaacauccagaaccuccuguacugcgacagccccuucgagaagcugcagugcgagcaccuccaguucggccugcaggacggguucuacuccgccaacuuccuggacgacaacgugcuccccgagaccuacguggcccugccgaucuacuaccagcacacggacaucaacuucaccgccaccgccagcuucggcgggagcugcuacgucugcaagccccaccaggugaacaucucccugaacggcaacaccagcgugugcguccggacgucccacuucagcauccgcuacaucuacaaccgggugaaguccgggagccccggcgacuccagcuggcacaucuaccugaaguccgggaccugccccuucagcuucuccaagcucaacaacuuccagaaguucaagaccaucugcuucagcaccguggaggucccgggguccugcaacuucccccuggaggcgacguggcacuacaccagcuacaccaucgugggcgcccuguacgugaccugguccgaggggaacagcaucacgggcguccccuaccccguguccgggauccgcgaguucagcaaccucgugcugaacaacugcaccaaguacaacaucuacgacuacgucggcaccggcaucauccggagcuccaaccagagccuggccgggggcaucaccuacguguccaacagcgggaaccuccugggcuucaagaacguguccacgggcaacaucuucaucgucaccccgugcaaccagcccgaccagguggccguguaccagcagagcaucaucggggccaugaccgcggucaacgagucccgcuacggccugcagaaccuccugcagcugcccaacuucuacuacgugagcaacgggggcaacaacugcaccacggccgugaugaccuacuccaacuucgggaucugcgccgacggcagccucauccccguccggccgcgcaacuccagcgacaacggcaucuccgccaucaucaccgcgaaccugagcauccccuccaacuggaccacgagcguccagguggaguaccugcagaucaccuccacccccaucgugguggacugcgccaccuacgugugcaacgggaacccgcggugcaagaaccuccugaagcaguacacgagcgccugcaagaccaucgaggacgcccugcgccucuccgcccaccuggagaccaacgacgucagcagcaugcugaccuucgacuccaacgcguucagccucgccaacgugacguccuucggcgacuacaaccugagcuccgugcugccccagcggaacauccgcagcucccgcaucgccgggcggagcgcccucgaggaccugcuguucuccaaggucgugaccagcggccucgggaccgucgacguggacuacaaguccugcaccaagggccugagcaucgccgaccuggcgugcgcccaguacuacaacggcaucauggugcuccccggggucgccgacgccgagcgcauggccauguacacgggcucccugaucgggggcauggugcugggcggccucaccagcgcggccgccauccccuucucccuggcccugcaggcgcggcucaacuacguggcccugcagaccgacguccugcaggagaaccagaagauccucgccgccagcuucaacaaggccaucaacaacaucguggcguccuucagcuccgugaacgacgccaucacccagaccgccgaggccauccacacggucaccaucgcccugaacaagauccaggacguggugaaccagcagggcagcgcgcugaaccaccucaccagccagcugcgccacaacuuccaggccaucuccaacagcauccaggccaucuacgaccggcuggacccgccccaggccgaccagcaggucgaccgccucaucaccgggcggcuggccgcgcugaacgccuucgugucccaggugcucaacaaguacacggagguccgcggcagccggcgccuggcccagcagaagaucaacgagugcgugaagucccagagcaaccgguacggguucugcggcaacgggacccacaucuucuccaucgugaacagcgcccccgacggccuccuguuccugcacaccguccugcuccccaccgacuacaagaacgugaaggcgugguccggcaucugcguggacgggaucuacggcuacguccugcgccagccgaaccuggugcucuacagcgacaacgggguguuccgggucacgucccgcaucauguuccagccccggcugcccgugcugagcgacuucgugcagaucuacaacugcaacgucaccuucgugaacaucucccgcguggagcuccacaccgucauccccgacuacguggacgugaacaagacccugcaggaguucgcccagaaccugccgaaguacgucaagcccaacuucgaccucacgcccuucaaccugaccuaccugaaccucagcuccgagcugaagcagcuggaggccaagaccgccagccucuuccagaccacgguggagcugcagggccugaucgaccagaucaacuccaccuacguggaccucaagcugcugaaccgguucgagaacugaggacuagucccuguucccagagcccacuuuuuuuucuuuuuuugaaauaaaauagccugucuuucagaucucaaaggcucuuuucagagccaccaaaaaaaaaaaaaaaaaaaaaaaaaaaaaaaaaaaaaaaaaaaaaaaaaaaaaaaaaaaaaaaaaaaaaaaaaaaaaaaaaaaaaaaaaaaaaaaaaaaaa

SEQ ID NO: 15065 - RNA, 4229 nt, Artificial Sequence
  HCoV/NL63/RPTEC/2004__AFV53148.1 spike protein mRNA gc (variant)
aggagagucccgcagucggcguccagcggcucugcuuguucgugugugugucguugcaggccuuauucaagcuuaccaugaagcuguuccucauccugcuggugcucccccuggccagcugcuucuucacgugcaacuccaacgccaaccugagcaugcuccagcugggcgucccggacaacuccagcaccaucgugaccgggcugcuccccacccacugguucugcgcgaaccaguccaccagcguguacuccgccaacggcuucuucuacaucgacgucgggaaccaccgcagcgccuucgcccugcacaccggcuacuacgacgccaaccaguacuacaucuacgugacgaacgagaucgggcugaacgcguccgugacccucaagaucugcaaguucagccggaacaccaccuucgacuuccuguccaacgccagcuccagcuucgacugcaucgucaaccuccucuucacggagcagcugggcgcgccccugggcaucaccaucuccggggagaccgugcgccuccaccuguacaacgugacccggacguucuacguccccgccgccuacaagcugaccaagcucagcgugaagugcuacuucaacuacuccugcguguucagcgucgugaacgccaccgugaccgucaacgugacgacccacaacggccgcguggucaacuacaccgugugcgacgacugcaacggguacaccgacaacaucuucuccgugcagcaggacggccggaucccgaacggguuccccuucaacaacugguuccugcugacgaacggcagcacccucgucgacggcgugagccgccuguaccagccccugcggcugaccugccuguggcccgugccggggcugaaguccagcaccggcuucgucuacuucaacgccacgggguccgacgugaacugcaacggcuaccagcacaacagcgucguggacgugaugcgcuacaaccucaacuucuccgccaacagccuggacaaccugaaguccggcgucaucguguucaagacccuccaguacgacgugcuguucuacugcagcaacuccagcuccgggguccuggacaccaccauccccuucggccccagcucccagcccuacuacugcuucaucaacagcacgaucaacaccacccacguguccaccuucguggggauccucccgcccacgguccgggagaucgugguggcccgcaccggccaguucuacaucaacggguucaaguacuucgaccugggcuucaucgaggcggucaacuucaacgugaccaccgccagcgccacggacuucuggaccguggccuucgccaccuucgucgacgugcuggugaacgucuccgcgaccaacauccagaaccuccuguacugcgacagccccuucgagaagcugcagugcgagcaccuccaguucggccugcaggacggguucuacuccgccaacuuccuggacgacaacgugcuccccgagaccuacguggcccugccgaucuacuaccagcacacggacaucaacuucaccgccaccgccagcuucggcgggagcugcuacgucugcaagccccaccaggugaacaucucccugaacggcaacaccagcgugugcguccggacgucccacuucagcauccgcuacaucuacaaccgggugaaguccgggagccccggcgacuccagcuggcacaucuaccugaaguccgggaccugccccuucagcuucuccaagcucaacaacuuccagaaguucaagaccaucugcuucagcaccguggaggucccgggguccugcaacuucccccuggaggcgacguggcacuacaccagcuacaccaucgugggcgcccuguacgugaccugguccgaggggaacagcaucacgggcguccccuaccccguguccgggauccgcgaguucagcaaccucgugcugaacaacugcaccaaguacaacaucuacgacuacgucggcaccggcaucauccggagcuccaaccagagccuggccgggggcaucaccuacguguccaacagcgggaaccuccugggcuucaagaacguguccacgggcaacaucuucaucgucaccccgugcaaccagcccgaccagguggccguguaccagcagagcaucaucggggccaugaccgcggucaacgagucccgcuacggccugcagaaccuccugcagcugcccaacuucuacuacgugagcaacgggggcaacaacugcaccacggccgugaugaccuacuccaacuucgggaucugcgccgacggcagccucauccccguccggccgcgcaacuccagcgacaacggcaucuccgccaucaucaccgcgaaccugagcauccccuccaacuggaccacgagcguccagguggaguaccugcagaucaccuccacccccaucgugguggacugcgccaccuacgugugcaacgggaacccgcggugcaagaaccuccugaagcaguacacgagcgccugcaagaccaucgaggacgcccugcgccucuccgcccaccuggagaccaacgacgucagcagcaugcugaccuucgacuccaacgcguucagccucgccaacgugacguccuucggcgacuacaaccugagcuccgugcugccccagcggaacauccgcagcucccgcaucgccgggcggagcgcccucgaggaccugcuguucuccaaggucgugaccagcggccucgggaccgucgacguggacuacaaguccugcaccaagggccugagcaucgccgaccuggcgugcgcccaguacuacaacggcaucauggugcuccccggggucgccgacgccgagcgcauggccauguacacgggcucccugaucgggggcauggugcugggcggccucaccagcgcggccgccauccccuucucccuggcccugcaggcgcggcucaacuacguggcccugcagaccgacguccugcaggagaaccagaagauccucgccgccagcuucaacaaggccaucaacaacaucguggcguccuucagcuccgugaacgacgccaucacccagaccgccgaggccauccacacggucaccaucgcccugaacaagauccaggacguggugaaccagcagggcagcgcgcugaaccaccucaccagccagcugcgccacaacuuccaggccaucuccaacagcauccaggccaucuacgaccggcuggacccgccccaggccgaccagcaggucgaccgccucaucaccgggcggcuggccgcgcugaacgccuucgugucccaggugcucaacaaguacacggagguccgcggcagccggcgccuggcccagcagaagaucaacgagugcgugaagucccagagcaaccgguacggguucugcggcaacgggacccacaucuucuccaucgugaacagcgcccccgacggccuccuguuccugcacaccguccugcuccccaccgacuacaagaacgugaaggcgugguccggcaucugcguggacgggaucuacggcuacguccugcgccagccgaaccuggugcucuacagcgacaacgggguguuccgggucacgucccgcaucauguuccagccccggcugcccgugcugagcgacuucgugcagaucuacaacugcaacgucaccuucgugaacaucucccgcguggagcuccacaccgucauccccgacuacguggacgugaacaagacccugcaggaguucgcccagaaccugccgaaguacgucaagcccaacuucgaccucacgcccuucaaccugaccuaccugaaccucagcuccgagcugaagcagcuggaggccaagaccgccagccucuuccagaccacgguggagcugcagggccugaucgaccagaucaacuccaccuacguggaccucaagcugcugaaccgguucgagaacggcggguacauccccgaggccccgcgcgacggccaggcguacguccggaaggacggggagugggugcuccugagcaccuucugaggacuagucccuguucccagagcccacuuuuuuuucuuuuuuugaaauaaaauagccugucuuucagaucucaaaggcucuuuucagagccaccaaaaaaaaaaaaaaaaaaaaaaaaaaaaaaaaaaaaaaaaaaaaaaaaaaaaaaaaaaaaaaaaaaaaaaaaaaaaaaaaaaaaaaaaaaaaaaaaaaaaa

SEQ ID NO: 15066 - RNA, 4043 nt, Artificial Sequence
  Bat SARS-like CoV/WIV1__AGZ48828.1 spike protein mRNA gc (1-1256)
aggagagucccgcagucggcguccagcggcucugcuuguucgugugugugucguugcaggccuuauucaagcuuaccaugaagcugcucgugcuggucuucgccacccuggugagcuccuacaccaucgagaagugccucgacuucgacgaccgcacgcccccggccaacacccaguuccugagcucccaccggggcguguacuaccccgacgacaucuuccgcagcaacguccugcaccucgugcaggaccacuuccugcccuucgacuccaacgugacccgguucaucaccuucgggcugaacuucgacaaccccaucaucccguucaaggacggcaucuacuucgcggccacggagaaguccaacgucauccgcggguggguguucggcagcaccaugaacaacaagagccaguccgugaucaucaugaacaacagcaccaaccucgucauccgggccugcaacuucgagcugugcgacaaccccuucuucguggugcugaaguccaacaacacccagauccccagcuacaucuucaacaacgccuucaacugcacguucgaguacgucuccaaggacuucaaccucgaccugggggagaagcccggcaacuucaaggaccugcgcgaguucguguuccggaacaaggacggcuuccuccacguguacagcggguaccagccgaucuccgccgcgagcggccugcccaccggguucaacgcccugaagcccaucuucaagcucccccugggcaucaacaucaccaacuuccgcacccugcucacggccuucccgccccggcccgacuacugggggaccuccgccgcggccuacuucgucggcuaccugaagcccaccaccuucaugcugaaguacgacgagaacggcacgaucaccgacgccguggacugcagccagaacccgcucgccgagcugaagugcuccgucaagagcuucgagaucgacaaggggaucuaccagaccagcaacuuccgcguggcccccuccaaggagguggugcgguuccccaacaucaccaaccugugccccuucggcgaggucuucaacgcgacgaccuucccgagcguguacgccugggagcgcaagcggaucuccaacugcguggccgacuacagcguccucuacaacuccaccagcuucuccaccuucaagugcuacggggugagcgccacgaagcugaacgaccugugcuucuccaacgucuacgccgacagcuucguggugaagggcgacgacguccgccagaucgcgcccggccagaccggggugaucgccgacuacaacuacaagcuccccgacgacuucaccggcugcgugcuggccuggaacacccggaacaucgacgccacgcagaccgggaacuacaacuacaaguaccgcucccugcggcacggcaagcuccgccccuucgagcgggacaucagcaacgucccguucucccccgacgggaagcccugcacgcccccggccuucaacugcuacuggccccugaacgacuacggcuucuacaucaccaacggcaucggguaccagcccuaccgcguggugguccugagcuucgagcuccugaacgcgccggccaccgugugcggccccaagcuguccaccgaccucaucaagaaccagugcgugaacuucaacuucaacgggcugaccggcaccgggguccugacgcccagcuccaagcgguuccagcccuuccagcaguucggccgcgacgugagcgacuucaccgacuccgugcgcgacccgaagaccagcgagauccucgacaucagccccugcuccuucggcggggucagcgugaucacccccggcaccaacacguccagcgagguggccguccuguaccaggacgugaacugcaccgacgugcccgucgccauccacgccgaccagcugaccccguccuggcgggugcacagcaccgggaacaacguguuccagacgcaggcgggcugccucaucggggccgagcacgucgacaccuccuacgagugcgacauccccaucggcgccggcaucugcgccagcuaccacaccguguccagccugcgcuccaccagccagaaguccaucguggcguacacgaugagccugggggccgacuccagcaucgccuacuccaacaacaccaucgccauccccaccaacuucagcaucagcaucaccacggaggucaugcccguguccauggccaagaccagcguggacugcaacauguacaucugcggcgacuccaccgagugcgcgaaccugcuccugcaguacgggagcuucugcacccagcugaaccgggcccucuccggcaucgccgucgagcaggaccgcaacacgcgggagguguucgcccaggugaagcagauguacaagaccccgacccugaaggacuucggcggguucaacuucagccagauccugcccgacccccucaagcccaccaagcgcuccuucaucgaggaccugcuguucaacaaggucacgcucgccgacgcgggcuucaugaagcaguacggggagugccugggcgacaucaacgcccgggaccugaucugcgcccagaaguucaacgggcucaccgugcugccgccccugcucaccgacgacaugaucgccgccuacaccgcggcccuggugagcggcacggccaccgccggcuggaccuucggggcgggcgccgcccugcagauccccuucgccaugcagauggccuaccgcuucaacgggaucggcgucacccagaacgugcucuacgagaaccagaagcagaucgcgaaccaguucaacaaggccaucucccagauccaggagagccugacgaccaccuccaccgcccuggggaagcuccaggacguggucaaccagaacgcccaggcccugaacacgcuggugaagcagcucagcuccaacuucggcgcgaucagcuccgugcugaacgacauccugagccggcucgacaaggucgaggccgaggugcagaucgaccgccugaucaccggccggcugcagucccuccagaccuacgugacccagcagcugauccgcgccgccgagauccgggccagcgcgaaccuggccgccacgaagauguccgagugcguccucgggcagagcaagcgcguggacuucugcggcaagggguaccaccugaugagcuucccccaggccgcgccgcacggcguggucuuccugcacgugaccuacgugcccucccaggagcggaacuucaccaccgcccccgccaucugccacgaggggaaggccuacuucccccgcgagggcgucuucguguucaacggcaccagcugguucaucacgcagcggaacuucuucuccccgcagaucaucaccaccgacaacaccuucgucagcggguccugcgacguggugaucggcaucaucaacaacacggucuacgacccccuccagcccgagcuggacagcuucaaggaggagcuggacaaguacuucaagaaccacaccuccccggacguggaccucggggacaucagcggcaucaacgccuccguggucaacauccagaaggagaucgaccgccugaacgagguggcgaagaaccugaacgagagccucaucgaccugcaggagcuggggaaguacgagcaguacaucaaguggcccugguacguguggcucggcuucaucgccggccugaucgccaucgucauggugaccauccugcucugcugcaugaccuccugcugcagcugccugaagggggccugcuccugcggcagcugcugcaaguucgacgaggacgacuccgagcccgugcugaagggggucaagcuccacuacacgugaggacuagucccuguucccagagcccacuuuuuuuucuuuuuuugaaauaaaauagccugucuuucagaucucaaaggcucuuuucagagccaccaaaaaaaaaaaaaaaaaaaaaaaaaaaaaaaaaaaaaaaaaaaaaaaaaaaaaaaaaaaaaaaaaaaaaaaaaaaaaaaaaaaaaaaaaaaaaaaaaaaaa

SEQ ID NO: 15067 - RNA, 4043 nt, Artificial Sequence
  Bat SARS-like CoV/WIV1__AGZ48828.1 spike protein mRNA gc (1-1256)(K969P_V970P)
aggagagucccgcagucggcguccagcggcucugcuuguucgugugugugucguugcaggccuuauucaagcuuaccaugaagcugcucgugcuggucuucgccacccuggugagcuccuacaccaucgagaagugccucgacuucgacgaccgcacgcccccggccaacacccaguuccugagcucccaccggggcguguacuaccccgacgacaucuuccgcagcaacguccugcaccucgugcaggaccacuuccugcccuucgacuccaacgugacccgguucaucaccuucgggcugaacuucgacaaccccaucaucccguucaaggacggcaucuacuucgcggccacggagaaguccaacgucauccgcggguggguguucggcuccaccaugaacaacaagagccaguccgugaucaucaugaacaacagcaccaaccucgucauccgggccugcaacuucgagcugugcgacaaccccuucuucguggugcugaaguccaacaacacccagauccccagcuacaucuucaacaacgccuucaacugcacguucgaguacgucuccaaggacuucaaccucgaccugggggagaagcccggcaacuucaaggaccugcgcgaguucguguuccggaacaaggacggcuuccuccacguguacagcggguaccagccgaucuccgccgcgagcggccugcccaccggguucaacgcccugaagcccaucuucaagcucccccugggcaucaacaucaccaacuuccgcacccugcucacggccuucccgccccggcccgacuacugggggaccuccgccgcggccuacuucgucggcuaccugaagcccaccaccuucaugcugaaguacgacgagaacggcacgaucaccgacgccguggacugcagccagaacccgcucgccgagcugaagugcuccgucaagagcuucgagaucgacaaggggaucuaccagaccagcaacuuccgcguggcccccuccaaggagguggugcgguuccccaacaucaccaaccugugccccuucggcgaggucuucaacgcgacgaccuucccgagcguguacgccugggagcgcaagcggaucuccaacugcguggccgacuacagcguccucuacaacuccaccagcuucuccaccuucaagugcuacggggugagcgccacgaagcugaacgaccugugcuucuccaacgucuacgccgacagcuucguggugaagggcgacgacguccgccagaucgcgcccggccagaccggggugaucgccgacuacaacuacaagcuccccgacgacuucaccggcugcgugcuggccuggaacacccggaacaucgacgccacgcagaccgggaacuacaacuacaaguaccgcucccugcggcacggcaagcuccgccccuucgagcgggacaucagcaacgucccguucucccccgacgggaagcccugcacgcccccggccuucaacugcuacuggccccugaacgacuacggcuucuacaucaccaacggcaucggguaccagcccuaccgcguggugguccugagcuucgagcuccugaacgcgccggccaccgugugcggccccaagcuguccaccgaccucaucaagaaccagugcgugaacuucaacuucaacgggcugaccggcaccgggguccugacgcccagcuccaagcgguuccagcccuuccagcaguucggccgcgacgugagcgacuucaccgacuccgugcgcgacccgaagaccagcgagauccucgacaucagccccugcuccuucggcggggucagcgugaucacccccggcaccaacacguccagcgagguggccguccuguaccaggacgugaacugcaccgacgugcccgucgccauccacgccgaccagcugaccccguccuggcgggugcacagcaccgggaacaacguguuccagacgcaggcgggcugccucaucggggccgagcacgucgacaccuccuacgagugcgacauccccaucggcgccggcaucugcgccagcuaccacaccguguccagccugcgcuccaccagccagaaguccaucguggcguacacgaugagccugggggccgacuccagcaucgccuacuccaacaacaccaucgccauccccaccaacuucagcaucagcaucaccacggaggucaugcccguguccauggccaagaccagcguggacugcaacauguacaucugcggcgacuccaccgagugcgcgaaccugcuccugcaguacgggagcuucugcacccagcugaaccgggcccucuccggcaucgccgucgagcaggaccgcaacacgcgggagguguucgcccaggugaagcagauguacaagaccccgacccugaaggacuucggcggguucaacuucagccagauccugcccgacccccucaagcccaccaagcgcuccuucaucgaggaccugcuguucaacaaggucacgcucgccgacgcgggcuucaugaagcaguacggggagugccugggcgacaucaacgcccgggaccugaucugcgcccagaaguucaacgggcucaccgugcugccgccccugcucaccgacgacaugaucgccgccuacaccgcggcccuggugagcggcacggccaccgccggcuggaccuucggggcgggcgccgcccugcagauccccuucgccaugcagauggccuaccgcuucaacgggaucggcgucacccagaacgugcucuacgagaaccagaagcagaucgcgaaccaguucaacaaggccaucucccagauccaggagagccugacgaccaccuccaccgcccuggggaagcuccaggacguggucaaccagaacgcccaggcccugaacacgcuggugaagcagcucagcuccaacuucggcgcgaucagcuccgugcugaacgacauccugagccggcucgacccgcccgaggccgagguccagaucgaccgccugaucaccggccggcugcagucccuccagaccuacgugacccagcagcugauccgcgccgccgagauccgggccagcgcgaaccuggccgccacgaagauguccgagugcgugcucgggcagagcaagcgcgucgacuucugcggcaagggguaccaccugaugagcuucccccaggccgcgccccacggcgugguguuccugcacgucaccuacgugcccucccaggagcggaacuucaccaccgccccggccaucugccacgaggggaaggccuacuucccccgcgagggcguguucgucuucaacggcaccagcugguucaucacgcagcggaacuucuucagcccccagaucaucaccaccgacaacaccuucgugagcggguccugcgacgucgugaucggcaucaucaacaacacgguguacgacccgcuccagcccgagcuggacagcuucaaggaggagcuggacaaguacuucaagaaccacaccucccccgacgucgaccucggggacaucagcggcaucaacgccuccguggugaacauccagaaggagaucgaccgccugaacgaggucgcgaagaaccugaacgagagccucaucgaccugcaggagcuggggaaguacgagcaguacaucaaguggcccugguacguguggcucggcuucaucgccggccugaucgccaucgugauggucaccauccugcucugcugcaugaccuccugcugcagcugccugaagggggccugcuccugcggcagcugcugcaaguucgacgaggacgacuccgagccggugcugaagggggugaagcuccacuacacgugaggacuagucccuguucccagagcccacuuuuuuuucuuuuuuugaaauaaaauagccugucuuucagaucucaaaggcucuuuucagagccaccaaaaaaaaaaaaaaaaaaaaaaaaaaaaaaaaaaaaaaaaaaaaaaaaaaaaaaaaaaaaaaaaaaaaaaaaaaaaaaaaaaaaaaaaaaaaaaaaaaaaa

SEQ ID NO: 15068 - RNA, 3848 nt, Artificial Sequence
  Bat SARS-like CoV/WIV1__AGZ48828.1 spike protein mRNA gc (variant)
aggagagucccgcagucggcguccagcggcucugcuuguucgugugugugucguugcaggccuuauucaagcuuaccaugaagcugcucgugcuggucuucgccacccuggugagcuccuacaccaucgagaagugccucgacuucgacgaccgcacgcccccggccaacacccaguuccugagcucccaccggggcguguacuaccccgacgacaucuuccgcagcaacguccugcaccucgugcaggaccacuuccugcccuucgacuccaacgugacccgguucaucaccuucgggcugaacuucgacaaccccaucaucccguucaaggacggcaucuacuucgcggccacggagaaguccaacgucauccgcggguggguguucggcuccaccaugaacaacaagagccaguccgugaucaucaugaacaacagcaccaaccucgucauccgggccugcaacuucgagcugugcgacaaccccuucuucguggugcugaaguccaacaacacccagauccccagcuacaucuucaacaacgccuucaacugcacguucgaguacgucuccaaggacuucaaccucgaccugggggagaagcccggcaacuucaaggaccugcgcgaguucguguuccggaacaaggacggcuuccuccacguguacagcggguaccagccgaucuccgccgcgagcggccugcccaccggguucaacgcccugaagcccaucuucaagcucccccugggcaucaacaucaccaacuuccgcacccugcucacggccuucccgccccggcccgacuacugggggaccuccgccgcggccuacuucgucggcuaccugaagcccaccaccuucaugcugaaguacgacgagaacggcacgaucaccgacgccguggacugcagccagaacccgcucgccgagcugaagugcuccgucaagagcuucgagaucgacaaggggaucuaccagaccagcaacuuccgcguggcccccuccaaggagguggugcgguuccccaacaucaccaaccugugccccuucggcgaggucuucaacgcgacgaccuucccgagcguguacgccugggagcgcaagcggaucuccaacugcguggccgacuacagcguccucuacaacuccaccagcuucuccaccuucaagugcuacggggugagcgccacgaagcugaacgaccugugcuucuccaacgucuacgccgacagcuucguggugaagggcgacgacguccgccagaucgcgcccggccagaccggggugaucgccgacuacaacuacaagcuccccgacgacuucaccggcugcgugcuggccuggaacacccggaacaucgacgccacgcagaccgggaacuacaacuacaaguaccgcucccugcggcacggcaagcuccgccccuucgagcgggacaucagcaacgucccguucucccccgacgggaagcccugcacgcccccggccuucaacugcuacuggccccugaacgacuacggcuucuacaucaccaacggcaucggguaccagcccuaccgcguggugguccugagcuucgagcuccugaacgcgccggccaccgugugcggccccaagcuguccaccgaccucaucaagaaccagugcgugaacuucaacuucaacgggcugaccggcaccgggguccugacgcccagcuccaagcgguuccagcccuuccagcaguucggccgcgacgugagcgacuucaccgacuccgugcgcgacccgaagaccagcgagauccucgacaucagccccugcuccuucggcggggucagcgugaucacccccggcaccaacacguccagcgagguggccguccuguaccaggacgugaacugcaccgacgugcccgucgccauccacgccgaccagcugaccccguccuggcgggugcacagcaccgggaacaacguguuccagacgcaggcgggcugccucaucggggccgagcacgucgacaccuccuacgagugcgacauccccaucggcgccggcaucugcgccagcuaccacaccguguccagccugcgcuccaccagccagaaguccaucguggcguacacgaugagccugggggccgacuccagcaucgccuacuccaacaacaccaucgccauccccaccaacuucagcaucagcaucaccacggaggucaugcccguguccauggccaagaccagcguggacugcaacauguacaucugcggcgacuccaccgagugcgcgaaccugcuccugcaguacgggagcuucugcacccagcugaaccgggcccucuccggcaucgccgucgagcaggaccgcaacacgcgggagguguucgcccaggugaagcagauguacaagaccccgacccugaaggacuucggcggguucaacuucagccagauccugcccgacccccucaagcccaccaagcgcuccuucaucgaggaccugcuguucaacaaggucacgcucgccgacgcgggcuucaugaagcaguacggggagugccugggcgacaucaacgcccgggaccugaucugcgcccagaaguucaacgggcucaccgugcugccgccccugcucaccgacgacaugaucgccgccuacaccgcggcccuggugagcggcacggccaccgccggcuggaccuucggggcgggcgccgcccugcagauccccuucgccaugcagauggccuaccgcuucaacgggaucggcgucacccagaacgugcucuacgagaaccagaagcagaucgcgaaccaguucaacaaggccaucucccagauccaggagagccugacgaccaccuccaccgcccuggggaagcuccaggacguggucaaccagaacgcccaggcccugaacacgcuggugaagcagcucagcuccaacuucggcgcgaucagcuccgugcugaacgacauccugagccggcucgacccgcccgaggccgagguccagaucgaccgccugaucaccggccggcugcagucccuccagaccuacgugacccagcagcugauccgcgccgccgagauccgggccagcgcgaaccuggccgccacgaagauguccgagugcgugcucgggcagagcaagcgcgucgacuucugcggcaagggguaccaccugaugagcuucccccaggccgcgccccacggcgugguguuccugcacgucaccuacgugcccucccaggagcggaacuucaccaccgccccggccaucugccacgaggggaaggccuacuucccccgcgagggcguguucgucuucaacggcaccagcugguucaucacgcagcggaacuucuucagcccccagaucaucaccaccgacaacaccuucgugagcggguccugcgacgucgugaucggcaucaucaacaacacgguguacgacccgcuccagcccgagcuggacagcuucaaggaggagcuggacaaguacuucaagaaccacaccucccccgacgucgaccucggggacaucagcggcaucaacgccuccguggugaacauccagaaggagaucgaccgccugaacgaggucgcgaagaaccugaacgagagccucaucgaccugcaggagcuggggaaguacgagcagugaggacuagucccuguucccagagcccacuuuuuuuucuuuuuuugaaauaaaauagccugucuuucagaucucaaaggcucuuuucagagccaccaaaaaaaaaaaaaaaaaaaaaaaaaaaaaaaaaaaaaaaaaaaaaaaaaaaaaaaaaaaaaaaaaaaaaaaaaaaaaaaaaaaaaaaaaaaaaaaaaaaaa

SEQ ID NO: 15069 - RNA, 3929 nt, Artificial Sequence
  Bat SARS-like CoV/WIV1__AGZ48828.1 spike protein mRNA gc (variant)
aggagagucccgcagucggcguccagcggcucugcuuguucgugugugugucguugcaggccuuauucaagcuuaccaugaagcugcucgugcuggucuucgccacccuggugagcuccuacaccaucgagaagugccucgacuucgacgaccgcacgcccccggccaacacccaguuccugagcucccaccggggcguguacuaccccgacgacaucuuccgcagcaacguccugcaccucgugcaggaccacuuccugcccuucgacuccaacgugacccgguucaucaccuucgggcugaacuucgacaaccccaucaucccguucaaggacggcaucuacuucgcggccacggagaaguccaacgucauccgcggguggguguucggcuccaccaugaacaacaagagccaguccgugaucaucaugaacaacagcaccaaccucgucauccgggccugcaacuucgagcugugcgacaaccccuucuucguggugcugaaguccaacaacacccagauccccagcuacaucuucaacaacgccuucaacugcacguucgaguacgucuccaaggacuucaaccucgaccugggggagaagcccggcaacuucaaggaccugcgcgaguucguguuccggaacaaggacggcuuccuccacguguacagcggguaccagccgaucuccgccgcgagcggccugcccaccggguucaacgcccugaagcccaucuucaagcucccccugggcaucaacaucaccaacuuccgcacccugcucacggccuucccgccccggcccgacuacugggggaccuccgccgcggccuacuucgucggcuaccugaagcccaccaccuucaugcugaaguacgacgagaacggcacgaucaccgacgccguggacugcagccagaacccgcucgccgagcugaagugcuccgucaagagcuucgagaucgacaaggggaucuaccagaccagcaacuuccgcguggcccccuccaaggagguggugcgguuccccaacaucaccaaccugugccccuucggcgaggucuucaacgcgacgaccuucccgagcguguacgccugggagcgcaagcggaucuccaacugcguggccgacuacagcguccucuacaacuccaccagcuucuccaccuucaagugcuacggggugagcgccacgaagcugaacgaccugugcuucuccaacgucuacgccgacagcuucguggugaagggcgacgacguccgccagaucgcgcccggccagaccggggugaucgccgacuacaacuacaagcuccccgacgacuucaccggcugcgugcuggccuggaacacccggaacaucgacgccacgcagaccgggaacuacaacuacaaguaccgcucccugcggcacggcaagcuccgccccuucgagcgggacaucagcaacgucccguucucccccgacgggaagcccugcacgcccccggccuucaacugcuacuggccccugaacgacuacggcuucuacaucaccaacggcaucggguaccagcccuaccgcguggugguccugagcuucgagcuccugaacgcgccggccaccgugugcggccccaagcuguccaccgaccucaucaagaaccagugcgugaacuucaacuucaacgggcugaccggcaccgggguccugacgcccagcuccaagcgguuccagcccuuccagcaguucggccgcgacgugagcgacuucaccgacuccgugcgcgacccgaagaccagcgagauccucgacaucagccccugcuccuucggcggggucagcgugaucacccccggcaccaacacguccagcgagguggccguccuguaccaggacgugaacugcaccgacgugcccgucgccauccacgccgaccagcugaccccguccuggcgggugcacagcaccgggaacaacguguuccagacgcaggcgggcugccucaucggggccgagcacgucgacaccuccuacgagugcgacauccccaucggcgccggcaucugcgccagcuaccacaccguguccagccugcgcuccaccagccagaaguccaucguggcguacacgaugagccugggggccgacuccagcaucgccuacuccaacaacaccaucgccauccccaccaacuucagcaucagcaucaccacggaggucaugcccguguccauggccaagaccagcguggacugcaacauguacaucugcggcgacuccaccgagugcgcgaaccugcuccugcaguacgggagcuucugcacccagcugaaccgggcccucuccggcaucgccgucgagcaggaccgcaacacgcgggagguguucgcccaggugaagcagauguacaagaccccgacccugaaggacuucggcggguucaacuucagccagauccugcccgacccccucaagcccaccaagcgcuccuucaucgaggaccugcuguucaacaaggucacgcucgccgacgcgggcuucaugaagcaguacggggagugccugggcgacaucaacgcccgggaccugaucugcgcccagaaguucaacgggcucaccgugcugccgccccugcucaccgacgacaugaucgccgccuacaccgcggcccuggugagcggcacggccaccgccggcuggaccuucggggcgggcgccgcccugcagauccccuucgccaugcagauggccuaccgcuucaacgggaucggcgucacccagaacgugcucuacgagaaccagaagcagaucgcgaaccaguucaacaaggccaucucccagauccaggagagccugacgaccaccuccaccgcccuggggaagcuccaggacguggucaaccagaacgcccaggcccugaacacgcuggugaagcagcucagcuccaacuucggcgcgaucagcuccgugcugaacgacauccugagccggcucgacccgcccgaggccgagguccagaucgaccgccugaucaccggccggcugcagucccuccagaccuacgugacccagcagcugauccgcgccgccgagauccgggccagcgcgaaccuggccgccacgaagauguccgagugcgugcucgggcagagcaagcgcgucgacuucugcggcaagggguaccaccugaugagcuucccccaggccgcgccccacggcgugguguuccugcacgucaccuacgugcccucccaggagcggaacuucaccaccgccccggccaucugccacgaggggaaggccuacuucccccgcgagggcguguucgucuucaacggcaccagcugguucaucacgcagcggaacuucuucagcccccagaucaucaccaccgacaacaccuucgugagcggguccugcgacgucgugaucggcaucaucaacaacacgguguacgacccgcuccagcccgagcuggacagcuucaaggaggagcuggacaaguacuucaagaaccacaccucccccgacgucgaccucggggacaucagcggcaucaacgccuccguggugaacauccagaaggagaucgaccgccugaacgaggucgcgaagaaccugaacgagagccucaucgaccugcaggagcuggggaaguacgagcagggcggcuacauccccgaggccccgcgggacgggcaggccuacgugcgcaaggacggcgagugggugcuccuguccaccuucugaggacuagucccuguucccagagcccacuuuuuuuucuuuuuuugaaauaaaauagccugucuuucagaucucaaaggcucuuuucagagccaccaaaaaaaaaaaaaaaaaaaaaaaaaaaaaaaaaaaaaaaaaaaaaaaaaaaaaaaaaaaaaaaaaaaaaaaaaaaaaaaaaaaaaaaaaaaaaaaaaaaaa

SEQ ID NO: 15070 - RNA, 4097 nt, Artificial Sequence
  BatCoV/HKU9-1 BF_005I__YP_001039971.1 spike protein mRNA gc (1-1274)
aggagagucccgcagucggcguccagcggcucugcuuguucgugugugugucguugcaggccuuauucaagcuuaccaugcugcucauccuggugcugggcgucagccucgccgccgcgucccgccccgagugcuucaacccgcgguucacccugacgccccugaaccacacccucaacuacaccagcaucaaggccaagguguccaacgugcugcugcccgaccccuacaucgccuacagcgggcagacccuccgccagaaccuguucauggccgacauguccaacaccauccuguacccggucacgccgcccgccaacggcgcgaacgggggcuucaucuacaacaccagcaucauccccguguccgccggccucuucgugaacaccuggauguaccggcagcccgccagcucccgcgccuacugccaggagcccuucggggucgcguucggcgacaccuucgagaacgaccggaucgccauccugaucauggcccccgacaaccuggggagcugguccgccguggcgccccgcaaccagacgaacaucuaccuccuggugugcagcaacgccacccugugcaucaacccgggcuucaaccggugggggcccgccggcuccuucaucgcccccgacgcccucgucgaccacagcaacuccugcuucgugaacaacaccuucagcgugaacaucuccaccagccgcaucucccuggccuuccuguucaaggacggggaccuccugaucuaccacagcggcuggcugcccacgagcaacuucgagcacggcuucucccgggggagccacccgaugaccuacuucaugucccuccccgucggcgggaaccugccccgcgcgcaguucuuccagagcaucgugcgguccaacgccaucgacaagggcgacggcaugugcaccaacuucgacgugaaccugcacgucgcccaccucaucaaccgcgaccugcuggugagcuacuucaacaacggguccguggccaacgccgcggacugcgccgacagcgccgccgaggagcucuacugcgucaccggcuccuucgacccgcccacggggguguacccccugagccgguaccgcgcccagguggcgggcuucguccgggugacccagcgcggguccuacugcaccccgcccuacagcgugcugcaggacccgccccagcccgucguguggcggcgcuacaugcucuacgacugcgucuucgacuucaccgugguggucgacucccugcccacgcaccagcugcagugcuacggcgugagcccccggcgccucgccuccaugugcuacggcagcgugacccuggacgucaugcggaucaacgagacccaccugaacaaccucuucaaccgcgugcccgacaccuucucccuguacaacuacgcccugcccgacaacuucuacgggugccuccacgccuucuaccugaacagcacggcgccguacgccguggccaaccgcuuccccaucaagcccggcgggcggcaguccaacagcgccuucaucgacaccgucaucaacgccgcgcacuacagccccuucuccuacguguacggccuggccgugaucacccucaagccggccgccgggagcaagcuggucugccccguggccaacgacaccguggucaucacggaccgcugcgugcaguacaaccuguacggcuacaccggcaccggggugcuguccaagaacaccagccucgucauccccgacggcaagguguucacggcguccagcaccgggaccaucaucggcguguccaucaacagcaccacguacuccaucaugcccugcgucaccgugccggugagcgucggguaccaccccaacuucgagcgggcccugcuguucaacggccucuccugcagccagcgcucccgggccgugaccgagcccgugagcguccugugguccgccagcgccaccgcgcaggacgccuucgacacccccuccggcugcguggugaacgucgagcugcgcaacacgaccaucgugaacacgugcgccaugccgaucgggaacagccucugcuucaucaacggcagcaucgccaccgcgaacgccgacucccugccccggcugcagcucgugaacuacgacccccuguacgacaacagcaccgccacccccaugaccccggucuacugggugaaggugcccaccaacuucacgcuguccgccaccgaggaguacauccagaccaccgcccccaagaucacgaucgacugcgcgcgcuaccucugcggggacagcucccggugccugaacguccugcuccacuacggcaccuucugcaacgacaucaacaaggcccugagccgcguguccaccauccuggacagcgcccuccugucccuggugaaggagcucagcaucaacacccgggacgaggucacgaccuucuccuucgacggcgacuacaacuucaccgggcugaugggcugccuggggcccaacugcggcgccaccacguaccgcagcgccuucuccgaccuccuguacgacaaggugcggaucaccgacccgggguucaugcagagcuaccagaagugcaucgacucccaguggggcggcagcauccgcgaccugcucugcacccagaccuacaacgggaucgcggugcugccgcccaucgucucccccgccaugcaggcccuguacacgagccuccuggugggcgccguggccuccagcggguacaccuucggcaucaccagcgcgggggucauccccuucgccacccagcugcaguuccggcucaacggcaucggcgugacgacccaggugcuggucgagaaccagaagcugaucgccuccagcuucaacaacgcccucgugaacauccagaagggguucaccgagaccuccaucgcgcugagcaagaugcaggacgugaucaaccagcacgccgcccagcugcacacgcucgucgugcagcugggcaacuccuucggggccaucagcuccagcaucaacgagaucuucucccgccuggagggccucgccgcgaacgccgaggucgaccggcugaucaacgggcgcaugauggugcugaacaccuacgugacccagcuccugauccaggccagcgaggccaaggcccagaacgcgcuggccgcccagaagaucuccgagugcgucaaggcccagagccuccggaacgacuucugcggcaacggcacccacgugcuguccaucccccagcuggcccccaacgggguccucuucauccacuacgcguacacgccgaccgaguacgccuucgugcagaccagcgccggccugugccacaacgggaccggcuacgcgccccgccaggggauguucgugcugcccaacaacaccaacauguggcacuucacgaccaugcaguucuacaaccccgugaacaucuccgccagcaacacccagguccucaccuccugcagcgugaacuacacguccgugaacuacaccguccuggagccgagcgugcccggcgacuacgacuuccagaaggaguucgacaaguucuacaagaaccugagcaccaucuucaacaacaccuucaaccccaacgacuucaacuucuccacgguggacgucaccgcccagaucaagagccuccacgacguggugaaccagcugaaccaguccuucaucgaccugaagaagcucaacgucuacgagaagaccaucaaguggcccugguacguguggcuggccaugaucgccggcaucguggggcugguccucgccgugaucaugcugaugugcaugaccaacugcugcagcugcuucaagggcaugugcgacugccgccggugcugcggguccuacgacagcuacgacgacguguacccggcgguccgcgugaacaagaagcggacggugugaggacuagucccuguucccagagcccacuuuuuuuucuuuuuuugaaauaaaauagccugucuuucagaucucaaaggcucuuuucagagccaccaaaaaaaaaaaaaaaaaaaaaaaaaaaaaaaaaaaaaaaaaaaaaaaaaaaaaaaaaaaaaaaaaaaaaaaaaaaaaaaaaaaaaaaaaaaaaaaaaaaaa

SEQ ID NO: 15071 - RNA, 4097 nt, Artificial Sequence
  BatCoV/HKU9-1 BF_005I__YP_001039971.1 spike protein mRNA gc (1-1274)(G983P_L984P)
aggagagucccgcagucggcguccagcggcucugcuuguucgugugugugucguugcaggccuuauucaagcuuaccaugcugcucauccuggugcugggcgucagccucgccgccgcgucccgccccgagugcuucaacccgcgguucacccugacgccccugaaccacacccucaacuacaccagcaucaaggccaagguguccaacgugcugcugcccgaccccuacaucgccuacagcgggcagacccuccgccagaaccuguucauggccgacauguccaacaccauccuguacccggucacgccgcccgccaacggcgcgaacgggggcuucaucuacaacaccagcaucauccccguguccgccggccucuucgugaacaccuggauguaccggcagcccgccagcucccgcgccuacugccaggagcccuucggggucgcguucggcgacaccuucgagaacgaccggaucgccauccugaucauggcccccgacaaccuggggagcugguccgccguggcgccccgcaaccagacgaacaucuaccuccuggugugcagcaacgccacccugugcaucaacccgggcuucaaccggugggggcccgccggcuccuucaucgcccccgacgcccucgucgaccacagcaacuccugcuucgugaacaacaccuucagcgugaacaucuccaccagccgcaucucccuggccuuccuguucaaggacggggaccuccugaucuaccacagcggcuggcugcccacgagcaacuucgagcacggcuucucccgggggagccacccgaugaccuacuucaugucccuccccgucggcgggaaccugccccgcgcgcaguucuuccagagcaucgugcgguccaacgccaucgacaagggcgacggcaugugcaccaacuucgacgugaaccugcacgucgcccaccucaucaaccgcgaccugcuggugagcuacuucaacaacggguccguggccaacgccgcggacugcgccgacagcgccgccgaggagcucuacugcgucaccggcuccuucgacccgcccacggggguguacccccugagccgguaccgcgcccagguggcgggcuucguccgggugacccagcgcggguccuacugcaccccgcccuacagcgugcugcaggacccgccccagcccgucguguggcggcgcuacaugcucuacgacugcgucuucgacuucaccgugguggucgacucccugcccacgcaccagcugcagugcuacggcgugagcccccggcgccucgccuccaugugcuacggcagcgugacccuggacgucaugcggaucaacgagacccaccugaacaaccucuucaaccgcgugcccgacaccuucucccuguacaacuacgcccugcccgacaacuucuacgggugccuccacgccuucuaccugaacagcacggcgccguacgccguggccaaccgcuuccccaucaagcccggcgggcggcaguccaacagcgccuucaucgacaccgucaucaacgccgcgcacuacagccccuucuccuacguguacggccuggccgugaucacccucaagccggccgccgggagcaagcuggucugccccguggccaacgacaccguggucaucacggaccgcugcgugcaguacaaccuguacggcuacaccggcaccggggugcuguccaagaacaccagccucgucauccccgacggcaagguguucacggcguccagcaccgggaccaucaucggcguguccaucaacagcaccacguacuccaucaugcccugcgucaccgugccggugagcgucggguaccaccccaacuucgagcgggcccugcuguucaacggccucuccugcagccagcgcucccgggccgugaccgagcccgugagcguccugugguccgccagcgccaccgcgcaggacgccuucgacacccccuccggcugcguggugaacgucgagcugcgcaacacgaccaucgugaacacgugcgccaugccgaucgggaacagccucugcuucaucaacggcagcaucgccaccgcgaacgccgacucccugccccggcugcagcucgugaacuacgacccccuguacgacaacagcaccgccacccccaugaccccggucuacugggugaaggugcccaccaacuucacgcuguccgccaccgaggaguacauccagaccaccgcccccaagaucacgaucgacugcgcgcgcuaccucugcggggacagcucccggugccugaacguccugcuccacuacggcaccuucugcaacgacaucaacaaggcccugagccgcguguccaccauccuggacagcgcccuccugucccuggugaaggagcucagcaucaacacccgggacgaggucacgaccuucuccuucgacggcgacuacaacuucaccgggcugaugggcugccuggggcccaacugcggcgccaccacguaccgcagcgccuucuccgaccuccuguacgacaaggugcggaucaccgacccgggguucaugcagagcuaccagaagugcaucgacucccaguggggcggcagcauccgcgaccugcucugcacccagaccuacaacgggaucgcggugcugccgcccaucgucucccccgccaugcaggcccuguacacgagccuccuggugggcgccguggccuccagcggguacaccuucggcaucaccagcgcgggggucauccccuucgccacccagcugcaguuccggcucaacggcaucggcgugacgacccaggugcuggucgagaaccagaagcugaucgccuccagcuucaacaacgcccucgugaacauccagaagggguucaccgagaccuccaucgcgcugagcaagaugcaggacgugaucaaccagcacgccgcccagcugcacacgcucgucgugcagcugggcaacuccuucggggccaucagcuccagcaucaacgagaucuucucccgccuggagccgcccgccgcgaacgccgaggucgaccggcucaucaacggccgcaugauggugcugaacaccuacgugacccagcugcucauccaggccagcgaggccaaggcccagaacgcgcuggccgcccagaagaucuccgagugcgucaaggcccagagccugcggaacgacuucugcgggaacggcacccacgugcucuccaucccccagcuggcccccaacggcgugcuguucauccacuacgcguacacgcccaccgaguacgccuucguccagaccagcgccgggcucugccacaacggcaccggguacgcgccccgccagggcauguucgugcugccgaacaacaccaacauguggcacuucacgaccaugcaguucuacaaccccgugaacaucuccgccagcaacacccagguccugaccuccugcagcgugaacuacacguccgugaacuacaccguccucgagcccagcgugcccggggacuacgacuuccagaaggaguucgacaaguucuacaagaaccugagcaccaucuucaacaacaccuucaacccgaacgacuucaacuucuccacgguggacgucaccgcccagaucaagagccugcacgacguggugaaccagcucaaccaguccuucaucgaccugaagaagcugaacgucuacgagaagaccaucaaguggcccugguacguguggcucgccaugaucgccggcaucgugggccugguccuggccgugaucaugcucaugugcaugaccaacugcugcagcugcuucaaggggaugugcgacugccgccggugcugcggcuccuacgacagcuacgacgacguguaccccgcgguccgcgugaacaagaagcggacggugugaggacuagucccuguucccagagcccacuuuuuuuucuuuuuuugaaauaaaauagccugucuuucagaucucaaaggcucuuuucagagccaccaaaaaaaaaaaaaaaaaaaaaaaaaaaaaaaaaaaaaaaaaaaaaaaaaaaaaaaaaaaaaaaaaaaaaaaaaaaaaaaaaaaaaaaaaaaaaaaaaaaaa

SEQ ID NO: 15072 - RNA, 3896 nt, Artificial Sequence
  BatCoV/HKU9-1 BF_005I__YP_001039971.1 spike protein mRNA gc (variant)
aggagagucccgcagucggcguccagcggcucugcuuguucgugugugugucguugcaggccuuauucaagcuuaccaugcugcucauccuggugcugggcgucagccucgccgccgcgucccgccccgagugcuucaacccgcgguucacccugacgccccugaaccacacccucaacuacaccagcaucaaggccaagguguccaacgugcugcugcccgaccccuacaucgccuacagcgggcagacccuccgccagaaccuguucauggccgacauguccaacaccauccuguacccggucacgccgcccgccaacggcgcgaacgggggcuucaucuacaacaccagcaucauccccguguccgccggccucuucgugaacaccuggauguaccggcagcccgccagcucccgcgccuacugccaggagcccuucggggucgcguucggcgacaccuucgagaacgaccggaucgccauccugaucauggcccccgacaaccuggggagcugguccgccguggcgccccgcaaccagacgaacaucuaccuccuggugugcagcaacgccacccugugcaucaacccgggcuucaaccggugggggcccgccggcuccuucaucgcccccgacgcccucgucgaccacagcaacuccugcuucgugaacaacaccuucagcgugaacaucuccaccagccgcaucucccuggccuuccuguucaaggacggggaccuccugaucuaccacagcggcuggcugcccacgagcaacuucgagcacggcuucucccgggggagccacccgaugaccuacuucaugucccuccccgucggcgggaaccugccccgcgcgcaguucuuccagagcaucgugcgguccaacgccaucgacaagggcgacggcaugugcaccaacuucgacgugaaccugcacgucgcccaccucaucaaccgcgaccugcuggugagcuacuucaacaacggguccguggccaacgccgcggacugcgccgacagcgccgccgaggagcucuacugcgucaccggcuccuucgacccgcccacggggguguacccccugagccgguaccgcgcccagguggcgggcuucguccgggugacccagcgcggguccuacugcaccccgcccuacagcgugcugcaggacccgccccagcccgucguguggcggcgcuacaugcucuacgacugcgucuucgacuucaccgugguggucgacucccugcccacgcaccagcugcagugcuacggcgugagcccccggcgccucgccuccaugugcuacggcagcgugacccuggacgucaugcggaucaacgagacccaccugaacaaccucuucaaccgcgugcccgacaccuucucccuguacaacuacgcccugcccgacaacuucuacgggugccuccacgccuucuaccugaacagcacggcgccguacgccguggccaaccgcuuccccaucaagcccggcgggcggcaguccaacagcgccuucaucgacaccgucaucaacgccgcgcacuacagccccuucuccuacguguacggccuggccgugaucacccucaagccggccgccgggagcaagcuggucugccccguggccaacgacaccguggucaucacggaccgcugcgugcaguacaaccuguacggcuacaccggcaccggggugcuguccaagaacaccagccucgucauccccgacggcaagguguucacggcguccagcaccgggaccaucaucggcguguccaucaacagcaccacguacuccaucaugcccugcgucaccgugccggugagcgucggguaccaccccaacuucgagcgggcccugcuguucaacggccucuccugcagccagcgcucccgggccgugaccgagcccgugagcguccugugguccgccagcgccaccgcgcaggacgccuucgacacccccuccggcugcguggugaacgucgagcugcgcaacacgaccaucgugaacacgugcgccaugccgaucgggaacagccucugcuucaucaacggcagcaucgccaccgcgaacgccgacucccugccccggcugcagcucgugaacuacgacccccuguacgacaacagcaccgccacccccaugaccccggucuacugggugaaggugcccaccaacuucacgcuguccgccaccgaggaguacauccagaccaccgcccccaagaucacgaucgacugcgcgcgcuaccucugcggggacagcucccggugccugaacguccugcuccacuacggcaccuucugcaacgacaucaacaaggcccugagccgcguguccaccauccuggacagcgcccuccugucccuggugaaggagcucagcaucaacacccgggacgaggucacgaccuucuccuucgacggcgacuacaacuucaccgggcugaugggcugccuggggcccaacugcggcgccaccacguaccgcagcgccuucuccgaccuccuguacgacaaggugcggaucaccgacccgggguucaugcagagcuaccagaagugcaucgacucccaguggggcggcagcauccgcgaccugcucugcacccagaccuacaacgggaucgcggugcugccgcccaucgucucccccgccaugcaggcccuguacacgagccuccuggugggcgccguggccuccagcggguacaccuucggcaucaccagcgcgggggucauccccuucgccacccagcugcaguuccggcucaacggcaucggcgugacgacccaggugcuggucgagaaccagaagcugaucgccuccagcuucaacaacgcccucgugaacauccagaagggguucaccgagaccuccaucgcgcugagcaagaugcaggacgugaucaaccagcacgccgcccagcugcacacgcucgucgugcagcugggcaacuccuucggggccaucagcuccagcaucaacgagaucuucucccgccuggagccgcccgccgcgaacgccgaggucgaccggcucaucaacggccgcaugauggugcugaacaccuacgugacccagcugcucauccaggccagcgaggccaaggcccagaacgcgcuggccgcccagaagaucuccgagugcgucaaggcccagagccugcggaacgacuucugcgggaacggcacccacgugcucuccaucccccagcuggcccccaacggcgugcuguucauccacuacgcguacacgcccaccgaguacgccuucguccagaccagcgccgggcucugccacaacggcaccggguacgcgccccgccagggcauguucgugcugccgaacaacaccaacauguggcacuucacgaccaugcaguucuacaaccccgugaacaucuccgccagcaacacccagguccugaccuccugcagcgugaacuacacguccgugaacuacaccguccucgagcccagcgugcccggggacuacgacuuccagaaggaguucgacaaguucuacaagaaccugagcaccaucuucaacaacaccuucaacccgaacgacuucaacuucuccacgguggacgucaccgcccagaucaagagccugcacgacguggugaaccagcucaaccaguccuucaucgaccugaagaagcugaacgucuacgagaagugaggacuagucccuguucccagagcccacuuuuuuuucuuuuuuugaaauaaaauagccugucuuucagaucucaaaggcucuuuucagagccaccaaaaaaaaaaaaaaaaaaaaaaaaaaaaaaaaaaaaaaaaaaaaaaaaaaaaaaaaaaaaaaaaaaaaaaaaaaaaaaaaaaaaaaaaaaaaaaaaaaaaa

SEQ ID NO: 15073 - RNA, 3977 nt, Artificial Sequence
  BatCoV/HKU9-1 BF_005I__YP_001039971.1 spike protein mRNA gc (variant)
aggagagucccgcagucggcguccagcggcucugcuuguucgugugugugucguugcaggccuuauucaagcuuaccaugcugcucauccuggugcugggcgucagccucgccgccgccucccgccccgagugcuucaacccgcgguucacccugacgccccugaaccacacccucaacuacaccagcaucaaggccaagguguccaacgugcugcugcccgaccccuacaucgccuacagcgggcagacccuccgccagaaccuguucauggccgacauguccaacaccauccuguacccggucacgccgcccgccaacggcgcgaacgggggcuucaucuacaacaccagcaucauccccguguccgccggccucuucgugaacaccuggauguaccggcagcccgccagcucccgcgccuacugccaggagcccuucggggucgcguucggcgacaccuucgagaacgaccggaucgccauccugaucauggcccccgacaaccuggggagcugguccgccguggcgccccgcaaccagacgaacaucuaccuccuggugugcagcaacgccacccugugcaucaacccgggcuucaaccggugggggcccgccggcuccuucaucgcccccgacgcccucgucgaccacagcaacuccugcuucgugaacaacaccuucagcgugaacaucuccaccagccgcaucucccuggccuuccuguucaaggacggggaccuccugaucuaccacagcggcuggcugcccacgagcaacuucgagcacggcuucucccgggggagccacccgaugaccuacuucaugucccuccccgucggcgggaaccugccccgcgcgcaguucuuccagagcaucgugcgguccaacgccaucgacaagggcgacggcaugugcaccaacuucgacgugaaccugcacgucgcccaccucaucaaccgcgaccugcuggugagcuacuucaacaacggguccguggccaacgccgcggacugcgccgacagcgccgccgaggagcucuacugcgucaccggcuccuucgacccgcccacggggguguacccccugagccgguaccgcgcccagguggcgggcuucguccgggugacccagcgcggguccuacugcaccccgcccuacagcgugcugcaggacccgccccagcccgucguguggcggcgcuacaugcucuacgacugcgucuucgacuucaccgugguggucgacucccugcccacgcaccagcugcagugcuacggcgugagcccccggcgccucgccuccaugugcuacggcagcgugacccuggacgucaugcggaucaacgagacccaccugaacaaccucuucaaccgcgugcccgacaccuucucccuguacaacuacgcccugcccgacaacuucuacgggugccuccacgccuucuaccugaacagcacggcgccguacgccguggccaaccgcuuccccaucaagcccggcgggcggcaguccaacagcgccuucaucgacaccgucaucaacgccgcgcacuacagccccuucuccuacguguacggccuggccgugaucacccucaagccggccgccgggagcaagcuggucugccccguggccaacgacaccguggucaucacggaccgcugcgugcaguacaaccuguacggcuacaccggcaccggggugcuguccaagaacaccagccucgucauccccgacggcaagguguucacggcguccagcaccgggaccaucaucggcguguccaucaacagcaccacguacuccaucaugcccugcgucaccgugccggugagcgucggguaccaccccaacuucgagcgggcccugcuguucaacggccucuccugcagccagcgcucccgggccgugaccgagcccgugagcguccugugguccgccagcgccaccgcgcaggacgccuucgacacccccuccggcugcguggugaacgucgagcugcgcaacacgaccaucgugaacacgugcgccaugccgaucgggaacagccucugcuucaucaacggcagcaucgccaccgcgaacgccgacucccugccccggcugcagcucgugaacuacgacccccuguacgacaacagcaccgccacccccaugaccccggucuacugggugaaggugcccaccaacuucacgcuguccgccaccgaggaguacauccagaccaccgcccccaagaucacgaucgacugcgcgcgcuaccucugcggggacagcucccggugccugaacguccugcuccacuacggcaccuucugcaacgacaucaacaaggcccugagccgcguguccaccauccuggacagcgcccuccugucccuggugaaggagcucagcaucaacacccgggacgaggucacgaccuucuccuucgacggcgacuacaacuucaccgggcugaugggcugccuggggcccaacugcggcgccaccacguaccgcagcgccuucuccgaccuccuguacgacaaggugcggaucaccgacccgggguucaugcagagcuaccagaagugcaucgacucccaguggggcggcagcauccgcgaccugcucugcacccagaccuacaacgggaucgcggugcugccgcccaucgucucccccgccaugcaggcccuguacacgagccuccuggugggcgccguggccuccagcggguacaccuucggcaucaccagcgcgggggucauccccuucgccacccagcugcaguuccggcucaacggcaucggcgugacgacccaggugcuggucgagaaccagaagcugaucgccuccagcuucaacaacgcccucgugaacauccagaagggguucaccgagaccuccaucgcgcugagcaagaugcaggacgugaucaaccagcacgccgcccagcugcacacgcucgucgugcagcugggcaacuccuucggggccaucagcuccagcaucaacgagaucuucucccgccuggagccgcccgccgcgaacgccgaggucgaccggcucaucaacggccgcaugauggugcugaacaccuacgugacccagcugcucauccaggccagcgaggccaaggcccagaacgcgcuggccgcccagaagaucuccgagugcgucaaggcccagagccugcggaacgacuucugcgggaacggcacccacgugcucuccaucccccagcuggcccccaacggcgugcuguucauccacuacgcguacacgcccaccgaguacgccuucguccagaccagcgccgggcucugccacaacggcaccggguacgcgccccgccagggcauguucgugcugccgaacaacaccaacauguggcacuucacgaccaugcaguucuacaaccccgugaacaucuccgccagcaacacccagguccugaccuccugcagcgugaacuacacguccgugaacuacaccguccucgagcccagcgugcccggggacuacgacuuccagaaggaguucgacaaguucuacaagaaccugagcaccaucuucaacaacaccuucaacccgaacgacuucaacuucuccacgguggacgucaccgcccagaucaagagccugcacgacguggugaaccagcucaaccaguccuucaucgaccugaagaagcugaacgucuacgagaagggcggcuacauccccgaggcgccccgcgacgggcaggccuacgugcggaaggacggcgagugggugcuccugagcaccuucugaggacuagucccuguucccagagcccacuuuuuuuucuuuuuuugaaauaaaauagccugucuuucagaucucaaaggcucuuuucagagccaccaaaaaaaaaaaaaaaaaaaaaaaaaaaaaaaaaaaaaaaaaaaaaaaaaaaaaaaaaaaaaaaaaaaaaaaaaaaaaaaaaaaaaaaaaaaaaaaaaaaaa

SEQ ID NO: 15074 - RNA, 3755 nt, Artificial Sequence
  PDCoV/Swine/Thailand/S5011/2015__AMN91621.1 spike protein mRNA gc (1-1160)
aggagagucccgcagucggcguccagcggcucugcuuguucgugugugugucguugcaggccuuauucaagcuuaccaugcagcgcgcccugcucaucaugacccugcugugccucgcccgggcgaaguucgccgacgaccugcuggaccuccugaccuuccccggcgcccaccgcuuccugcacaagccgacgcggaacgacagcauccucuacucccgcgccaacaacaacuucgacguggggguccugcccggcuaccccaccaagaacgugaaccuguucagcccccucaccaacuccacccugccgaucaacgggcugcaccggagcuaccagccccucaugcugaacugccugacgaagaucaccaaccagacccucuccauguaccugcagcccagcgagauccagaccuacuccugcggcggggccauggugaaguaccagacgcacgacgcgguccgcaucauccuggaccucaucgccaccgaccggaucagcguggagguggucggccaggccggcgagaacuacguguucgugugcuccgaccaguucaacuacaccaccgcccugcacaacagcacguucuucucccugaacagccagcucuacugcuucaccaacaacaccuaccuggggauccugcccccggaccucaccgacuucacggucuaccgcaccggccaguucuacgcgaacggguaccugcugggcacccuccccaucaccgugaacuacgugcggcuguaccgcgggcagcuguccgccaacagcgcccacuucgcccucgccaaccugacggacacccugaucacccucaccaacacgaccaucucccagaucaccuacugcgacaagagcgucguggacuccaucgcgugccagcggagcucccaccagguggaggacggcuucuacagcgaccccaagagcgccguccgcgcccggcagcgcaccaucgugacgcugcccaagcugccggagcucgaggugguccagcugaacaucuccgcccacauggacuucggcgaggcccggcuggacagcgugaccaucaacgggaacaccuccuacugcgugaccaagcccuacuuccgccucgagacgaacuuccugugccggggcugcaccaugaaccugcgcaccgacacgugcagcuucgaccucuccgcggucaacaacgggaugagcuucucccaguucugccugagcaccgaguccggcgccugcgagaugaagaucaucgugaccuacguguggaacuaccugcugcggcagcgccucuacgucaccgccguggagggccagacccacaccgggacgaccagcguccacgccaccgacaccuccagcgugaucacggacgugugcaccgacuacaccaucuacggcgucuccgggaccggcaucaucaagcccagcgaccugcugcuccacaacgggaucgccuucacgucccccaccggcgagcuguacgcguucaagaacaucaccaccggcaagacgcuccaggugcugccgugcgagacccccagccagcugaucgugaucaacaacaccgucgugggggccaucaccuccagcaacuccacggagaacaaccgguucaccaccaccaucgugacgcccaccuucuucuacagcaccaacgccaccacgcugaacugcaccaagcccguccucagcuacggcccgaucuccgugugcagcgacggggccaucgccggcaccuccacccugcagaacacgcgccccagcaucgugucccuguacgacggggagaucgagauccccagcgcguucucccucagcguccagaccgaguaccuccaggugcaggccgagcaggucaucguggacugcccccaguacgugugcaacggcaacucccgcugccugcagcugcuggcccaguacaccagcgccugcuccaacaucgagguggcgcugcacagcuccgcccagcucgacagccgggagaucaucuccauguucaagaccagcacgcagucccugcagcuggccaacaucaccaacuucaagggcgacuacaacuucagcagcauccucaccucccgcgucgggggccggagcgccaucgaggaccugcuguucaacaagguggugaccuccgggcucggcacggucgaccaggacuacaagagcugcucccgcaacauggccaucgcggaccuggugugcagccaguacuacaacgggaucauggugcugccgggcgucguggacgccgagaagauggccauguacaccggcucccucaccggggccaugguguucggcgggcugaccgccgcggccgccauccccuucgccaccgccguccaggcgcggcugaacuacguggcccuccagacgaacgugcugcaggagaaccagaagauccuggccgagagcuucaaccaggccgucggcaacaucucccucgcgcugagcuccgugaacgacgccauccagcagaccagcgaggcccugaacaccguggccaucgccaucaagaagauccagaccgucgugaaccagcagggcgaggcgcucucccaccugacggcccagcugagcaacaacuuccaggccaucuccaccagcauccaggacaucuacaaccgccucgaggagguggaggccaaccagcaggucgaccggcugaucaacgggcgccuggccgcgcucaacgccuacgugacccagcugcugaaccagaugucccagauccggcagagccgccuccuggcccagcagaagaucaacgagugcgugaagucccagagcccccgguacggcuucugcgggaacggcacccacaucuucagccugacgcagaccgcccccaacgggaucuucuucaugcacgccguccucgugccgaacaaguucacccgcgugaacgcguccgccggcaucugcgucgacaacacccggggcuacagccugcagccccagcugauccucuaccaguucaacaacuccuggcgcgugacgccccggaacauguacgagccgcgccugccccggcaggccgacuucauccagcugaccgacugcagcgugaccuucuacaacaccacggccgcgaaccuccccaacaucauccccgacgucaucgacgugaaccagaccguguccgacaucaucgacaaccugccgaccgccaccccgccccagugggacgucgggaucuacaacaacacgauccugaaccucaccguggagaucaacgaccugcaggagcgcagcaagaaccugucccagaucgccgaccggcuccagaacuacaucgacaaccugaacaacacccugguggaccucgaguggcugaaccgcgucgagaccuaccugaaguggcccugguacaucuggcucgccaucgcccuggcgcugaucgccuucgugacgauccucaucaccaucuuccugugcaccggcugcugcgggggcugcuucgggugcugcggcggcugcuucgggcuguucagcaagaagaagcgcuacaccgacgaccagcccacgcccuccuucaaguucaaggaguggugaggacuagucccuguucccagagcccacuuuuuuuucuuuuuuugaaauaaaauagccugucuuucagaucucaaaggcucuuuucagagccaccaaaaaaaaaaaaaaaaaaaaaaaaaaaaaaaaaaaaaaaaaaaaaaaaaaaaaaaaaaaaaaaaaaaaaaaaaaaaaaaaaaaaaaaaaaaaaaaaaaaaa

SEQ ID NO: 15075 - RNA, 3755 nt, Artificial Sequence
  PDCoV/Swine/Thailand/S5011/2015__AMN91621.1 spike protein mRNA gc (1-1160)(E855P_V856P)
aggagagucccgcagucggcguccagcggcucugcuuguucgugugugugucguugcaggccuuauucaagcuuaccaugcagcgcgcccugcucaucaugacccugcugugccucgcccgggcgaaguucgccgacgaccugcuggaccuccugaccuuccccggcgcccaccgcuuccugcacaagccgacgcggaacgacagcauccucuacucccgcgccaacaacaacuucgacguggggguccugcccggcuaccccaccaagaacgugaaccuguucagcccccucaccaacuccacccugccgaucaacgggcugcaccggagcuaccagccccucaugcugaacugccugacgaagaucaccaaccagacccucuccauguaccugcagcccagcgagauccagaccuacuccugcggcggggccauggugaaguaccagacgcacgacgcgguccgcaucauccuggaccucaucgccaccgaccggaucagcguggagguggucggccaggccggcgagaacuacguguucgugugcuccgaccaguucaacuacaccaccgcccugcacaacagcacguucuucucccugaacagccagcucuacugcuucaccaacaacaccuaccuggggauccugcccccggaccucaccgacuucacggucuaccgcaccggccaguucuacgcgaacggguaccugcugggcacccuccccaucaccgugaacuacgugcggcuguaccgcgggcagcuguccgccaacagcgcccacuucgcccucgccaaccugacggacacccugaucacccucaccaacacgaccaucucccagaucaccuacugcgacaagagcgucguggacuccaucgcgugccagcggagcucccaccagguggaggacggcuucuacagcgaccccaagagcgccguccgcgcccggcagcgcaccaucgugacgcugcccaagcugccggagcucgaggugguccagcugaacaucuccgcccacauggacuucggcgaggcccggcuggacagcgugaccaucaacgggaacaccuccuacugcgugaccaagcccuacuuccgccucgagacgaacuuccugugccggggcugcaccaugaaccugcgcaccgacacgugcagcuucgaccucuccgcggucaacaacgggaugagcuucucccaguucugccugagcaccgaguccggcgccugcgagaugaagaucaucgugaccuacguguggaacuaccugcugcggcagcgccucuacgucaccgccguggagggccagacccacaccgggacgaccagcguccacgccaccgacaccuccagcgugaucacggacgugugcaccgacuacaccaucuacggcgucuccgggaccggcaucaucaagcccagcgaccugcugcuccacaacgggaucgccuucacgucccccaccggcgagcuguacgcguucaagaacaucaccaccggcaagacgcuccaggugcugccgugcgagacccccagccagcugaucgugaucaacaacaccgucgugggggccaucaccuccagcaacuccacggagaacaaccgguucaccaccaccaucgugacgcccaccuucuucuacagcaccaacgccaccacgcugaacugcaccaagcccguccucagcuacggcccgaucuccgugugcagcgacggggccaucgccggcaccuccacccugcagaacacgcgccccagcaucgugucccuguacgacggggagaucgagauccccagcgcguucucccucagcguccagaccgaguaccuccaggugcaggccgagcaggucaucguggacugcccccaguacgugugcaacggcaacucccgcugccugcagcugcuggcccaguacaccagcgccugcuccaacaucgagguggcgcugcacagcuccgcccagcucgacagccgggagaucaucuccauguucaagaccagcacgcagucccugcagcuggccaacaucaccaacuucaagggcgacuacaacuucagcagcauccucaccucccgcgucgggggccggagcgccaucgaggaccugcuguucaacaagguggugaccuccgggcucggcacggucgaccaggacuacaagagcugcucccgcaacauggccaucgcggaccuggugugcagccaguacuacaacgggaucauggugcugccgggcgucguggacgccgagaagauggccauguacaccggcucccucaccggggccaugguguucggcgggcugaccgccgcggccgccauccccuucgccaccgccguccaggcgcggcugaacuacguggcccuccagacgaacgugcugcaggagaaccagaagauccuggccgagagcuucaaccaggccgucggcaacaucucccucgcgcugagcuccgugaacgacgccauccagcagaccagcgaggcccugaacaccguggccaucgccaucaagaagauccagaccgucgugaaccagcagggcgaggcgcucucccaccugacggcccagcugagcaacaacuuccaggccaucuccaccagcauccaggacaucuacaaccgccucgagccgcccgaggccaaccagcaggucgaccggcugaucaacgggcgccuggccgcgcucaacgccuacgugacccagcugcugaaccagaugucccagauccggcagagccgccuccuggcccagcagaagaucaacgagugcgugaagucccagagcccccgguacggcuucugcgggaacggcacccacaucuucagccugacgcagaccgcccccaacgggaucuucuucaugcacgccgugcucguccccaacaaguucacccgcgugaacgcguccgccggcaucugcguggacaacacccggggcuacagccugcagccgcagcugauccucuaccaguucaacaacuccuggcgcgucacgccccggaacauguacgagccccgccugccccggcaggccgacuucauccagcugaccgacugcagcgugaccuucuacaacaccacggccgcgaaccucccgaacaucauccccgacgugaucgacgucaaccagaccguguccgacaucaucgacaaccugcccaccgccacgcccccgcagugggacguggggaucuacaacaacaccauccugaaccucaccgucgagaucaacgaccugcaggagcgcagcaagaaccugucccagaucgccgaccggcuccagaacuacaucgacaaccugaacaacacccugguggaccucgaguggcugaaccgcguggagaccuaccugaaguggcccugguacaucuggcucgccaucgcccuggcgcugaucgccuucgucacgauccucaucaccaucuuccugugcaccggcugcugcgggggcugcuucgggugcugcggcggcugcuucgggcuguucagcaagaagaagcgcuacaccgacgaccagcccacgcccuccuucaaguucaaggaguggugaggacuagucccuguucccagagcccacuuuuuuuucuuuuuuugaaauaaaauagccugucuuucagaucucaaaggcucuuuucagagccaccaaaaaaaaaaaaaaaaaaaaaaaaaaaaaaaaaaaaaaaaaaaaaaaaaaaaaaaaaaaaaaaaaaaaaaaaaaaaaaaaaaaaaaaaaaaaaaaaaaaaa

SEQ ID NO: 15076 - RNA, 3554 nt, Artificial Sequence
  PDCoV/Swine/Thailand/S5011/2015__AMN91621.1 spike protein mRNA gc (variant)
aggagagucccgcagucggcguccagcggcucugcuuguucgugugugugucguugcaggccuuauucaagcuuaccaugcagcgcgcccugcucaucaugacccugcugugccucgcccgggcgaaguucgccgacgaccugcuggaccuccugaccuuccccggcgcccaccgcuuccugcacaagccgacgcggaacgacagcauccucuacucccgcgccaacaacaacuucgacguggggguccugcccggcuaccccaccaagaacgugaaccuguucagcccccucaccaacuccacccugccgaucaacgggcugcaccggagcuaccagccccucaugcugaacugccugacgaagaucaccaaccagacccucuccauguaccugcagcccagcgagauccagaccuacuccugcggcggggccauggugaaguaccagacgcacgacgcgguccgcaucauccuggaccucaucgccaccgaccggaucagcguggagguggucggccaggccggcgagaacuacguguucgugugcuccgaccaguucaacuacaccaccgcccugcacaacagcacguucuucucccugaacagccagcucuacugcuucaccaacaacaccuaccuggggauccugcccccggaccucaccgacuucacggucuaccgcaccggccaguucuacgcgaacggguaccugcugggcacccuccccaucaccgugaacuacgugcggcuguaccgcgggcagcuguccgccaacagcgcccacuucgcccucgccaaccugacggacacccugaucacccucaccaacacgaccaucucccagaucaccuacugcgacaagagcgucguggacuccaucgcgugccagcggagcucccaccagguggaggacggcuucuacagcgaccccaagagcgccguccgcgcccggcagcgcaccaucgugacgcugcccaagcugccggagcucgaggugguccagcugaacaucuccgcccacauggacuucggcgaggcccggcuggacagcgugaccaucaacgggaacaccuccuacugcgugaccaagcccuacuuccgccucgagacgaacuuccugugccggggcugcaccaugaaccugcgcaccgacacgugcagcuucgaccucuccgcggucaacaacgggaugagcuucucccaguucugccugagcaccgaguccggcgccugcgagaugaagaucaucgugaccuacguguggaacuaccugcugcggcagcgccucuacgucaccgccguggagggccagacccacaccgggacgaccagcguccacgccaccgacaccuccagcgugaucacggacgugugcaccgacuacaccaucuacggcgucuccgggaccggcaucaucaagcccagcgaccugcugcuccacaacgggaucgccuucacgucccccaccggcgagcuguacgcguucaagaacaucaccaccggcaagacgcuccaggugcugccgugcgagacccccagccagcugaucgugaucaacaacaccgucgugggggccaucaccuccagcaacuccacggagaacaaccgguucaccaccaccaucgugacgcccaccuucuucuacagcaccaacgccaccacgcugaacugcaccaagcccguccucagcuacggcccgaucuccgugugcagcgacggggccaucgccggcaccuccacccugcagaacacgcgccccagcaucgugucccuguacgacggggagaucgagauccccagcgcguucucccucagcguccagaccgaguaccuccaggugcaggccgagcaggucaucguggacugcccccaguacgugugcaacggcaacucccgcugccugcagcugcuggcccaguacaccagcgccugcuccaacaucgagguggcgcugcacagcuccgcccagcucgacagccgggagaucaucuccauguucaagaccagcacgcagucccugcagcuggccaacaucaccaacuucaagggcgacuacaacuucagcagcauccucaccucccgcgucgggggccggagcgccaucgaggaccugcuguucaacaagguggugaccuccgggcucggcacggucgaccaggacuacaagagcugcucccgcaacauggccaucgcggaccuggugugcagccaguacuacaacgggaucauggugcugccgggcgucguggacgccgagaagauggccauguacaccggcucccucaccggggccaugguguucggcgggcugaccgccgcggccgccauccccuucgccaccgccguccaggcgcggcugaacuacguggcccuccagacgaacgugcugcaggagaaccagaagauccuggccgagagcuucaaccaggccgucggcaacaucucccucgcgcugagcuccgugaacgacgccauccagcagaccagcgaggcccugaacaccguggccaucgccaucaagaagauccagaccgucgugaaccagcagggcgaggcgcucucccaccugacggcccagcugagcaacaacuuccaggccaucuccaccagcauccaggacaucuacaaccgccucgagccgcccgaggccaaccagcaggucgaccggcugaucaacgggcgccuggccgcgcucaacgccuacgugacccagcugcugaaccagaugucccagauccggcagagccgccuccuggcccagcagaagaucaacgagugcgugaagucccagagcccccgguacggcuucugcgggaacggcacccacaucuucagccugacgcagaccgcccccaacgggaucuucuucaugcacgccgugcucguccccaacaaguucacccgcgugaacgcguccgccggcaucugcguggacaacacccggggcuacagccugcagccgcagcugauccucuaccaguucaacaacuccuggcgcgucacgccccggaacauguacgagccccgccugccccggcaggccgacuucauccagcugaccgacugcagcgugaccuucuacaacaccacggccgcgaaccucccgaacaucauccccgacgugaucgacgucaaccagaccguguccgacaucaucgacaaccugcccaccgccacgcccccgcagugggacguggggaucuacaacaacaccauccugaaccucaccgucgagaucaacgaccugcaggagcgcagcaagaaccugucccagaucgccgaccggcuccagaacuacaucgacaaccugaacaacacccugguggaccucgaguggcugaaccgcguggagaccugaggacuagucccuguucccagagcccacuuuuuuuucuuuuuuugaaauaaaauagccugucuuucagaucucaaaggcucuuuucagagccaccaaaaaaaaaaaaaaaaaaaaaaaaaaaaaaaaaaaaaaaaaaaaaaaaaaaaaaaaaaaaaaaaaaaaaaaaaaaaaaaaaaaaaaaaaaaaaaaaaaaaa

SEQ ID NO: 15077 - RNA, 3635 nt, Artificial Sequence
  PDCoV/Swine/Thailand/S5011/2015__AMN91621.1 spike protein mRNA gc (variant)
aggagagucccgcagucggcguccagcggcucugcuuguucgugugugugucguugcaggccuuauucaagcuuaccaugcagcgcgcccugcucaucaugacccugcugugccucgcccgggccaaguucgccgacgaccugcuggaccuccugaccuuccccggcgcccaccgcuuccugcacaagccgacgcggaacgacagcauccucuacucccgcgccaacaacaacuucgacguggggguccugcccggcuaccccaccaagaacgugaaccuguucagcccccucaccaacuccacccugccgaucaacgggcugcaccggagcuaccagccccucaugcugaacugccugacgaagaucaccaaccagacccucuccauguaccugcagcccagcgagauccagaccuacuccugcggcggggccauggugaaguaccagacgcacgacgcgguccgcaucauccuggaccucaucgccaccgaccggaucagcguggagguggucggccaggccggcgagaacuacguguucgugugcuccgaccaguucaacuacaccaccgcccugcacaacagcacguucuucucccugaacagccagcucuacugcuucaccaacaacaccuaccuggggauccugcccccggaccucaccgacuucacggucuaccgcaccggccaguucuacgcgaacggguaccugcugggcacccuccccaucaccgugaacuacgugcggcuguaccgcgggcagcuguccgccaacagcgcccacuucgcccucgccaaccugacggacacccugaucacccucaccaacacgaccaucucccagaucaccuacugcgacaagagcgucguggacuccaucgcgugccagcggagcucccaccagguggaggacggcuucuacagcgaccccaagagcgccguccgcgcccggcagcgcaccaucgugacgcugcccaagcugccggagcucgaggugguccagcugaacaucuccgcccacauggacuucggcgaggcccggcuggacagcgugaccaucaacgggaacaccuccuacugcgugaccaagcccuacuuccgccucgagacgaacuuccugugccggggcugcaccaugaaccugcgcaccgacacgugcagcuucgaccucuccgcggucaacaacgggaugagcuucucccaguucugccugagcaccgaguccggcgccugcgagaugaagaucaucgugaccuacguguggaacuaccugcugcggcagcgccucuacgucaccgccguggagggccagacccacaccgggacgaccagcguccacgccaccgacaccuccagcgugaucacggacgugugcaccgacuacaccaucuacggcgucuccgggaccggcaucaucaagcccagcgaccugcugcuccacaacgggaucgccuucacgucccccaccggcgagcuguacgcguucaagaacaucaccaccggcaagacgcuccaggugcugccgugcgagacccccagccagcugaucgugaucaacaacaccgucgugggggccaucaccuccagcaacuccacggagaacaaccgguucaccaccaccaucgugacgcccaccuucuucuacagcaccaacgccaccacgcugaacugcaccaagcccguccucagcuacggcccgaucuccgugugcagcgacggggccaucgccggcaccuccacccugcagaacacgcgccccagcaucgugucccuguacgacggggagaucgagauccccagcgcguucucccucagcguccagaccgaguaccuccaggugcaggccgagcaggucaucguggacugcccccaguacgugugcaacggcaacucccgcugccugcagcugcuggcccaguacaccagcgccugcuccaacaucgagguggcgcugcacagcuccgcccagcucgacagccgggagaucaucuccauguucaagaccagcacgcagucccugcagcuggccaacaucaccaacuucaagggcgacuacaacuucagcagcauccucaccucccgcgucgggggccggagcgccaucgaggaccugcuguucaacaagguggugaccuccgggcucggcacggucgaccaggacuacaagagcugcucccgcaacauggccaucgcggaccuggugugcagccaguacuacaacgggaucauggugcugccgggcgucguggacgccgagaagauggccauguacaccggcucccucaccggggccaugguguucggcgggcugaccgccgcggccgccauccccuucgccaccgccguccaggcgcggcugaacuacguggcccuccagacgaacgugcugcaggagaaccagaagauccuggccgagagcuucaaccaggccgucggcaacaucucccucgcgcugagcuccgugaacgacgccauccagcagaccagcgaggcccugaacaccguggccaucgccaucaagaagauccagaccgucgugaaccagcagggcgaggcgcucucccaccugacggcccagcugagcaacaacuuccaggccaucuccaccagcauccaggacaucuacaaccgccucgagccgcccgaggccaaccagcaggucgaccggcugaucaacgggcgccuggccgcgcucaacgccuacgugacccagcugcugaaccagaugucccagauccggcagagccgccuccuggcccagcagaagaucaacgagugcgugaagucccagagcccccgguacggcuucugcgggaacggcacccacaucuucagccugacgcagaccgcccccaacgggaucuucuucaugcacgccgugcucguccccaacaaguucacccgcgugaacgcguccgccggcaucugcguggacaacacccggggcuacagccugcagccgcagcugauccucuaccaguucaacaacuccuggcgcgucacgccccggaacauguacgagccccgccugccccggcaggccgacuucauccagcugaccgacugcagcgugaccuucuacaacaccacggccgcgaaccucccgaacaucauccccgacgugaucgacgucaaccagaccguguccgacaucaucgacaaccugcccaccgccacgcccccgcagugggacguggggaucuacaacaacaccauccugaaccucaccgucgagaucaacgaccugcaggagcgcagcaagaaccugucccagaucgccgaccggcuccagaacuacaucgacaaccugaacaacacccugguggaccucgaguggcugaaccgcguggagaccggcggguacauccccgaggcgccccgcgacggccaggccuacguccggaaggacggggagugggugcugcucagcacguucugaggacuagucccuguucccagagcccacuuuuuuuucuuuuuuugaaauaaaauagccugucuuucagaucucaaaggcucuuuucagagccaccaaaaaaaaaaaaaaaaaaaaaaaaaaaaaaaaaaaaaaaaaaaaaaaaaaaaaaaaaaaaaaaaaaaaaaaaaaaaaaaaaaaaaaaaaaaaaaaaaaaaa

SEQ ID NO: 15078 - RNA, 4433 nt, Artificial Sequence
  PEDV/NPL-PEDv/2013/P10__AHZ94887.1 spike protein mRNA gc (1-1386)
aggagagucccgcagucggcguccagcggcucugcuuguucgugugugugucguugcaggccuuauucaagcuuaccaugaagucccugaccuacuucuggcuguuccugcccgugcugagcacccucagccugccgcaggacgucacgcgcugcuccgccaacaccaacuuccggcgcuucuucagcaaguucaacgugcaggcccccgcgguggucgugcugggcggguaccuccccaucggcgagaaccagggggugaacuccaccugguacugcgccggccagcaccccaccgccagcgggguccacggcaucuucgugucccacauccggggcgggcacggcuucgagaucgggaucagccaggagccguucgaccccuccggcuaccagcuguaccugcacaaggccacgaacgggaacaccaacgccaccgcgcgccuccggaucugccaguuccccagcaucaagacccugggccccacggccaacaacgacgugaccaccggccgcaacugccuguucaacaaggccaucccggcccacauguccgagcacagcgucguggggaucaccugggacaacgaccgggugacggucuucuccgacaagaucuacuacuucuacuucaagaacgacuggagccgcguggcgaccaagugcuacaacuccggcgggugcgccaugcaguacguguacgagcccaccuacuacaugcucaacgucaccagcgccggcgaggacggcaucuccuaccagcccugcacggccaacugcaucggguacgccgcgaacguguucgccaccgagcccaacggccacaucccggagggguucagcuucaacaacugguuccugcuguccaacgacagcacccucgugcacggcaaggucgugagcaaccagccccugcuggugaacugccuccuggccauccccaagaucuacgggcugggccaguucuucuccuucaaccagaccaucgacggcgucugcaacggggccgccgugcagcgggcgcccgaggcccuccgcuucaacaucaacgacaucagcgugauccuggccgagggcuccaucguccugcacacggcccucgggaccaacuucagcuucgugugcuccaacagcuccaacccgcaccuggccaccuucgcgaucccccugggcgccacccagguccccuacuacugcuucuucaagguggacacguacaacagcaccguguacaaguuccucgccguccugcccccgaccgugcgggagaucgugaucaccaaguacggggacgucuacgugaacggcuucggcuaccugcaccucgggcugcuggacgccgugacgaucaacuucaccggccacgggaccgacgacgacgucuccggcuucuggaccaucgccagcacgaacuucguggacgcgcucaucgaggugcaggggaccgccauccagcgcauccuguacugcgacgaccccgucucccagcugaagugcagccagguggccuucgaccucgacgacggcuucuacaccaucuccagccggaaccugcugucccacgagcagcccaucagcuucgugacccuccccuccuucaacgaccacagcuucgucaacaucacgguguccgccagcuucggcgggcacagcggcgcgaaccugaucgccuccgacaccaccaucaacggguucagcuccuucugcguggacacccgccaguucaccaucagccuguucuacaacgucacgaacuccuacggcuacgugagcaagucccaggacagcaacugcccguucacccuccaguccgugaacgacuaccugagcuucuccaaguucugcgucagcaccucccugcucgccagcgccugcaccaucgaccuguucggcuaccccgaguucggguccggcgugaaguucacgagccuguacuuccaguucaccaagggggagcugaucaccggcacccccaagccccucgagggggugacggacgucuccuucaugacccuggacgugugcaccaaguacaccaucuacggcuucaagggcgaggggaucaucacgcugaccaacagcagcuuccucgccggcguguacuacaccuccgacagcgggcagcugcuggcguucaagaacgucaccuccggcgccguguacagcgugacgccgugcuccuucagcgagcaggccgccuacgucgacgacgacaucgugggggugaucuccagccucuccagcuccaccuucaacagcacccgggagcugcccggcuucuucuaccacuccaacgacggcagcaacugcaccgagcccguccugguguacuccaacaucggggugugcaagagcggcuccaucggguacgucccgagccaguccggccaggugaagaucgcccccacggugaccgggaacaucagcauccccaccaacuucagcauguccauccgcaccgaguaccuccagcuguacaacacgcccgucagcguggacugcgcgaccuacgugugcaacggcaacucccggugcaagcagcugcucacccaguacaccgccgccugcaagacgaucgagagcgcccugcagcuguccgcccgccucgagagcgucgaggugaacuccaugcugaccaucagcgacgaggcgcugcagcucgccaccaucuccagcuucaacggcgacggguacaacuucaccaacgugcugggcgucuccguguacgacccggccagccggcgcgugguccagaagcgguccuucaucgaggaccuccucuucaacaagguggugacgaacgggcugggcaccgucgacgaggacuacaagcgcugcagcaacgggcgcuccguggccgaccuggucugcgcgcaguacuacagcggcgugauggugcuccccggcgucguggacgccgagaagcugcacauguacuccgccagccugaucgggggcauggugcucgggggcuucaccuccgccgccgcgcugcccuucagcuacgccguccaggcccggcugaacuaccucgcccugcagaccgacgugcugcagcgcaaccagcagcuccuggccgagagcuucaacuccgcgaucggcaacaucacgagcgccuucgaguccgugaaggaggccaucagccagaccuccaaggggcugaacaccgucgcccacgcccucaccaaggugcaggagguggucaacagccagggcgcggcccugacccagcugacggugcagcuccagcacaacuuccaggccaucuccagcuccaucgacgacaucuacagccggcuggacauccuguccgccgacgcccagguggaccgccucaucaccgggcggcugagcgcccugaacgccuucgucgcccagacccucaccaaguacacggaggugcaggccucccgcaagcuggcgcagcagaaggugaacgagugcgucaagagccagucccagcgguacggcuucugcgggggcgacggcgagcacaucuucagccuggugcaggccgcgccccaggggcuccuguuccugcacaccgugcucgucccguccgacuucguggacgugaucgccaucgccggccugugcgucaacgacgagaucgcgcugacccuccgcgagcccgggcuggugcuguucacccacgagcuccagaaccacacggccaccgaguacuucgugagcucccggcgcauguucgagccccggaagcccaccgucagcgacuucgugcagaucgagagcugcguggucaccuacgugaaccugacgcgcgaccagcugccggacgugauccccgacuacaucgacgucaacaagacccucuacgagauccuggccucccugcccaaccggaccggccccagccucccgcuggacguguucaacgccaccuaccugaaccucacgggggagaucgccgaccuggagcagcgcuccgagagccugcggaacaccaccgaggagcuccagucccugaucuacaacaucaacaacacccugguggaccucgaguggcugaaccgcgucgagacguacaucaaguggcccugguggguguggcugaucaucuucaucgugcucaucuucgucgugagccugcugguguucugcugcaucuccaccggcugcugcggcugcugcgggugcugcugcgcgugcuucagcggcugcugccgggggccccgccuccagcccuacgaggucuucgagaaggugcacgugcagugaggacuagucccuguucccagagcccacuuuuuuuucuuuuuuugaaauaaaauagccugucuuucagaucucaaaggcucuuuucagagccaccaaaaaaaaaaaaaaaaaaaaaaaaaaaaaaaaaaaaaaaaaaaaaaaaaaaaaaaaaaaaaaaaaaaaaaaaaaaaaaaaaaaaaaaaaaaaaaaaaaaaa

SEQ ID NO: 15079 - RNA, 4433 nt, Artificial Sequence
  PEDV/NPL-PEDv/2013/P10__AHZ94887.1 spike protein mRNA gc (1-1386)(I1076P_L1077P)
aggagagucccgcagucggcguccagcggcucugcuuguucgugugugugucguugcaggccuuauucaagcuuaccaugaagucccugaccuacuucuggcuguuccugcccgugcugagcacccucagccugccgcaggacgucacgcgcugcuccgccaacaccaacuuccggcgcuucuucagcaaguucaacgugcaggcccccgcgguggucgugcugggcggguaccuccccaucggcgagaaccagggggugaacuccaccugguacugcgccggccagcaccccaccgccagcgggguccacggcaucuucgugucccacauccggggcgggcacggcuucgagaucgggaucagccaggagccguucgaccccuccggcuaccagcuguaccugcacaaggccacgaacgggaacaccaacgccaccgcgcgccuccggaucugccaguuccccagcaucaagacccugggccccacggccaacaacgacgugaccaccggccgcaacugccuguucaacaaggccaucccggcccacauguccgagcacagcgucguggggaucaccugggacaacgaccgggugacggucuucuccgacaagaucuacuacuucuacuucaagaacgacuggagccgcguggcgaccaagugcuacaacuccggcgggugcgccaugcaguacguguacgagcccaccuacuacaugcucaacgucaccagcgccggcgaggacggcaucuccuaccagcccugcacggccaacugcaucggguacgccgcgaacguguucgccaccgagcccaacggccacaucccggagggguucagcuucaacaacugguuccugcuguccaacgacagcacccucgugcacggcaaggucgugagcaaccagccccugcuggugaacugccuccuggccauccccaagaucuacgggcugggccaguucuucuccuucaaccagaccaucgacggcgucugcaacggggccgccgugcagcgggcgcccgaggcccuccgcuucaacaucaacgacaucagcgugauccuggccgagggcuccaucguccugcacacggcccucgggaccaacuucagcuucgugugcuccaacagcuccaacccgcaccuggccaccuucgcgaucccccugggcgccacccagguccccuacuacugcuucuucaagguggacacguacaacagcaccguguacaaguuccucgccguccugcccccgaccgugcgggagaucgugaucaccaaguacggggacgucuacgugaacggcuucggcuaccugcaccucgggcugcuggacgccgugacgaucaacuucaccggccacgggaccgacgacgacgucuccggcuucuggaccaucgccagcacgaacuucguggacgcgcucaucgaggugcaggggaccgccauccagcgcauccuguacugcgacgaccccgucucccagcugaagugcagccagguggccuucgaccucgacgacggcuucuacaccaucuccagccggaaccugcugucccacgagcagcccaucagcuucgugacccuccccuccuucaacgaccacagcuucgucaacaucacgguguccgccagcuucggcgggcacagcggcgcgaaccugaucgccuccgacaccaccaucaacggguucagcuccuucugcguggacacccgccaguucaccaucagccuguucuacaacgucacgaacuccuacggcuacgugagcaagucccaggacagcaacugcccguucacccuccaguccgugaacgacuaccugagcuucuccaaguucugcgucagcaccucccugcucgccagcgccugcaccaucgaccuguucggcuaccccgaguucggguccggcgugaaguucacgagccuguacuuccaguucaccaagggggagcugaucaccggcacccccaagccccucgagggggugacggacgucuccuucaugacccuggacgugugcaccaaguacaccaucuacggcuucaagggcgaggggaucaucacgcugaccaacagcagcuuccucgccggcguguacuacaccuccgacagcgggcagcugcuggcguucaagaacgucaccuccggcgccguguacagcgugacgccgugcuccuucagcgagcaggccgccuacgucgacgacgacaucgugggggugaucuccagccucuccagcuccaccuucaacagcacccgggagcugcccggcuucuucuaccacuccaacgacggcagcaacugcaccgagcccguccugguguacuccaacaucggggugugcaagagcggcuccaucggguacgucccgagccaguccggccaggugaagaucgcccccacggugaccgggaacaucagcauccccaccaacuucagcauguccauccgcaccgaguaccuccagcuguacaacacgcccgucagcguggacugcgcgaccuacgugugcaacggcaacucccggugcaagcagcugcucacccaguacaccgccgccugcaagacgaucgagagcgcccugcagcuguccgcccgccucgagagcgucgaggugaacuccaugcugaccaucagcgacgaggcgcugcagcucgccaccaucuccagcuucaacggcgacggguacaacuucaccaacgugcugggcgucuccguguacgacccggccagccggcgcgugguccagaagcgguccuucaucgaggaccuccucuucaacaagguggugacgaacgggcugggcaccgucgacgaggacuacaagcgcugcagcaacgggcgcuccguggccgaccuggucugcgcgcaguacuacagcggcgugauggugcuccccggcgucguggacgccgagaagcugcacauguacuccgccagccugaucgggggcauggugcucgggggcuucaccuccgccgccgcgcugcccuucagcuacgccguccaggcccggcugaacuaccucgcccugcagaccgacgugcugcagcgcaaccagcagcuccuggccgagagcuucaacuccgcgaucggcaacaucacgagcgccuucgaguccgugaaggaggccaucagccagaccuccaaggggcugaacaccgucgcccacgcccucaccaaggugcaggagguggucaacagccagggcgcggcccugacccagcugacggugcagcuccagcacaacuuccaggccaucuccagcuccaucgacgacaucuacagccggcuggacccgcccuccgccgacgcccagguggaccgccugaucaccgggcggcucagcgcccugaacgccuucgucgcccagacccugaccaaguacacggaggugcaggccucccgcaagcucgcgcagcagaaggugaacgagugcgucaagagccagucccagcgguacggcuucugcgggggcgacggcgagcacaucuucagccuggugcaggccgcgccccaggggcuccuguuccugcacaccgugcugguccccuccgacuucguggacgugaucgccaucgccggccucugcgucaacgacgagaucgcgcugacccugcgcgagcccgggcucgugcuguucacccacgagcugcagaaccacacggccaccgaguacuucgugagcucccggcgcauguucgagccgcggaagcccaccgucagcgacuucgugcagaucgagagcugcguggucaccuacgugaaccucacgcgcgaccagcugcccgacgugauccccgacuacaucgacgucaacaagacccuguacgagauccucgccucccugccgaaccggaccggccccagccugccccucgacguguucaacgccaccuaccugaaccugacgggggagaucgccgaccucgagcagcgcuccgagagccugcggaacaccaccgaggagcugcagucccucaucuacaacaucaacaacacccugguggaccuggaguggcucaaccgcgucgagacguacaucaaguggcccugguggguguggcugaucaucuucaucgugcugaucuucgucgugagccuccugguguucugcugcaucuccaccggcugcugcggcugcugcgggugcugcugcgcgugcuucagcggcugcugccgggggccgcgccugcagcccuacgaggucuucgagaaggugcacgugcagugaggacuagucccuguucccagagcccacuuuuuuuucuuuuuuugaaauaaaauagccugucuuucagaucucaaaggcucuuuucagagccaccaaaaaaaaaaaaaaaaaaaaaaaaaaaaaaaaaaaaaaaaaaaaaaaaaaaaaaaaaaaaaaaaaaaaaaaaaaaaaaaaaaaaaaaaaaaaaaaaaaaaa

SEQ ID NO: 15080 - RNA, 4241 nt, Artificial Sequence
  PEDV/NPL-PEDv/2013/P10__AHZ94887.1 spike protein mRNA gc (variant)
aggagagucccgcagucggcguccagcggcucugcuuguucgugugugugucguugcaggccuuauucaagcuuaccaugaagucccugaccuacuucuggcuguuccugcccgugcugagcacccucagccugccgcaggacgucacgcgcugcuccgccaacaccaacuuccggcgcuucuucagcaaguucaacgugcaggcccccgcgguggucgugcugggcggguaccuccccaucggcgagaaccagggggugaacuccaccugguacugcgccggccagcaccccaccgccagcgggguccacggcaucuucgugucccacauccggggcgggcacggcuucgagaucgggaucagccaggagccguucgaccccuccggcuaccagcuguaccugcacaaggccacgaacgggaacaccaacgccaccgcgcgccuccggaucugccaguuccccagcaucaagacccugggccccacggccaacaacgacgugaccaccggccgcaacugccuguucaacaaggccaucccggcccacauguccgagcacagcgucguggggaucaccugggacaacgaccgggugacggucuucuccgacaagaucuacuacuucuacuucaagaacgacuggagccgcguggcgaccaagugcuacaacuccggcgggugcgccaugcaguacguguacgagcccaccuacuacaugcucaacgucaccagcgccggcgaggacggcaucuccuaccagcccugcacggccaacugcaucggguacgccgcgaacguguucgccaccgagcccaacggccacaucccggagggguucagcuucaacaacugguuccugcuguccaacgacagcacccucgugcacggcaaggucgugagcaaccagccccugcuggugaacugccuccuggccauccccaagaucuacgggcugggccaguucuucuccuucaaccagaccaucgacggcgucugcaacggggccgccgugcagcgggcgcccgaggcccuccgcuucaacaucaacgacaucagcgugauccuggccgagggcuccaucguccugcacacggcccucgggaccaacuucagcuucgugugcuccaacagcuccaacccgcaccuggccaccuucgcgaucccccugggcgccacccagguccccuacuacugcuucuucaagguggacacguacaacagcaccguguacaaguuccucgccguccugcccccgaccgugcgggagaucgugaucaccaaguacggggacgucuacgugaacggcuucggcuaccugcaccucgggcugcuggacgccgugacgaucaacuucaccggccacgggaccgacgacgacgucuccggcuucuggaccaucgccagcacgaacuucguggacgcgcucaucgaggugcaggggaccgccauccagcgcauccuguacugcgacgaccccgucucccagcugaagugcagccagguggccuucgaccucgacgacggcuucuacaccaucuccagccggaaccugcugucccacgagcagcccaucagcuucgugacccuccccuccuucaacgaccacagcuucgucaacaucacgguguccgccagcuucggcgggcacagcggcgcgaaccugaucgccuccgacaccaccaucaacggguucagcuccuucugcguggacacccgccaguucaccaucagccuguucuacaacgucacgaacuccuacggcuacgugagcaagucccaggacagcaacugcccguucacccuccaguccgugaacgacuaccugagcuucuccaaguucugcgucagcaccucccugcucgccagcgccugcaccaucgaccuguucggcuaccccgaguucggguccggcgugaaguucacgagccuguacuuccaguucaccaagggggagcugaucaccggcacccccaagccccucgagggggugacggacgucuccuucaugacccuggacgugugcaccaaguacaccaucuacggcuucaagggcgaggggaucaucacgcugaccaacagcagcuuccucgccggcguguacuacaccuccgacagcgggcagcugcuggcguucaagaacgucaccuccggcgccguguacagcgugacgccgugcuccuucagcgagcaggccgccuacgucgacgacgacaucgugggggugaucuccagccucuccagcuccaccuucaacagcacccgggagcugcccggcuucuucuaccacuccaacgacggcagcaacugcaccgagcccguccugguguacuccaacaucggggugugcaagagcggcuccaucggguacgucccgagccaguccggccaggugaagaucgcccccacggugaccgggaacaucagcauccccaccaacuucagcauguccauccgcaccgaguaccuccagcuguacaacacgcccgucagcguggacugcgcgaccuacgugugcaacggcaacucccggugcaagcagcugcucacccaguacaccgccgccugcaagacgaucgagagcgcccugcagcuguccgcccgccucgagagcgucgaggugaacuccaugcugaccaucagcgacgaggcgcugcagcucgccaccaucuccagcuucaacggcgacggguacaacuucaccaacgugcugggcgucuccguguacgacccggccagccggcgcgugguccagaagcgguccuucaucgaggaccuccucuucaacaagguggugacgaacgggcugggcaccgucgacgaggacuacaagcgcugcagcaacgggcgcuccguggccgaccuggucugcgcgcaguacuacagcggcgugauggugcuccccggcgucguggacgccgagaagcugcacauguacuccgccagccugaucgggggcauggugcucgggggcuucaccuccgccgccgcgcugcccuucagcuacgccguccaggcccggcugaacuaccucgcccugcagaccgacgugcugcagcgcaaccagcagcuccuggccgagagcuucaacuccgcgaucggcaacaucacgagcgccuucgaguccgugaaggaggccaucagccagaccuccaaggggcugaacaccgucgcccacgcccucaccaaggugcaggagguggucaacagccagggcgcggcccugacccagcugacggugcagcuccagcacaacuuccaggccaucuccagcuccaucgacgacaucuacagccggcuggacccgcccuccgccgacgcccagguggaccgccugaucaccgggcggcucagcgcccugaacgccuucgucgcccagacccugaccaaguacacggaggugcaggccucccgcaagcucgcgcagcagaaggugaacgagugcgucaagagccagucccagcgguacggcuucugcgggggcgacggcgagcacaucuucagccuggugcaggccgcgccccaggggcuccuguuccugcacaccgugcugguccccuccgacuucguggacgugaucgccaucgccggccucugcgucaacgacgagaucgcgcugacccugcgcgagcccgggcucgugcuguucacccacgagcugcagaaccacacggccaccgaguacuucgugagcucccggcgcauguucgagccgcggaagcccaccgucagcgacuucgugcagaucgagagcugcguggucaccuacgugaaccucacgcgcgaccagcugcccgacgugauccccgacuacaucgacgucaacaagacccuguacgagauccucgccucccugccgaaccggaccggccccagccugccccucgacguguucaacgccaccuaccugaaccugacgggggagaucgccgaccucgagcagcgcuccgagagccugcggaacaccaccgaggagcugcagucccucaucuacaacaucaacaacacccugguggaccuggaguggcucaaccgcgucgagacgugaggacuagucccuguucccagagcccacuuuuuuuucuuuuuuugaaauaaaauagccugucuuucagaucucaaaggcucuuuucagagccaccaaaaaaaaaaaaaaaaaaaaaaaaaaaaaaaaaaaaaaaaaaaaaaaaaaaaaaaaaaaaaaaaaaaaaaaaaaaaaaaaaaaaaaaaaaaaaaaaaaaaa

SEQ ID NO: 15081 - RNA, 4322 nt, Artificial Sequence
  PEDV/NPL-PEDv/2013/P10__AHZ94887.1 spike protein mRNA gc (variant)
aggagagucccgcagucggcguccagcggcucugcuuguucgugugugugucguugcaggccuuauucaagcuuaccaugaagucccugaccuacuucuggcuguuccugcccgugcugagcacccucagccugccgcaggacgucacgcgcugcuccgccaacaccaacuuccggcgcuucuucagcaaguucaacgugcaggcccccgcgguggucgugcugggcggguaccuccccaucggcgagaaccagggggugaacuccaccugguacugcgccggccagcaccccaccgccagcgggguccacggcaucuucgugucccacauccggggcgggcacggcuucgagaucgggaucagccaggagccguucgaccccuccggcuaccagcuguaccugcacaaggccacgaacgggaacaccaacgccaccgcgcgccuccggaucugccaguuccccagcaucaagacccugggccccacggccaacaacgacgugaccaccggccgcaacugccuguucaacaaggccaucccggcccacauguccgagcacagcgucguggggaucaccugggacaacgaccgggugacggucuucuccgacaagaucuacuacuucuacuucaagaacgacuggagccgcguggcgaccaagugcuacaacuccggcgggugcgccaugcaguacguguacgagcccaccuacuacaugcucaacgucaccagcgccggcgaggacggcaucuccuaccagcccugcacggccaacugcaucggguacgccgcgaacguguucgccaccgagcccaacggccacaucccggagggguucagcuucaacaacugguuccugcuguccaacgacagcacccucgugcacggcaaggucgugagcaaccagccccugcuggugaacugccuccuggccauccccaagaucuacgggcugggccaguucuucuccuucaaccagaccaucgacggcgucugcaacggggccgccgugcagcgggcgcccgaggcccuccgcuucaacaucaacgacaucagcgugauccuggccgagggcuccaucguccugcacacggcccucgggaccaacuucagcuucgugugcuccaacagcuccaacccgcaccuggccaccuucgcgaucccccugggcgccacccagguccccuacuacugcuucuucaagguggacacguacaacagcaccguguacaaguuccucgccguccugcccccgaccgugcgggagaucgugaucaccaaguacggggacgucuacgugaacggcuucggcuaccugcaccucgggcugcuggacgccgugacgaucaacuucaccggccacgggaccgacgacgacgucuccggcuucuggaccaucgccagcacgaacuucguggacgcgcucaucgaggugcaggggaccgccauccagcgcauccuguacugcgacgaccccgucucccagcugaagugcagccagguggccuucgaccucgacgacggcuucuacaccaucuccagccggaaccugcugucccacgagcagcccaucagcuucgugacccuccccuccuucaacgaccacagcuucgucaacaucacgguguccgccagcuucggcgggcacagcggcgcgaaccugaucgccuccgacaccaccaucaacggguucagcuccuucugcguggacacccgccaguucaccaucagccuguucuacaacgucacgaacuccuacggcuacgugagcaagucccaggacagcaacugcccguucacccuccaguccgugaacgacuaccugagcuucuccaaguucugcgucagcaccucccugcucgccagcgccugcaccaucgaccuguucggcuaccccgaguucggguccggcgugaaguucacgagccuguacuuccaguucaccaagggggagcugaucaccggcacccccaagccccucgagggggugacggacgucuccuucaugacccuggacgugugcaccaaguacaccaucuacggcuucaagggcgaggggaucaucacgcugaccaacagcagcuuccucgccggcguguacuacaccuccgacagcgggcagcugcuggcguucaagaacgucaccuccggcgccguguacagcgugacgccgugcuccuucagcgagcaggccgccuacgucgacgacgacaucgugggggugaucuccagccucuccagcuccaccuucaacagcacccgggagcugcccggcuucuucuaccacuccaacgacggcagcaacugcaccgagcccguccugguguacuccaacaucggggugugcaagagcggcuccaucggguacgucccgagccaguccggccaggugaagaucgcccccacggugaccgggaacaucagcauccccaccaacuucagcauguccauccgcaccgaguaccuccagcuguacaacacgcccgucagcguggacugcgcgaccuacgugugcaacggcaacucccggugcaagcagcugcucacccaguacaccgccgccugcaagacgaucgagagcgcccugcagcuguccgcccgccucgagagcgucgaggugaacuccaugcugaccaucagcgacgaggcgcugcagcucgccaccaucuccagcuucaacggcgacggguacaacuucaccaacgugcugggcgucuccguguacgacccggccagccggcgcgugguccagaagcgguccuucaucgaggaccuccucuucaacaagguggugacgaacgggcugggcaccgucgacgaggacuacaagcgcugcagcaacgggcgcuccguggccgaccuggucugcgcgcaguacuacagcggcgugauggugcuccccggcgucguggacgccgagaagcugcacauguacuccgccagccugaucgggggcauggugcucgggggcuucaccuccgccgccgcgcugcccuucagcuacgccguccaggcccggcugaacuaccucgcccugcagaccgacgugcugcagcgcaaccagcagcuccuggccgagagcuucaacuccgcgaucggcaacaucacgagcgccuucgaguccgugaaggaggccaucagccagaccuccaaggggcugaacaccgucgcccacgcccucaccaaggugcaggagguggucaacagccagggcgcggcccugacccagcugacggugcagcuccagcacaacuuccaggccaucuccagcuccaucgacgacaucuacagccggcuggacccgcccuccgccgacgcccagguggaccgccugaucaccgggcggcucagcgcccugaacgccuucgucgcccagacccugaccaaguacacggaggugcaggccucccgcaagcucgcgcagcagaaggugaacgagugcgucaagagccagucccagcgguacggcuucugcgggggcgacggcgagcacaucuucagccuggugcaggccgcgccccaggggcuccuguuccugcacaccgugcugguccccuccgacuucguggacgugaucgccaucgccggccucugcgucaacgacgagaucgcgcugacccugcgcgagcccgggcucgugcuguucacccacgagcugcagaaccacacggccaccgaguacuucgugagcucccggcgcauguucgagccgcggaagcccaccgucagcgacuucgugcagaucgagagcugcguggucaccuacgugaaccucacgcgcgaccagcugcccgacgugauccccgacuacaucgacgucaacaagacccuguacgagauccucgccucccugccgaaccggaccggccccagccugccccucgacguguucaacgccaccuaccugaaccugacgggggagaucgccgaccucgagcagcgcuccgagagccugcggaacaccaccgaggagcugcagucccucaucuacaacaucaacaacacccugguggaccuggaguggcucaaccgcgucgagacgggcggcuacauccccgaggcgccgcgggacgggcaggccuacgugcgcaaggacggcgagugggugcugcugagcaccuucugaggacuagucccuguucccagagcccacuuuuuuuucuuuuuuugaaauaaaauagccugucuuucagaucucaaaggcucuuuucagagccaccaaaaaaaaaaaaaaaaaaaaaaaaaaaaaaaaaaaaaaaaaaaaaaaaaaaaaaaaaaaaaaaaaaaaaaaaaaaaaaaaaaaaaaaaaaaaaaaaaaaaa

SEQ ID NO: 15082 - RNA, 4358 nt, Artificial Sequence
  MHV/S__BAK18575.1 spike protein mRNA gc (1-1361)
aggagagucccgcagucggcguccagcggcucugcuuguucgugugugugucguugcaggccuuauucaagcuuaccaugcugagcguguucauccucuuccugcccuccugccugggcuacaucggggacuuccgcugcaucaaccucgucaacaccgacaccagcaacgccuccgccccgagcguguccacggagguggucgacgugagcaagggcaucgggaccuacuacgugcuggaccgggucuaccugaacgcgacccuccugcugaccggcuacuaccccguggacggguccaacuaccgcaaccucgcccugacgggcaccaacacccugagccucaacugguacaagccgcccuuccuguccgaguucaacgacggcaucuucgccaaggugaagaaccugaaggccagccuccccaaggacuccaccagcuacuuccccacgaucgucaucggguccaacuucgugaccaccagcuacaccgugguccuggagcccuacaacggcaucaucauggccuccaucugccaguacacgaucugccugcuccccuacaccgacugcaagccgaacaccgggggcaacaagcugaucggguucuggcacaucgaccugaagucccccgugugcauccucaagcggaacuucaccuucaacgugaacgcggacuggcuguacuuccacuucuaccagcagggcggcacguucuacgccuacuacgccgacgccggguccgcgaccaccuuccuguucagcuccuacaucggcgacguccucacccaguacuucgugcugcccuucgugugcacgcccaccaccaccggggucuucagcccgcaguacugggugacgccccuggugaagcgccaguaccucuucaacuucaaccagaagggcaccaucaccagcgccgucgacugcgccuccagcuacaccuccgagaucaagugcaagacgcagagcaugaaccccaacaccggcguguacgaccuguccggguacaccgugcagcccgucggccugguguaccggcgcguccggaaccucccggacugccgcaucgaggacuggcuggccgccaagaccgugcccagcccccugaacugggagcggaagacguuccagaacugcaacuucaaccucuccagccugcugcgccucgugcaggcggggucccugagcugcuccaacaucgacgccgccaaggucuacggcaugugcuucgggagcauguccaucgacaaguucgccauccccaacagccggcgcguggaccugcagcucggcaacuccggcuuccugcagagcuucaacuacaagaucgacacccgggccaccuccugccagcuguacuacagccucgcgcaguccaacgugaccgucaacaaccacaacccgagcagcuggaaccgccgguacggguucaacgacguggccacguucggccgcgggaagcacgacguggccuacgccgaggccugcuucaccgucggcgcguccuacugccccugcgccaaccccagcaucgugucccccugcaccaccgggaagccgaaguucgccaacugccccaccggcacgaccaaccgggagugcaacgugcuggcccugggcagcaaccucuucaagugcgacugcacgugcaaccccagcccccugaccaccuacgaccugcgcugccugcaggggcggagcaugcucggcgucggggaccacugcgagggccugggggugcuggaggacaagugcggcggcuccaacacgugcaacugcagcgccgacgcguucguggggugggccaaggacuccugccucagcaacggccgcugccacaucuucuccaaccugaugcugaacgggaucaacagcggcacgaccugcuccaccgaccuccagcugccgaacaccgaggucgugaccggcaucugcgugaaguacgaccuguacgggaucaccggccagggggucuucaaggaggugaaggccgacuacuacaacagcuggcagaaccuccuguacgacgugaacggcaaccugaacggguuccgggacaucgucaccaacaagaccuaccucacccgcuccugcuacagcggccgcguguccgccgcguaccaccaggacgcccccgagcccgcccugcuguaccggaaccucaagugcgacuacguguucaacaacaacaucuuccgcgaggagaccccgcugaacuacuucgacagcuaccugggcugcgucgugaacgccgacaacagcacggagcaggccguggacgcgugcgaccuccggaugggguccggccugugcgucaacuacagcaccgcccaccgcgcccggaccuccgugagcaccggguacaagcugacgaccuucgagcccuucaccguguccaucgucaacgacagcguggaguccgugggcgggcucuacgagaugcagauccccaccaacuucacgaucgccagccaccaggaguucauccagacccgcgcccccaaggucaccaucgacugcgcggccuucgugugcggcgacuacaccacgugccggcagcagcugguggaguacggcuccuucugcgacaacaucaacgccauccugggggaggucaacaaccucaucgacaccaugcagcuccagguggccagcgcccugauccagggcgugacccucuccagccgccuggcggacgggaucuccggccagaucgacgacaucaacuucagcccgcugcucgggugccugggcucccagugcagcgagggcaccauggccgcccaggggcgguccacggucgaggaccugcuguucgacaaggugaagcugagcgacgugggcuucgucgaggccuacaacaacugcaccgggggccaggaggugcgcgaccugcucugcgugcaguccuucaacgggaucaagguccugccgcccgugcugagcgagaaccaggugagcggcuacaccgcgggcgccaccgccuccagcauguucccgcccugguccgccgccgcggggguccccuucagccucuccgugcaguaccggaucaacggccugggggugacgaugaacguccugagcgagaaccagaagaugaucgccuccgccuucaacaacgccaucggcgccauccaggagggcuucgacgcgaccaacagcgcccucgccaagauccaguccguggucaacgccaacgccgaggcgcugaacaaccugcucaaccagcugagcaaccgcuucggggccaucuccgccagccugcaggagauccucucccggcuggacgcccuggaggcgcaggcccagaucgaccgccucaucaacggccggcugaccgcccugaacgccuacgugagcaagcagcucuccgacaugacccugaucaaggugagcgccgcgcaggccaucgagaaggucaacgagugcgugaagucccagagcccccgcaucaacuucugcgggaacggcaaccacauccugucccucgugcagaacgcccccuacgggcuguacuuccugcacuucagcuacguccccaccagcuucacgaccgccaacgugucccccggccucugcaucagcggcgaccgggggcuggcccccaaggcgggcuacuucgugcaggacgacggggaguggaaguucaccggcuccaacuacuacuaccccgagccgaucaccgacaagaacagcgucgugauguccagcugcgccgugaacuacacgaaggcccccgaggucuuccugaacaccuccaucagcaaccuccccgacuucaaggaggagcuggacaagugguucaagaaccagaccuccguggcccccgaccugagccucgacuucgagaagcugaacgugaccuuccuggaccucuccgacgagaugaaccgcauccaggaggccaucaagaagcugaacgagagcuacaucaaccugaaggagaucgggacguacgagauguacgucaaguggccgugguacguguggcuccugaucggccuggcgggcguggccgucugcgugcuccuguucuucaucugcugcugcaccgggugcggcuccugcugcuucaagaagugcgggaacugcugcgacgaguacggcgggcaccaggacagcaucgugauccacaacaucuccagccacgaggacugaggacuagucccuguucccagagcccacuuuuuuuucuuuuuuugaaauaaaauagccugucuuucagaucucaaaggcucuuuucagagccaccaaaaaaaaaaaaaaaaaaaaaaaaaaaaaaaaaaaaaaaaaaaaaaaaaaaaaaaaaaaaaaaaaaaaaaaaaaaaaaaaaaaaaaaaaaaaaaaaaaaaa

SEQ ID NO: 15083 - RNA, 4358 nt, Artificial Sequence
  MHV/S__BAK18575.1 spike protein mRNA gc (1-1361)(A1073P_L1074P)
aggagagucccgcagucggcguccagcggcucugcuuguucgugugugugucguugcaggccuuauucaagcuuaccaugcugagcguguucauccucuuccugcccuccugccugggcuacaucggggacuuccgcugcaucaaccucgucaacaccgacaccagcaacgccuccgccccgagcguguccacggagguggucgacgugagcaagggcaucgggaccuacuacgugcuggaccgggucuaccugaacgcgacccuccugcugaccggcuacuaccccguggacggguccaacuaccgcaaccucgcccugacgggcaccaacacccugagccucaacugguacaagccgcccuuccuguccgaguucaacgacggcaucuucgccaaggugaagaaccugaaggccagccuccccaaggacuccaccagcuacuuccccacgaucgucaucggguccaacuucgugaccaccagcuacaccgugguccuggagcccuacaacggcaucaucauggccuccaucugccaguacacgaucugccugcuccccuacaccgacugcaagccgaacaccgggggcaacaagcugaucggguucuggcacaucgaccucaagagccccgugugcauccucaagcggaacuucaccuucaacgugaacgcggacuggcuguacuuccacuucuaccagcagggcggcacguucuacgccuacuacgccgacgccggguccgcgaccaccuuccuguucagcuccuacaucggcgacguccucacccaguacuucgugcugcccuucgugugcacgcccaccaccaccggggucuucagcccgcaguacugggugacgccccuggugaagcgccaguaccucuucaacuucaaccagaagggcaccaucaccagcgccgucgacugcgccuccagcuacaccuccgagaucaagugcaagacgcagagcaugaaccccaacaccggcguguacgaccuguccggguacaccgugcagcccgucggccugguguaccggcgcguccggaaccucccggacugccgcaucgaggacuggcuggccgccaagaccgugcccagcccccugaacugggagcggaagacguuccagaacugcaacuucaaccucuccagccugcugcgccucgugcaggcggggucccugagcugcuccaacaucgacgccgccaaggucuacggcaugugcuucgggagcauguccaucgacaaguucgccauccccaacagccggcgcguggaccugcagcucggcaacuccggcuuccugcagagcuucaacuacaagaucgacacccgggccaccuccugccagcuguacuacagccucgcgcaguccaacgugaccgucaacaaccacaacccgagcagcuggaaccgccgguacggguucaacgacguggccacguucggccgcgggaagcacgacguggccuacgccgaggccugcuucaccgucggcgcguccuacugccccugcgccaaccccagcaucgugucccccugcaccaccgggaagccgaaguucgccaacugccccaccggcacgaccaaccgggagugcaacgugcuggcccugggcagcaaccucuucaagugcgacugcacgugcaaccccagcccccugaccaccuacgaccugcgcugccugcaggggcgguccaugcucggcgucggggaccacugcgagggccugggggugcuggaggacaagugcggcggcuccaacacgugcaacugcagcgccgacgcguucguggggugggccaaggacuccugccucagcaacggccgcugccacaucuucuccaaccugaugcugaacgggaucaacagcggcacgaccugcuccaccgaccuccagcugccgaacaccgaggucgugaccggcaucugcgugaaguacgaccuguacgggaucaccggccagggggucuucaaggaggugaaggccgacuacuacaacagcuggcagaaccuccuguacgacgugaacggcaaccugaacggguuccgggacaucgucaccaacaagaccuaccucacccgcuccugcuacagcggccgcguguccgccgcguaccaccaggacgcccccgagcccgcccugcuguaccggaaccucaagugcgacuacguguucaacaacaacaucuuccgcgaggagaccccgcugaacuacuucgacagcuaccugggcugcgucgugaacgccgacaacagcacggagcaggccguggacgcgugcgaccuccggaugggguccggccugugcgucaacuacagcaccgcccaccgcgcccggaccuccgugagcaccggguacaagcugacgaccuucgagcccuucaccguguccaucgucaacgacagcguggaguccgugggcgggcucuacgagaugcagauccccaccaacuucacgaucgccagccaccaggaguucauccagacccgcgcccccaaggucaccaucgacugcgcggccuucgugugcggcgacuacaccacgugccggcagcagcugguggaguacggcuccuucugcgacaacaucaacgccauccugggggaggucaacaaccucaucgacaccaugcagcuccagguggccagcgcccugauccagggcgugacccucuccagccgccuggcggacgggaucuccggccagaucgacgacaucaacuucagcccgcugcucgggugccugggcucccagugcagcgagggcaccauggccgcccaggggcgguccacggucgaggaccugcuguucgacaaggugaagcugagcgacgugggcuucgucgaggccuacaacaacugcaccgggggccaggaggugcgcgaccugcucugcgugcaguccuucaacgggaucaagguccugccgcccgugcugagcgagaaccaggugagcggcuacaccgcgggcgccaccgccuccagcauguucccgcccugguccgccgccgcggggguccccuucagccucuccgugcaguaccggaucaacggccugggggugacgaugaacguccugagcgagaaccagaagaugaucgccuccgccuucaacaacgccaucggcgccauccaggagggcuucgacgcgaccaacagcgcccucgccaagauccaguccguggucaacgccaacgccgaggcgcugaacaaccugcucaaccagcugagcaaccgcuucggggccaucuccgccagccugcaggagauccucucccggcuggacccgcccgaggcccaggcgcagaucgaccgccugaucaacggccggcucaccgcccugaacgccuacgugagcaagcagcuguccgacaugacccucaucaaggugagcgccgcccaggcgaucgagaaggucaacgagugcgugaagucccagagcccccgcaucaacuucugcgggaacggcaaccacauccugucccuggugcagaacgcccccuacgggcucuacuuccugcacuucagcuacguccccaccagcuucacgaccgccaacgugucccccggccugugcaucagcggcgaccgggggcucgcccccaaggccggcuacuucgugcaggacgacggggaguggaaguucaccggcuccaacuacuacuaccccgagcccaucaccgacaagaacagcgucgugauguccagcugcgcggugaacuacacgaaggcccccgaggucuuccugaacaccuccaucagcaaccugccggacuucaaggaggagcucgacaagugguucaagaaccagaccuccguggcccccgaccugagccuggacuucgagaagcucaacgugaccuuccuggaccuguccgacgagaugaaccgcauccaggaggccaucaagaagcucaacgagagcuacaucaaccugaaggagaucgggacguacgagauguacgucaaguggcccugguacguguggcugcucaucggccuggccggcguggcggucugcgugcugcuguucuucaucugcugcugcaccgggugcggcuccugcugcuucaagaagugcgggaacugcugcgacgaguacggcgggcaccaggacagcaucgugauccacaacaucuccagccacgaggacugaggacuagucccuguucccagagcccacuuuuuuuucuuuuuuugaaauaaaauagccugucuuucagaucucaaaggcucuuuucagagccaccaaaaaaaaaaaaaaaaaaaaaaaaaaaaaaaaaaaaaaaaaaaaaaaaaaaaaaaaaaaaaaaaaaaaaaaaaaaaaaaaaaaaaaaaaaaaaaaaaaaaa

SEQ ID NO: 15084 - RNA, 4166 nt, Artificial Sequence
  MHV/S__BAK18575.1 spike protein mRNA gc (variant)
aggagagucccgcagucggcguccagcggcucugcuuguucgugugugugucguugcaggccuuauucaagcuuaccaugcugagcguguucauccucuuccugcccuccugccugggcuacaucggggacuuccgcugcaucaaccucgucaacaccgacaccagcaacgccuccgccccgagcguguccacggagguggucgacgugagcaagggcaucgggaccuacuacgugcuggaccgggucuaccugaacgcgacccuccugcugaccggcuacuaccccguggacggguccaacuaccgcaaccucgcccugacgggcaccaacacccugagccucaacugguacaagccgcccuuccuguccgaguucaacgacggcaucuucgccaaggugaagaaccugaaggccagccuccccaaggacuccaccagcuacuuccccacgaucgucaucggguccaacuucgugaccaccagcuacaccgugguccuggagcccuacaacggcaucaucauggccuccaucugccaguacacgaucugccugcuccccuacaccgacugcaagccgaacaccgggggcaacaagcugaucggguucuggcacaucgaccugaagucccccgugugcauccucaagcggaacuucaccuucaacgugaacgcggacuggcuguacuuccacuucuaccagcagggcggcacguucuacgccuacuacgccgacgccggguccgcgaccaccuuccuguucagcuccuacaucggcgacguccucacccaguacuucgugcugcccuucgugugcacgcccaccaccaccggggucuucagcccgcaguacugggugacgccccuggugaagcgccaguaccucuucaacuucaaccagaagggcaccaucaccagcgccgucgacugcgccuccagcuacaccuccgagaucaagugcaagacgcagagcaugaaccccaacaccggcguguacgaccuguccggguacaccgugcagcccgucggccugguguaccggcgcguccggaaccucccggacugccgcaucgaggacuggcuggccgccaagaccgugcccagcccccugaacugggagcggaagacguuccagaacugcaacuucaaccucuccagccugcugcgccucgugcaggcggggucccugagcugcuccaacaucgacgccgccaaggucuacggcaugugcuucgggagcauguccaucgacaaguucgccauccccaacagccggcgcguggaccugcagcucggcaacuccggcuuccugcagagcuucaacuacaagaucgacacccgggccaccuccugccagcuguacuacagccucgcgcaguccaacgugaccgucaacaaccacaacccgagcagcuggaaccgccgguacggguucaacgacguggccacguucggccgcgggaagcacgacguggccuacgccgaggccugcuucaccgucggcgcguccuacugccccugcgccaaccccagcaucgugucccccugcaccaccgggaagccgaaguucgccaacugccccaccggcacgaccaaccgggagugcaacgugcuggcccugggcagcaaccucuucaagugcgacugcacgugcaaccccagcccccugaccaccuacgaccugcgcugccugcaggggcggagcaugcucggcgucggggaccacugcgagggccugggggugcuggaggacaagugcggcggcuccaacacgugcaacugcagcgccgacgcguucguggggugggccaaggacuccugccucagcaacggccgcugccacaucuucuccaaccugaugcugaacgggaucaacagcggcacgaccugcuccaccgaccuccagcugccgaacaccgaggucgugaccggcaucugcgugaaguacgaccuguacgggaucaccggccagggggucuucaaggaggugaaggccgacuacuacaacagcuggcagaaccuccuguacgacgugaacggcaaccugaacggguuccgggacaucgucaccaacaagaccuaccucacccgcuccugcuacagcggccgcguguccgccgcguaccaccaggacgcccccgagcccgcccugcuguaccggaaccucaagugcgacuacguguucaacaacaacaucuuccgcgaggagaccccgcugaacuacuucgacagcuaccugggcugcgucgugaacgccgacaacagcacggagcaggccguggacgcgugcgaccuccggaugggguccggccugugcgucaacuacagcaccgcccaccgcgcccggaccuccgugagcaccggguacaagcugacgaccuucgagcccuucaccguguccaucgucaacgacagcguggaguccgugggcgggcucuacgagaugcagauccccaccaacuucacgaucgccagccaccaggaguucauccagacccgcgcccccaaggucaccaucgacugcgcggccuucgugugcggcgacuacaccacgugccggcagcagcugguggaguacggcuccuucugcgacaacaucaacgccauccugggggaggucaacaaccucaucgacaccaugcagcuccagguggccagcgcccugauccagggcgugacccucuccagccgccuggcggacgggaucuccggccagaucgacgacaucaacuucagcccgcugcucgggugccugggcucccagugcagcgagggcaccauggccgcccaggggcgguccacggucgaggaccugcuguucgacaaggugaagcugagcgacgugggcuucgucgaggccuacaacaacugcaccgggggccaggaggugcgcgaccugcucugcgugcaguccuucaacgggaucaagguccugccgcccgugcugagcgagaaccaggugagcggcuacaccgcgggcgccaccgccuccagcauguucccgcccugguccgccgccgcggggguccccuucagccucuccgugcaguaccggaucaacggccugggggugacgaugaacguccugagcgagaaccagaagaugaucgccuccgccuucaacaacgccaucggcgccauccaggagggcuucgacgcgaccaacagcgcccucgccaagauccaguccguggucaacgccaacgccgaggcgcugaacaaccugcucaaccagcugagcaaccgcuucggggccaucuccgccagccugcaggagauccucucccggcuggacccgcccgaggcccaggcgcagaucgaccgccugaucaacggccggcucaccgcccugaacgccuacgugagcaagcagcuguccgacaugacccucaucaaggugagcgccgcccaggcgaucgagaaggucaacgagugcgugaagucccagagcccccgcaucaacuucugcgggaacggcaaccacauccugucccuggugcagaacgcccccuacgggcucuacuuccugcacuucagcuacguccccaccagcuucacgaccgccaacgugucccccggccugugcaucagcggcgaccgggggcucgcccccaaggccggcuacuucgugcaggacgacggggaguggaaguucaccggcuccaacuacuacuaccccgagcccaucaccgacaagaacagcgucgugauguccagcugcgcggugaacuacacgaaggcccccgaggucuuccugaacaccuccaucagcaaccugccggacuucaaggaggagcucgacaagugguucaagaaccagaccuccguggcccccgaccugagccuggacuucgagaagcucaacgugaccuuccuggaccuguccgacgagaugaaccgcauccaggaggccaucaagaagcucaacgagagcuacaucaaccugaaggagaucgggacguacgagaugugaggacuagucccuguucccagagcccacuuuuuuuucuuuuuuugaaauaaaauagccugucuuucagaucucaaaggcucuuuucagagccaccaaaaaaaaaaaaaaaaaaaaaaaaaaaaaaaaaaaaaaaaaaaaaaaaaaaaaaaaaaaaaaaaaaaaaaaaaaaaaaaaaaaaaaaaaaaaaaaaaaaaa

SEQ ID NO: 15085 - RNA, 4247 nt, Artificial Sequence
  MHV/S__BAK18575.1 spike protein mRNA gc (variant)
aggagagucccgcagucggcguccagcggcucugcuuguucgugugugugucguugcaggccuuauucaagcuuaccaugcugagcguguucauccucuuccugcccuccugccugggcuacaucggggacuuccgcugcaucaaccucgucaacaccgacaccagcaacgccuccgccccgagcguguccacggagguggucgacgugagcaagggcaucgggaccuacuacgugcuggaccgggucuaccugaacgcgacccuccugcugaccggcuacuaccccguggacggguccaacuaccgcaaccucgcccugacgggcaccaacacccugagccucaacugguacaagccgcccuuccuguccgaguucaacgacggcaucuucgccaaggugaagaaccugaaggccagccuccccaaggacuccaccagcuacuuccccacgaucgucaucggguccaacuucgugaccaccagcuacaccgugguccuggagcccuacaacggcaucaucauggccuccaucugccaguacacgaucugccugcuccccuacaccgacugcaagccgaacaccgggggcaacaagcugaucggguucuggcacaucgaccugaagucccccgugugcauccucaagcggaacuucaccuucaacgugaacgcggacuggcuguacuuccacuucuaccagcagggcggcacguucuacgccuacuacgccgacgccggguccgcgaccaccuuccuguucagcuccuacaucggcgacguccucacccaguacuucgugcugcccuucgugugcacgcccaccaccaccggggucuucagcccgcaguacugggugacgccccuggugaagcgccaguaccucuucaacuucaaccagaagggcaccaucaccagcgccgucgacugcgccuccagcuacaccuccgagaucaagugcaagacgcagagcaugaaccccaacaccggcguguacgaccuguccggguacaccgugcagcccgucggccugguguaccggcgcguccggaaccucccggacugccgcaucgaggacuggcuggccgccaagaccgugcccagcccccugaacugggagcggaagacguuccagaacugcaacuucaaccucuccagccugcugcgccucgugcaggcggggucccugagcugcuccaacaucgacgccgccaaggucuacggcaugugcuucgggagcauguccaucgacaaguucgccauccccaacagccggcgcguggaccugcagcucggcaacuccggcuuccugcagagcuucaacuacaagaucgacacccgggccaccuccugccagcuguacuacagccucgcgcaguccaacgugaccgucaacaaccacaacccgagcagcuggaaccgccgguacggguucaacgacguggccacguucggccgcgggaagcacgacguggccuacgccgaggccugcuucaccgucggcgcguccuacugccccugcgccaaccccagcaucgugucccccugcaccaccgggaagccgaaguucgccaacugccccaccggcacgaccaaccgggagugcaacgugcuggcccugggcagcaaccucuucaagugcgacugcacgugcaaccccagcccccugaccaccuacgaccugcgcugccugcaggggcggagcaugcucggcgucggggaccacugcgagggccugggggugcuggaggacaagugcggcggcuccaacacgugcaacugcagcgccgacgcguucguggggugggccaaggacuccugccucagcaacggccgcugccacaucuucuccaaccugaugcugaacgggaucaacagcggcacgaccugcuccaccgaccuccagcugccgaacaccgaggucgugaccggcaucugcgugaaguacgaccuguacgggaucaccggccagggggucuucaaggaggugaaggccgacuacuacaacagcuggcagaaccuccuguacgacgugaacggcaaccugaacggguuccgggacaucgucaccaacaagaccuaccucacccgcuccugcuacagcggccgcguguccgccgcguaccaccaggacgcccccgagcccgcccugcuguaccggaaccucaagugcgacuacguguucaacaacaacaucuuccgcgaggagaccccgcugaacuacuucgacagcuaccugggcugcgucgugaacgccgacaacagcacggagcaggccguggacgcgugcgaccuccggaugggguccggccugugcgucaacuacagcaccgcccaccgcgcccggaccuccgugagcaccggguacaagcugacgaccuucgagcccuucaccguguccaucgucaacgacagcguggaguccgugggcgggcucuacgagaugcagauccccaccaacuucacgaucgccagccaccaggaguucauccagacccgcgcccccaaggucaccaucgacugcgcggccuucgugugcggcgacuacaccacgugccggcagcagcugguggaguacggcuccuucugcgacaacaucaacgccauccugggggaggucaacaaccucaucgacaccaugcagcuccagguggccagcgcccugauccagggcgugacccucuccagccgccuggcggacgggaucuccggccagaucgacgacaucaacuucagcccgcugcucgggugccugggcucccagugcagcgagggcaccauggccgcccaggggcgguccacggucgaggaccugcuguucgacaaggugaagcugagcgacgugggcuucgucgaggccuacaacaacugcaccgggggccaggaggugcgcgaccugcucugcgugcaguccuucaacgggaucaagguccugccgcccgugcugagcgagaaccaggugagcggcuacaccgcgggcgccaccgccuccagcauguucccgcccugguccgccgccgcggggguccccuucagccucuccgugcaguaccggaucaacggccugggggugacgaugaacguccugagcgagaaccagaagaugaucgccuccgccuucaacaacgccaucggcgccauccaggagggcuucgacgcgaccaacagcgcccucgccaagauccaguccguggucaacgccaacgccgaggcgcugaacaaccugcucaaccagcugagcaaccgcuucggggccaucuccgccagccugcaggagauccucucccggcuggacccgcccgaggcccaggcgcagaucgaccgccugaucaacggccggcucaccgcccugaacgccuacgugagcaagcagcuguccgacaugacccucaucaaggugagcgccgcccaggcgaucgagaaggucaacgagugcgugaagucccagagcccccgcaucaacuucugcgggaacggcaaccacauccugucccuggugcagaacgcccccuacgggcucuacuuccugcacuucagcuacguccccaccagcuucacgaccgccaacgugucccccggccugugcaucagcggcgaccgggggcucgcccccaaggccggcuacuucgugcaggacgacggggaguggaaguucaccggcuccaacuacuacuaccccgagcccaucaccgacaagaacagcgucgugauguccagcugcgcggugaacuacacgaaggcccccgaggucuuccugaacaccuccaucagcaaccugccggacuucaaggaggagcucgacaagugguucaagaaccagaccuccguggcccccgaccugagccuggacuucgagaagcucaacgugaccuuccuggaccuguccgacgagaugaaccgcauccaggaggccaucaagaagcucaacgagagcuacaucaaccugaaggagaucgggacguacgagaugggcggcuacauccccgaggcgccccgggacgggcaggccuacguccgcaaggacggcgagugggugcugcucuccaccuucugaggacuagucccuguucccagagcccacuuuuuuuucuuuuuuugaaauaaaauagccugucuuucagaucucaaaggcucuuuucagagccaccaaaaaaaaaaaaaaaaaaaaaaaaaaaaaaaaaaaaaaaaaaaaaaaaaaaaaaaaaaaaaaaaaaaaaaaaaaaaaaaaaaaaaaaaaaaaaaaaaaaaa

SEQ ID NO: 15086 - RNA, 4040 nt, Artificial Sequence
  SARS-CoV__P59594.1 spike protein mRNA human (1-1255)
aggagagucccgcagucggcguccagcggcucugcuuguucgugugugugucguugcaggccuuauucaagcuuaccauguucaucuuucugcucuuucuuacccugacaagcggcuccgacuuggauagaugcacuacguuugacgaugugcaggcccccaacuacacccaacacacaucuucaaugagaggggucuauuacccugacgagauuuuccggagugauacuuuauaucugacccaggaccuauuucucccauucuacagcaauguuacaggauuucauaccauaaaccacacuuucgguaauccggugauccccuuuaaggauggcauuuauuucgcugcaacagaaaaauccaacguagugcgcgggugggucuuuggaucuaccaugaauaacaagucgcagucagugaucauuaucaauaacagcacgaauguugugauacgagccuguaacuucgagcugugcgacaauccuuucuucgcggucaguaaaccaaugggcacucagacccauacaaugaucuucgauaacgcuuuuaauuguacuuucgaauacauuuccgacgccuuuucucuugaugugagcgagaaguccgguaacuucaaacaucugcgugaauuuguauucaagaauaaggacggguuuuuguauguuuacaaaggauaccaacccaucgauguggucagagaccucccuucaggcuucaacacccugaagccaauuuuuaaacugccccucggcaucaacauaacaaauuucagggcaauuuuaaccgccuuuaguccugcucaggacaucugggggacgagcgcagccgcuuauuucgugggauaccugaagccaacuacauuuaugcuuaaauaugaugagaacgguaccauuacugacgccguggauugcucucagaauccguuggcggagcugaaguguuccgucaagucauucgaaaucgacaaaggcaucuaccagacaagcaacuuccggguugugcccaguggggauguagugcgcuuuccuaauauuaccaaccuaugcccauucggagaggucuuuaaugcaacgaaguuccccucuguguaugccugggaaaggaaaaagauauccaacuguguugcugacuacagcgugcucuauaauucgaccuuuuucucuacauuuaaaugcuacggcgucuccgccacuaagcugaacgaucuuuguuucucaaauguguacgcagacaguuuuguaguuaaaggugaugacgugaggcaaaucgcuccugggcagaccggagucauugccgauuauaacuacaagcugccagacgacuucaugggcugcguguuggcguggaauacacggaacaucgaugccacuagcaccggcaauuauaacuacaaguaucgcuaccuccgacacgggaaacugagacccuuugagagggacauauccaacgucccguucucuccugauggaaagcccuguacacccccugcauuaaauugcuauuggccccugaacgacuacgguuuuuacaccacuacgggcauuggguaucagccauaccgggugguugugcucagcuucgagcuucugaaugcucccgccacaguaugcggaccuaaauugucaaccgaucuaaucaagaaccagugugucaauuucaacuuuaauggccugacugguaccggggugcucacaccaaguuccaaacguuuccaaccguuucagcaguucggccgcgacguuagcgauuuuaccgacucugugagagaucccaagacuucagaaauccuggacauuaguccuugcagcuucggaggcgucuccgugaucacaccagggacgaacgcuucuucggagguagccgugcuuuaucaagauguuaauuguaccgacgucagcacugcaauucacgccgaucagcugacacccgcuuggaggauauacuccaccggaaacaauguguuucagacacaggcggguugcuugaucggcgcagaacacguggacacuucauaugagugugacauuccuaucggggccggaaucugcgcuaguuaccauaccgucucucuccugcggagcacgucccaaaagucaauuguugccuauaccaugagcuuaggcgcagauucuuccauagccuacaguaacaauacaaucgcuauuccaacuaacuucagcaucucuauuaccacagaagugaugcccguguccauggccaaaacuucaguagacuguaauauguacaucugcggugauaguaccgagugugcaaaccugcuacuccaguaugggagcuuuugcacgcagcugaaccgagcgcuuucgggcauagcugccgagcaggaccgcaauacaagagaagucuucgcacaagugaagcagauguacaaaaccccgacuuugaaguauuuuggaggcuucaacuucucccagauccugccugauccacucaaacccacaaagaggucuuuuauugaggaccugcuuuucaauaagguuacccuggccgaugcuggguuuaugaaacaguacggagaauguuugggugacaucaacgcccgggaucucauuugcgcacaaaaguucaauggccugacuguguuaccuccccugcuaaccgacgauaugaucgcugccuauacagcggcccucgucagcgggacggcuaccgcaggauggacuuuuggcgccggugcugcccugcagauaccauucgcaaugcagauggcguaccgcuuuaacgggauuggcgugacacagaauguucuuuaugagaaccaaaaacagaucgccaaucaguucaacaaggcuauuucacaaauccaggaaaguuugaccacaacuuccaccgcccugggaaaacuccaggacgugguaaaucagaacgcacaagcucugaauacguuagucaagcagcugucuagcaacuuuggcgccauauccucagugcuuaaugauaucuugagcagacucgacaagguggaggcagagguccagauugacaggcugaucacagggcgucuacagagucugcaaaccuacguuacucagcagcucauucgggccgcugaaauccgagcgucugccaaccuggcagcuaccaaaauguccgagugcgugcuuggacagagcaagagaguagauuucuguggcaaagguuaccacuugaugucguuuccucaagccgccccacaugggguggucuuccugcacgugacauauguuccaucacaggaaaggaacuuuacuaccgcuccggcaauaugccacgagggaaaggccuacuucccucgcgaaggcguguucgucuuuaaugguacaucuugguucauuacgcagcggaacuuuuucaguccccaaaucaucaccacugacaauacauuuguguccggcaacugugauguugugauugggaucauuaauaacaccgucuaugacccauuacagcccgagcucgauagcuucaaagaggaacuggacaaguacuuuaaaaaucauacuucuccugauguagaccuuggagauauaagcggcaucaacgcguccgugguuaauauucagaaggagaucgacagacugaacgaaguggcuaagaauuugaacgagucacucauugaucugcaggagcuagggaaauaugaacaauacaucaaguggccaugguaugucuggcugggauucauagccggccucaucgcaauugugaugguaacaauccugcuuugcuguaugaccaguugcuguagcugcuugaaaggugccuguucuugcggguccuguugcaaguuugacgaggacgauucagaacccgugcugaaaggagucaaguuacacuacacgugaggacuagucccuguucccagagcccacuuuuuuuucuuuuuuugaaauaaaauagccugucuuucagaucucaaaggcucuuuucagagccaccaaaaaaaaaaaaaaaaaaaaaaaaaaaaaaaaaaaaaaaaaaaaaaaaaaaaaaaaaaaaaaaaaaaaaaaaaaaaaaaaaaaaaaaaaaaaaaaaaaaaa

SEQ ID NO: 15087 - RNA, 4040 nt, Artificial Sequence
  SARS-CoV__P59594.1 spike protein mRNA human (1-1255)(K968P_V969P)
aggagagucccgcagucggcguccagcggcucugcuuguucgugugugugucguugcaggccuuauucaagcuuaccauguucaucuuucugcuguuccuuacccugacaagcggcuccgacuuggauagaugcacuacguuugacgaugugcaggcccccaacuacacccaacacacaucuucaaugagaggggucuauuacccugacgagauuuuccggagugauacuuuauaucugacccaggaccuauuucucccauucuacagcaauguuacaggauuucauaccauaaaccacacuuucgguaauccggugauccccuuuaaggauggcauuuauuucgcugcaacagaaaaauccaacguagugcgcgggugggucuuuggaucuaccaugaauaacaagucgcagucagugaucauuaucaauaacagcacgaauguugugauacgagccuguaacuucgagcugugcgacaauccauuuuucgcggucaguaaaccaaugggcacucagacccauacaaugaucuucgauaacgcuuuuaauuguacuuucgaauacauuuccgacgccuuuucucuugaugugagcgagaaguccgguaacuucaaacaccuccgugaauuuguauucaagaauaaggacggguuuuuguauguuuacaaaggauaccaacccaucgauguggucagagaccucccuucaggcuucaacacccugaagccaauuuuuaaacugccccucggcaucaacauaacaaauuucagggcaauuuuaaccgccuuuaguccugcucaggacaucugggggacgagcgcagccgcuuauuucgugggauaccugaagccaacuacauuuaugcuuaaauaugaugagaacgguaccauuacugacgccguggauugcucucagaauccguuggcggagcugaaguguuccgucaagucauucgaaaucgacaaaggcaucuaccagacaagcaacuuccggguugugcccaguggggauguagugcgcuuuccuaauauuaccaaccuaugcccauucggagaggucuuuaaugcaacgaaguuccccucuguguaugccugggaaaggaaaaagauauccaacuguguugcugacuacagcgugcucuauaauucgaccuuuuucucuacauuuaaaugcuacggcgucuccgccacuaagcugaacgaucuuuguuucucaaauguguacgcagacaguuuuguaguuaaaggugaugacgugaggcaaaucgcuccugggcagaccggagucauugccgauuauaacuacaagcugccagacgacuucaugggcugcguguuggcguggaauacacggaacaucgaugccacuagcaccggcaauuauaacuacaaguaucgcuaccuccgacaugggaaacugagacccuuugagagggacauauccaacgucccguucucuccugauggaaagcccuguacaccuccugcauuaaauugcuauuggccccugaacgacuacgguuuuuacaccacuacgggcauuggguaucagccauaccgggugguugugcucagcuucgagcuucugaaugcucccgccacaguaugcggaccuaaauugucaaccgaucuaaucaagaaccagugugucaauuucaacuuuaauggccugacugguaccggggugcucacaccaaguuccaaacguuuccaaccguuucagcaguucggccgcgacguuagcgauuuuaccgacucugugagagaucccaagacuucagaaauccuggacauuaguccuugcagcuucggaggcgucuccgugaucacaccagggacgaacgcuucuucggagguagccgugcuuuaucaagauguuaauuguaccgacgucagcacugcaauucacgccgaucagcugacacccgcuuggaggauauacuccaccggaaacaauguguuucagacacaggcggguugcuugaucggcgcagaacacguggacacuucauaugagugugacauuccuaucggggccggaaucugcgcuaguuaccauaccgucucucuccugcggagcacgucccaaaagucaauuguugccuauaccaugagcuuaggcgcagauucuuccauagccuacaguaacaauacaaucgcuauuccaacuaacuucagcaucucuauuaccacagaagugaugcccguguccauggccaaaacuucaguagacuguaauauguacaucugcggugauaguaccgagugugcaaaccugcuacuccaguaugggagcuuuugcacgcagcugaaccgagcgcuuucgggcauagcugccgagcaggaccgcaauacaagagaagucuucgcacaagugaagcagauguacaaaaccccgacuuugaaguauuuuggaggcuucaacuucucccagauccugccugauccacucaaacccacaaagaggucuuuuauugaggaccugcuuuucaauaagguuacccuggccgaugcuggguuuaugaaacaguacggagaauguuugggugacaucaacgcccgggaucucauuugcgcacaaaaguucaauggccugacuguguuaccuccccugcuaaccgacgauaugaucgcugccuauacagcggcccucgucagcgggacggcuaccgcaggauggacuuuuggcgccggugcugcccugcagauaccauucgcaaugcagauggcguaccgcuuuaacgggauuggcgugacacagaauguucuuuaugagaaccaaaaacagaucgccaaucaguucaacaaggcuauuucacaaauccaggaaaguuugaccacaacuuccaccgcccugggaaaacuccaggacgugguaaaucagaacgcacaagcucugaauacguuagucaagcagcugucuagcaacuuuggcgccauauccucagugcuuaaugauaucuugagcagacucgacccucccgaggcagaggugcagauugacaggcugaucacagggcgucuacagagucugcaaaccuacgucacucagcagcucauucgggccgcugaaauccgagcgucugccaaccuggcagcuaccaagauguccgagugcguucuuggacagagcaaaagaguggauuucuguggcaaggguuaccacuugaugucguuuccacaagccgccccgcaugggguaguguuccugcacgucacauaugugccuucacaggaaaggaacuuuacuaccgcucccgcaauaugccacgagggaaaagccuacuucccacgcgaaggcguuuucguguuuaaugguacaucuugguucauuacgcagcggaacuuuuucaguccccaaaucaucaccacugacaauacauuugucuccggcaacugugaugugguuauugggaucauuaauaacaccguguaugacccuuuacagccagagcucgauagcuucaaggaggaacuggacaaauacuuuaagaaucauacuucucccgaugucgaccuuggagauauaagcggcaucaacgcguccguagugaauauucagaaagagaucgacagacugaacgaaguugcuaagaauuugaacgagucacucauugaucugcaggagcuagggaaguaugaacaauacaucaaauggccuugguauguguggcugggauucauagccggccucaucgcaauugucauggugacaauccugcuuugcuguaugaccaguugcuguagcugcuugaagggugccuguucuugcggguccuguugcaaauuugacgaggacgauucagaaccgguacugaagggagugaaauuacacuacacgugaggacuagucccuguucccagagcccacuuuuuuuucuuuuuuugaaauaaaauagccugucuuucagaucucaaaggcucuuuucagagccaccaaaaaaaaaaaaaaaaaaaaaaaaaaaaaaaaaaaaaaaaaaaaaaaaaaaaaaaaaaaaaaaaaaaaaaaaaaaaaaaaaaaaaaaaaaaaaaaaaaaaa

SEQ ID NO: 15088 - RNA, 1853 nt, Artificial Sequence
  SARS-CoV__P59594.1 spike protein mRNA human (1-17_747-1255)
aggagagucccgcagucggcguccagcggcucugcuuguucgugugugugucguugcaggccuuauucaagcuuaccauguucaucuuucugcucuuucuuacccugacaagcggcuccgacuuggauagagccuuaucugggauugcugcagagcaggacaggaacacucgggaaguguuugcccaagucaagcagauguacaaaacgcccacccugaaguauuucggagguuuuaauuucucacagauacuaccugauccacucaaaccgacaaagcgcaguuuuaucgaggaccugcuuuucaacaaaguuacucuggcggaugcuggcuuuaugaagcaguacggggaaugcuugggagacauuaaugcccgagaucucaucugugcacaaaaguucaacggccugaccgugcugcccccucucuuaacagacgauaugauugccgcuuauaccgcagcccugguaagcgguacugcuacagccggguggaccuuuggagcgggcgcagcccuucagaucccauucgcuaugcagauggccuaccguuuuaauggcauaggggugacgcagaacgucuuguaugagaaucaaaaacagaucgcaaaccaguucaauaaggcuauuucccagauccaagaaucucugacuaccacaucgacugcccuaggaaaacuccaggacgugguuaaccagaaugcgcaagcccugaacacccuugugaagcagcugucaagcaauuucggugcaauuaguuccgucuugaacgauauccucucuagacuggacaaaguggaggcugagguacagauagauagguuaauuacaggccggcugcagagccuccaaaccuacguuacgcagcagcuuauccgcgccgcugaaauuagagccuccgcaaaucuggccgcuacuaagaugucagagugcguguuggggcagaguaagagggucgacuuuuguggaaaaggcuaucaccuaaugagcuucccccaagcggcaccucauggugugguguuucugcacgucacauacguuccaucucaggaacggaacuucaccacugcccccgcuaucugccaugaggggaaggccuacuuuccucgcgagggaguguucguauuuaacggcacauccugguucaucacccagcgaaauuucuucucaccacagauuauaacgaccgacaacacauuugugagcggcaauugugaugucgugaucgggauuaucaacaauacuguuuaugacccgcuccaacccgaacuggauaguuucaaagaggaacuugacaaguacuuuaaaaaccacaccucuccugauguggaccugggagauauauccgguauuaaugcaagcgucgugaacauccagaaggagaucgacagauugaaugaaguagccaaaaaccucaaugagucgcugauugauuuacaggagcugggcaaguaugaacaguacaucaaguggccaugguauguuuggcuaggguucauugcuggacucauagccaucgugauggucacaauucugcuuugcuguaugacuucuugcuguuccugcuugaaaggcgcauguucaugcgguaguugcuguaaguucgacgaggaugacagcgaacccgugcugaaaggggucaagcuccauuacaccugaggacuagucccuguucccagagcccacuuuuuuuucuuuuuuugaaauaaaauagccugucuuucagaucucaaaggcucuuuucagagccaccaaaaaaaaaaaaaaaaaaaaaaaaaaaaaaaaaaaaaaaaaaaaaaaaaaaaaaaaaaaaaaaaaaaaaaaaaaaaaaaaaaaaaaaaaaaaaaaaaaaaa

SEQ ID NO: 15089 - RNA, 4040 nt, Artificial Sequence
  SARS-CoV/Tor2__NP_828851.1 spike protein mRNA human (1-1255)
aggagagucccgcagucggcguccagcggcucugcuuguucgugugugugucguugcaggccuuauucaagcuuaccauguucaucuuucugcuguuccuuacccugacaagcggcuccgacuuggauagaugcacuacguuugacgaugugcaggcccccaacuacacccaacacacaucuucaaugagaggggucuauuacccugacgagauuuuccggagugauacuuuauaucugacccaggaccuauuucucccauucuacagcaauguuacaggauuucauaccauaaaccacacuuucgguaauccggugauccccuuuaaggauggcauuuauuucgcugcaacagaaaaauccaacguagugcgcgggugggucuuuggaucuaccaugaauaacaagucgcagucagugaucauuaucaauaacagcacgaauguugugauacgagccuguaacuucgagcugugcgacaauccauuuuucgcggucaguaaaccaaugggcacucagacccauacaaugaucuucgauaacgcuuuuaauuguacuuucgaauacauuuccgacgccuuuucucuugaugugagcgagaaguccgguaacuucaaacaccuccgugaauuuguauucaagaauaaggacggguuuuuguauguuuacaaaggauaccaacccaucgauguggucagagaccucccuucaggcuucaacacccugaagccaauuuuuaaacugccccucggcaucaacauaacaaauuucagggcaauuuuaaccgccuuuaguccugcucaggacaucugggggacgagcgcagccgcuuauuucgugggauaccugaagccaacuacauuuaugcuuaaauaugaugagaacgguaccauuacugacgccguggauugcucucagaauccguuggcggagcugaaguguuccgucaagucauucgaaaucgacaaaggcaucuaccagacaagcaacuuccggguugugcccaguggggauguagugcgcuuuccuaauauuaccaaccuaugcccauucggagaggucuuuaaugcaacgaaguuccccucuguguaugccugggaaaggaaaaagauauccaacuguguugcugacuacagcgugcucuauaauucgaccuuuuucucuacauuuaaaugcuacggcgucuccgccacuaagcugaacgaucuuuguuucucaaauguguacgcagacaguuuuguaguuaaaggugaugacgugaggcaaaucgcuccugggcagaccggagucauugccgauuauaacuacaagcugccagacgacuucaugggcugcguguuggcguggaauacacggaacaucgaugccacuagcaccggcaauuauaacuacaaguaucgcuaccuccgacaugggaaacugagacccuuugagagggacauauccaacgucccguucucuccugauggaaagcccuguacaccuccugcauuaaauugcuauuggccccugaacgacuacgguuuuuacaccacuacgggcauuggguaucagccauaccgggugguugugcucagcuucgagcuucugaaugcucccgccacaguaugcggaccuaaauugucaaccgaucuaaucaagaaccagugugucaauuucaacuuuaauggccugacugguaccggggugcucacaccaaguuccaaacguuuccaaccguuucagcaguucggccgcgacguuagcgauuuuaccgacucugugagagaucccaagacuucagaaauccuggacauuaguccuugcgcuuucggaggcgucagcgugaucacaccagggacgaacgccuccucugagguagcagugcuuuaucaagauguuaauuguaccgacgucucgacugccauucacgcugaucagcugacacccgcguggaggauauacagcaccggaaacaauguguuucagacacaggcagguugcuugaucggcgccgaacacguggacacuuccuaugagugugacauuccuaucggggcuggaaucugcgccucauaccauaccgucagucuccugcggucuacgagccaaaaguccauuguugcauauaccaugucauuaggcgccgauagcucuauagcuuacuccaacaauacaaucgccauuccaacuaacuucaguaucagcauuaccacagaagugaugcccgugucuauggcaaaaacuuccguagacuguaauauguacaucugcggugauucaaccgagugugcgaaccugcuacuccaguaugggaguuuuugcacgcagcugaaccgagcucuuagcggcauagccgcagagcaggaccgcaauacaagagaagucuucgcccaagugaagcagauguacaaaaccccgacuuugaaguauuuuggaggcuucaacuucucgcagauccugccugauccacucaaacccacaaagagguccuuuauugaggaccugcuuuucaauaagguuacccuggcugaugccggguuuaugaaacaguacggagaauguuugggugacaucaacgcacgggaucucauuugcgcucaaaaguucaauggccugacuguguuaccuccccugcuaaccgacgauaugaucgccgcguauacagccgcucucgucucugggacggcaaccgccggauggacuuuuggcgcuggugccgcacugcagauaccauucgcgaugcagauggccuaccgcuuuaacgggauuggcgugacacagaauguucuuuaugagaaccaaaaacagaucgcuaaucaguucaacaaggccauuagccaaauccaggaaucauugaccacaaccaguacugcacugggaaaacuccaggacgugguaaaucagaacgcucaagcccugaauacguuagucaagcagcuguccucuaacuuuggcgcaauaagcuccgugcuuaaugauaucuugucaagacucgacaagguggaggccgagguccagauugacaggcugaucacagggcgucuacagagccugcaaaccuacguuacucagcagcucauucgggcugcggaaauccgagccagugcaaaccuggcugccaccaaaaugucugagugcgugcuuggacaguccaagagaguagauuucuguggcaaagguuaccacuugaugagcuuuccucaagccgcuccccaugggguggucuuccugcacgugacauauguuccaucgcaggaaaggaacuuuacuaccgcaccggccauaugccacgagggaaaggcguacuucccucgcgaaggcguguucgucuuuaaugguacaucaugguucauuacgcagcggaacuuuuucucuccccaaaucaucaccacugacaauacauuugugaguggcaacugugauguugugauugggaucauuaauaacaccgucuaugacccauuacagcccgagcucgauuccuucaaagaggaacuggacaaguacuuuaaaaaucauacuagcccugauguagaccuuggagauauaucuggcaucaacgcuagcgugguuaauauucagaaggagaucgacagacugaacgaaguggccaagaauuugaacgagucccucauugaucugcaggagcuagggaaauaugaacaauacaucaaguggccaugguaugucuggcugggauucauagcaggccucaucgccauugugaugguaacaauccugcuuugcuguaugaccucaugcuguaguugcuugaaaggugcuuguagcugcgggucuuguugcaaguuugacgaggacgauuccgaacccgugcugaaaggagucaaguuacacuacacgugaggacuagucccuguucccagagcccacuuuuuuuucuuuuuuugaaauaaaauagccugucuuucagaucucaaaggcucuuuucagagccaccaaaaaaaaaaaaaaaaaaaaaaaaaaaaaaaaaaaaaaaaaaaaaaaaaaaaaaaaaaaaaaaaaaaaaaaaaaaaaaaaaaaaaaaaaaaaaaaaaaaaa

SEQ ID NO: 15090 - RNA, 4040 nt, Artificial Sequence
  SARS-CoV/Tor2__NP_828851.1 spike protein mRNA human (1-1255)(K968P_V969P)
aggagagucccgcagucggcguccagcggcucugcuuguucgugugugugucguugcaggccuuauucaagcuuaccauguucaucuuucugcuguuccuuacccugacaagcggcuccgacuuggauagaugcacuacguuugacgaugugcaggcccccaacuacacccaacacacaucuucaaugagaggggucuauuacccugacgagauuuuccggagugauacuuuauaucugacccaggaccuauuucucccauucuacagcaauguuacaggauuucauaccauaaaccacacuuucgguaauccggugauccccuuuaaggauggcauuuauuucgcugcaacagaaaaauccaacguagugcgcgggugggucuuuggaucuaccaugaauaacaagucgcagucagugaucauuaucaauaacagcacgaauguugugauacgagccuguaacuucgagcugugcgacaauccauuuuucgcggucaguaaaccaaugggcacucagacccauacaaugaucuucgauaacgcuuuuaauuguacuuucgaauacauuuccgacgccuuuucucuugaugugagcgagaaguccgguaacuucaaacaccuccgugaauuuguauucaagaauaaggacggguuuuuguauguuuacaaaggauaccaacccaucgauguggucagagaccucccuucaggcuucaacacccugaagccaauuuuuaaacugccccucggcaucaacauaacaaauuucagggcaauuuuaaccgccuuuaguccugcucaggacaucugggggacgagcgcagccgcuuauuucgugggauaccugaagccaacuacauuuaugcuuaaauaugaugagaacgguaccauuacugacgccguggauugcucucagaauccguuggcggagcugaaguguuccgucaagucauucgaaaucgacaaaggcaucuaccagacaagcaacuuccggguugugcccaguggggauguagugcgcuuuccuaauauuaccaaccuaugcccauucggagaggucuuuaaugcaacgaaguuccccucuguguaugccugggaaaggaaaaagauauccaacuguguugcugacuacagcgugcucuauaauucgaccuuuuucucuacauuuaaaugcuacggcgucuccgccacuaagcugaacgaucuuuguuucucaaauguguacgcagacaguuuuguaguuaaaggugaugacgugaggcaaaucgcuccugggcagaccggagucauugccgauuauaacuacaagcugccagacgacuucaugggcugcguguuggcguggaauacacggaacaucgaugccacuagcaccggcaauuauaacuacaaguaucgcuaccuccgacaugggaaacugagacccuuugagagggacauauccaacgucccguucucuccugauggaaagcccuguacaccuccugcauuaaauugcuauuggccccugaacgacuacgguuuuuacaccacuacgggcauuggguaucagccauaccgggugguugugcucagcuucgagcuucugaaugcucccgccacaguaugcggaccuaaauugucaaccgaucuaaucaagaaccagugugucaauuucaacuuuaauggccugacugguaccggggugcucacaccaaguuccaaacguuuccaaccguuucagcaguucggccgcgacguuagcgauuuuaccgacucugugagagaucccaagacuucagaaauccuggacauuaguccuugcgcuuucggaggcgucagcgugaucacaccagggacgaacgccuccucugagguagcagugcuuuaucaagauguuaauuguaccgacgucucgacugccauucacgcugaucagcugacacccgcguggaggauauacagcaccggaaacaauguguuucagacacaggcagguugcuugaucggcgccgaacacguggacacuuccuaugagugugacauuccuaucggggcuggaaucugcgccucauaccauaccgucagucuccugcggucuacgagccaaaaguccauuguugcauauaccaugucauuaggcgccgauagcucuauagcuuacuccaacaauacaaucgccauuccaacuaacuucaguaucagcauuaccacagaagugaugcccgugucuauggcaaaaacuuccguagacuguaauauguacaucugcggugauucaaccgagugugcgaaccugcuacuccaguaugggaguuuuugcacgcagcugaaccgagcucuuagcggcauagccgcagagcaggaccgcaauacaagagaagucuucgcccaagugaagcagauguacaaaaccccgacuuugaaguauuuuggaggcuucaacuucucgcagauccugccugauccacucaaacccacaaagagguccuuuauugaggaccugcuuuucaauaagguuacccuggcugaugccggguuuaugaaacaguacggagaauguuugggugacaucaacgcacgggaucucauuugcgcucaaaaguucaauggccugacuguguuaccuccccugcuaaccgacgauaugaucgccgcguauacagccgcucucgucucugggacggcaaccgccggauggacuuuuggcgcuggugccgcacugcagauaccauucgcgaugcagauggccuaccgcuuuaacgggauuggcgugacacagaauguucuuuaugagaaccaaaaacagaucgcuaaucaguucaacaaggccauuagccaaauccaggaaucauugaccacaaccaguacugcacugggaaaacuccaggacgugguaaaucagaacgcucaagcccugaauacguuagucaagcagcuguccucuaacuuuggcgcaauaagcuccgugcuuaaugauaucuugucaagacucgacccucccgaggccgaggugcagauugacaggcugaucacagggcgucuacagagccugcaaaccuacgucacucagcagcucauucgggcugcggaaauccgagccagugcaaaccuggcugccaccaagaugucugagugcguucuuggacaguccaaaagaguggauuucuguggcaaggguuaccacuugaugagcuuuccacaagccgcuccgcaugggguaguguuccugcacgucacauaugugccuucgcaggaaaggaacuuuacuaccgcacccgccauaugccacgagggaaaagcguacuucccacgcgaaggcguuuucguguuuaaugguacaucaugguucauuacgcagcggaacuuuuucucuccccaaaucaucaccacugacaauacauuugucaguggcaacugugaugugguuauugggaucauuaauaacaccguguaugacccuuuacagccagagcucgauuccuucaaggaggaacuggacaaauacuuuaagaaucauacuagccccgaugucgaccuuggagauauaucuggcaucaacgcuagcguagugaauauucagaaagagaucgacagacugaacgaaguugccaagaauuugaacgagucccucauugaucugcaggagcuagggaaguaugaacaauacaucaaauggccuugguauguguggcugggauucauagcaggccucaucgccauugucauggugacaauccugcuuugcuguaugaccucaugcuguaguugcuugaagggugcuuguagcugcgggucuuguugcaaauuugacgaggacgauuccgaaccgguacugaagggagugaaauuacacuacacgugaggacuagucccuguucccagagcccacuuuuuuuucuuuuuuugaaauaaaauagccugucuuucagaucucaaaggcucuuuucagagccaccaaaaaaaaaaaaaaaaaaaaaaaaaaaaaaaaaaaaaaaaaaaaaaaaaaaaaaaaaaaaaaaaaaaaaaaaaaaaaaaaaaaaaaaaaaaaaaaaaaaaa

SEQ ID NO: 15091 - RNA, 3845 nt, Artificial Sequence
  SARS-CoV/Tor2__NP_828851.1 spike protein mRNA human (variant)
aggagagucccgcagucggcguccagcggcucugcuuguucgugugugugucguugcaggccuuauucaagcuuaccauguucaucuuucugcuguuccuuacccugacaagcggcuccgacuuggauagaugcacuacguuugacgaugugcaggcccccaacuacacccaacacacaucuucaaugagaggggucuauuacccugacgagauuuuccggagugauacuuuauaucugacccaggaccuauuucucccauucuacagcaauguuacaggauuucauaccauaaaccacacuuucgguaauccggugauccccuuuaaggauggcauuuauuucgcugcaacagaaaaauccaacguagugcgcgggugggucuuuggaucuaccaugaauaacaagucgcagucagugaucauuaucaauaacagcacgaauguugugauacgagccuguaacuucgagcugugcgacaauccauuuuucgcggucaguaaaccaaugggcacucagacccauacaaugaucuucgauaacgcuuuuaauuguacuuucgaauacauuuccgacgccuuuucucuugaugugagcgagaaguccgguaacuucaaacaccuccgugaauuuguauucaagaauaaggacggguuuuuguauguuuacaaaggauaccaacccaucgauguggucagagaccucccuucaggcuucaacacccugaagccaauuuuuaaacugccccucggcaucaacauaacaaauuucagggcaauuuuaaccgccuuuaguccugcucaggacaucugggggacgagcgcagccgcuuauuucgugggauaccugaagccaacuacauuuaugcuuaaauaugaugagaacgguaccauuacugacgccguggauugcucucagaauccguuggcggagcugaaguguuccgucaagucauucgaaaucgacaaaggcaucuaccagacaagcaacuuccggguugugcccaguggggauguagugcgcuuuccuaauauuaccaaccuaugcccauucggagaggucuuuaaugcaacgaaguuccccucuguguaugccugggaaaggaaaaagauauccaacuguguugcugacuacagcgugcucuauaauucgaccuuuuucucuacauuuaaaugcuacggcgucuccgccacuaagcugaacgaucuuuguuucucaaauguguacgcagacaguuuuguaguuaaaggugaugacgugaggcaaaucgcuccugggcagaccggagucauugccgauuauaacuacaagcugccagacgacuucaugggcugcguguuggcguggaauacacggaacaucgaugccacuagcaccggcaauuauaacuacaaguaucgcuaccuccgacaugggaaacugagacccuuugagagggacauauccaacgucccguucucuccugauggaaagcccuguacaccuccugcauuaaauugcuauuggccccugaacgacuacgguuuuuacaccacuacgggcauuggguaucagccauaccgggugguugugcucagcuucgagcuucugaaugcucccgccacaguaugcggaccuaaauugucaaccgaucuaaucaagaaccagugugucaauuucaacuuuaauggccugacugguaccggggugcucacaccaaguuccaaacguuuccaaccguuucagcaguucggccgcgacguuagcgauuuuaccgacucugugagagaucccaagacuucagaaauccuggacauuaguccuugcgcuuucggaggcgucagcgugaucacaccagggacgaacgccuccucugagguagcagugcuuuaucaagauguuaauuguaccgacgucucgacugccauucacgcugaucagcugacacccgcguggaggauauacagcaccggaaacaauguguuucagacacaggcagguugcuugaucggcgccgaacacguggacacuuccuaugagugugacauuccuaucggggcuggaaucugcgccucauaccauaccgucagucuccugcggucuacgagccaaaaguccauuguugcauauaccaugucauuaggcgccgauagcucuauagcuuacuccaacaauacaaucgccauuccaacuaacuucaguaucagcauuaccacagaagugaugcccgugucuauggcaaaaacuuccguagacuguaauauguacaucugcggugauucaaccgagugugcgaaccugcuacuccaguaugggaguuuuugcacgcagcugaaccgagcucuuagcggcauagccgcagagcaggaccgcaauacaagagaagucuucgcccaagugaagcagauguacaaaaccccgacuuugaaguauuuuggaggcuucaacuucucgcagauccugccugauccacucaaacccacaaagagguccuuuauugaggaccugcuuuucaauaagguuacccuggcugaugccggguuuaugaaacaguacggagaauguuugggugacaucaacgcacgggaucucauuugcgcucaaaaguucaauggccugacuguguuaccuccccugcuaaccgacgauaugaucgccgcguauacagccgcucucgucucugggacggcaaccgccggauggacuuuuggcgcuggugccgcacugcagauaccauucgcgaugcagauggccuaccgcuuuaacgggauuggcgugacacagaauguucuuuaugagaaccaaaaacagaucgcuaaucaguucaacaaggccauuagccaaauccaggaaucauugaccacaaccaguacugcacugggaaaacuccaggacgugguaaaucagaacgcucaagcccugaauacguuagucaagcagcuguccucuaacuuuggcgcaauaagcuccgugcuuaaugauaucuugucaagacucgacccucccgaggccgaggugcagauugacaggcugaucacagggcgucuacagagccugcaaaccuacgucacucagcagcucauucgggcugcggaaauccgagccagugcaaaccuggcugccaccaagaugucugagugcguucuuggacaguccaaaagaguggauuucuguggcaaggguuaccacuugaugagcuuuccacaagccgcuccgcaugggguaguguuccugcacgucacauaugugccuucgcaggaaaggaacuuuacuaccgcacccgccauaugccacgagggaaaagcguacuucccacgcgaaggcguuuucguguuuaaugguacaucaugguucauuacgcagcggaacuuuuucucuccccaaaucaucaccacugacaauacauuugucaguggcaacugugaugugguuauugggaucauuaauaacaccguguaugacccuuuacagccagagcucgauuccuucaaggaggaacuggacaaauacuuuaagaaucauacuagccccgaugucgaccuuggagauauaucuggcaucaacgcuagcguagugaauauucagaaagagaucgacagacugaacgaaguugccaagaauuugaacgagucccucauugaucugcaggagcuagggaaguaugaacaaugaggacuagucccuguucccagagcccacuuuuuuuucuuuuuuugaaauaaaauagccugucuuucagaucucaaaggcucuuuucagagccaccaaaaaaaaaaaaaaaaaaaaaaaaaaaaaaaaaaaaaaaaaaaaaaaaaaaaaaaaaaaaaaaaaaaaaaaaaaaaaaaaaaaaaaaaaaaaaaaaaaaaa

SEQ ID NO: 15092 - RNA, 3926 nt, Artificial Sequence
  SARS-CoV/Tor2__NP_828851.1 spike protein mRNA human (variant)
aggagagucccgcagucggcguccagcggcucugcuuguucgugugugugucguugcaggccuuauucaagcuuaccauguucaucuuucugcuguuccuuacccugacaagcggcuccgacuuggauagaugcacuacguuugacgaugugcaggcccccaacuacacccaacacacaucuucaaugagaggggucuauuacccugacgagauuuuccggagugauacuuuauaucugacccaggaccuauuucucccauucuacagcaauguuacaggauuucauaccauaaaccacacuuucgguaauccggugauccccuuuaaggauggcauuuauuucgcugcaacagaaaaauccaacguagugcgcgggugggucuuuggaucuaccaugaauaacaagucgcagucagugaucauuaucaauaacagcacgaauguugugauacgagccuguaacuucgagcugugcgacaauccauuuuucgcggucaguaaaccaaugggcacucagacccauacaaugaucuucgauaacgcuuuuaauuguacuuucgaauacauuuccgacgccuuuucucuugaugugagcgagaaguccgguaacuucaaacaccuccgugaauuuguauucaagaauaaggacggguuuuuguauguuuacaaaggauaccaacccaucgauguggucagagaccucccuucaggcuucaacacccugaagccaauuuuuaaacugccccucggcaucaacauaacaaauuucagggcaauuuuaaccgccuuuaguccugcucaggacaucugggggacgagcgcagccgcuuauuucgugggauaccugaagccaacuacauuuaugcuuaaauaugaugagaacgguaccauuacugacgccguggauugcucucagaauccguuggcggagcugaaguguuccgucaagucauucgaaaucgacaaaggcaucuaccagacaagcaacuuccggguugugcccaguggggauguagugcgcuuuccuaauauuaccaaccuaugcccauucggagaggucuuuaaugcaacgaaguuccccucuguguaugccugggaaaggaaaaagauauccaacuguguugcugacuacagcgugcucuauaauucgaccuuuuucucuacauuuaaaugcuacggcgucuccgccacuaagcugaacgaucuuuguuucucaaauguguacgcagacaguuuuguaguuaaaggugaugacgugaggcaaaucgcuccugggcagaccggagucauugccgauuauaacuacaagcugccagacgacuucaugggcugcguguuggcguggaauacacggaacaucgaugccacuagcaccggcaauuauaacuacaaguaucgcuaccuccgacaugggaaacugagacccuuugagagggacauauccaacgucccguucucuccugauggaaagcccuguacaccuccugcauuaaauugcuauuggccccugaacgacuacgguuuuuacaccacuacgggcauuggguaucagccauaccgggugguugugcucagcuucgagcuucugaaugcucccgccacaguaugcggaccuaaauugucaaccgaucuaaucaagaaccagugugucaauuucaacuuuaauggccugacugguaccggggugcucacaccaaguuccaaacguuuccaaccguuucagcaguucggccgcgacguuagcgauuuuaccgacucugugagagaucccaagacuucagaaauccuggacauuaguccuugcgcuuucggaggcgucagcgugaucacaccagggacgaacgccuccucugagguagcagugcuuuaucaagauguuaauuguaccgacgucucgacugccauucacgcugaucagcugacacccgcguggaggauauacagcaccggaaacaauguguuucagacacaggcagguugcuugaucggcgccgaacacguggacacuuccuaugagugugacauuccuaucggggcuggaaucugcgccucauaccauaccgucagucuccugcggucuacgagccaaaaguccauuguugcauauaccaugucauuaggcgccgauagcucuauagcuuacuccaacaauacaaucgccauuccaacuaacuucaguaucagcauuaccacagaagugaugcccgugucuauggcaaaaacuuccguagacuguaauauguacaucugcggugauucaaccgagugugcgaaccugcuacuccaguaugggaguuuuugcacgcagcugaaccgagcucuuagcggcauagccgcagagcaggaccgcaauacaagagaagucuucgcccaagugaagcagauguacaaaaccccgacuuugaaguauuuuggaggcuucaacuucucgcagauccugccugauccacucaaacccacaaagagguccuuuauugaggaccugcuuuucaauaagguuacccuggcugaugccggguuuaugaaacaguacggagaauguuugggugacaucaacgcacgggaucucauuugcgcucaaaaguucaauggccugacuguguuaccuccccugcuaaccgacgauaugaucgccgcguauacagccgcucucgucucugggacggcaaccgccggauggacuuuuggcgcuggugccgcacugcagauaccauucgcgaugcagauggccuaccgcuuuaacgggauuggcgugacacagaauguucuuuaugagaaccaaaaacagaucgcuaaucaguucaacaaggccauuagccaaauccaggaaucauugaccacaaccaguacugcacugggaaaacuccaggacgugguaaaucagaacgcucaagcccugaauacguuagucaagcagcuguccucuaacuuuggcgcaauaagcuccgugcuuaaugauaucuugucaagacucgacccucccgaggccgaggugcagauugacaggcugaucacagggcgucuacagagccugcaaaccuacgucacucagcagcucauucgggcugcggaaauccgagccagugcaaaccuggcugccaccaagaugucugagugcguucuuggacaguccaaaagaguggauuucuguggcaaggguuaccacuugaugagcuuuccacaagccgcuccgcaugggguaguguuccugcacgucacauaugugccuucgcaggaaaggaacuuuacuaccgcacccgccauaugccacgagggaaaagcguacuucccacgcgaaggcguuuucguguuuaaugguacaucaugguucauuacgcagcggaacuuuuucucuccccaaaucaucaccacugacaauacauuugucaguggcaacugugaugugguuauugggaucauuaauaacaccguguaugacccuuuacagccagagcucgauuccuucaaggaggaacuggacaaauacuuuaagaaucauacuagccccgaugucgaccuuggagauauaucuggcaucaacgcuagcguagugaauauucagaaagagaucgacagacugaacgaaguugccaagaauuugaacgagucccucauugaucugcaggagcuagggaaguaugaacaaggaggcuacaucccugaggcaccgagggacggucaggccuaugugcgcaaagacggggaauggguccugcucucaacauucugaggacuagucccuguucccagagcccacuuuuuuuucuuuuuuugaaauaaaauagccugucuuucagaucucaaaggcucuuuucagagccaccaaaaaaaaaaaaaaaaaaaaaaaaaaaaaaaaaaaaaaaaaaaaaaaaaaaaaaaaaaaaaaaaaaaaaaaaaaaaaaaaaaaaaaaaaaaaaaaaaaaaa

SEQ ID NO: 15093 - RNA, 4334 nt, Artificial Sequence
  HCoV/OC43__P36334.1 spike protein mRNA human (1-1353)
aggagagucccgcagucggcguccagcggcucugcuuguucgugugugugucguugcaggccuuauucaagcuuaccauguuccugauccuccuuauuagccugcccaccgccuuugcugugauaggcgacuugaagugcacauccgauaacaucaaugacaaagauacugggccuccaccgauuucuacggacaccgucgauguuacaaacggauuagguacuuacuaugugcuggacagaguauaccuaaauaccacacucuuccugaacggcuauuaccccaccucagggaguacuuauaggaauauggcacuuaagggaagcgugcuguugucccggcucugguuuaaaccuccauuccugucugauuuuaucaacggcauuuucgccaaggucaaaaauacaaaggugaucaaggaccgcguuauguacucggaguuucccgcgauaaccaucgguucaacguucgugaacacuagcuauagugucgugguacagccucgaaccauuaauuccacacaagauggggacaacaaacugcagggacucuuagaaguuucugugugucaguacaauaugugcgaguacccacagacuaucugucaccccaaccugggcaaucaucguaaggaacuuuggcacuuggauaccggcgucgugagcugccuguauaaaagaaacuuuacauacgacgugaaugcugauuaucuauacuuccauuuuuaucaagaagggggaaccuucuacgccuauuuuacggacacuggugucguuacaaaguuccucuucaacguguaccugggcauggcacuuucccacuacuauguaaugccucugaccuguaacucaaaauugacucucgaguacugggugacaccacugaccaguaggcaguauuuacuggccuuuaaucaggacgggauuaucuucaacgcugaggauugcaugagcgacuuuaugucugagauaaaguguaagacgcaguccauugcaccgcccaccggagucuacgaacucaauggcuauacagugcaaccuaucgccgauguuuaccggcgcaaaccaaaccuucccaauugcaacauugaggcuuggcugaaugacaagucagugccuagcccauugaacugggaaagaaaaacuuucaguaauuguaacuuuaauaugucuucccuaaugagcuucauccaggccgauucguuuaccugcaacaauaucgacgcggcaaagauuuaugguauguguuucucuuccauaacaaucgauaaauuugccauucccaacgggaggaaggucgaccugcagcucggaaaucugggcuaccuucagucauucaacuaccggaucgauacuaccgcuacaaguugccaacuguauuacaacuugccggccgcaaaugugagcguaucccgcuuuaacccuucuaccuggaauaaacgauucggcuuuauagaggacagcguuuucaagcccagaccagcuggggugcucacuaaccaugaugucguguaugcccagcacugcuucaaggcgccuaaaaauuuuugucccugcaagcugaacggaucaugugucgguaguggcccagggaaaaauaacggaauuggcacgugccccgccgguacaaauuacuuaaccugugacaaccugugcacuccugacccaaucaccuucacagggaccuauaaguguccgcagacuaaaucccuagugggcaucggagagcacugcagcggccucgcaguuaagucugauuacugugggggaaauucaugcacauguaggccccaagcguuucuggguuggagugccgacagcugccuucagggcgauaagugcaacauuuucgcuaauuuuaucuugcaugacgugaacuccgggcugacguguucuaccgaucuccagaaagccaauacugacauuauacugggaguaugcgucaacuaugaucuuuacggcauccugggucaggggauuuucguggaaguuaacgcaacauacuauaauucguggcaaaacuugcucuacgacagcaauggcaaccuguauggauuucgggauuacaucaucaaucguaccuucaugauucgcuccuguuauucaggcagagugagugccgcuuuucacgcgaacucuagcgagccugcauuacuguucaggaauauaaagugcaacuacgucuuuaauaacucccuaacacggcagcuccagccaaucaauuauuucgacucauaccuggggugugugguaaacgccuacaauagcacugcuauuucugugcagaccugcgaucuuacgguuggauccgguuauugugucgacuacaguaaaaaccgacgcagcagaggcgccaucaccacaggguauagguuuacuaauuucgaacccuucaccgugaacucugugaacgauuccuuggagccugucggaggccuguacgaaauucaaaucccaucagaguuuacaauagguaauaugguugaguucauccagacuucuagccccaaggugaccauugacugcgcagccuuuguguguggggacuaugcugccugcaaaucgcagcucguagaauacggcuccuucugugauaacaucaaugcaauucugacggaggucaacgaauuacuggacacaacccagcuucaaguggcuaauucuuugaugaacggaguuacucucagcacaaagcugaaggauggcgugaauuuuaacgucgacgauaucaauuucucaccggugcuagggugccugggaagugagugcuccaaagcuaguagccgguccgccauagaagaccuccuguuugauaagguuaaacuuucagacgugggcuucguagaggcauauaacaauuguaccgguggggccgagauucgcgauuugaucugcguccagagcuacaagggaauuaaagugcugccuccauuacucagugaaaaccagaucucuggcuacacucuggcugccaccuccgcaagccuuuuucccccuuggacagcugccgcgggugugcccuucuaucugaauguccaguacagaauaaacggcuuggggguuacgauggacgugcucucgcaaaaucagaagcugaucgccaacgcuuuuaauaacgcacuauaugccauucaggagggauucgaugcuaccaacucagcccugguaaagauccaagcaguggucaaugcgaacgccgaagcucucaauaaccugcuucagcaguugucuaauagguucggcgccauuagugcaucccugcaggagaucuuaagccgucucgacgcucuggaagccgaggcacaaauagaucggcuuauuaacgggcgacugacugcccuaaaugcuuacgugucucagcagcucagcgacuccacacugguuaaauuuucagcggcccaggcaauggagaaggugaacgaaugugucaaaagucaaagcucuagaaucaauuucugcggaaacggcaaucauaucauuuccuuggugcagaacgcuccauauggucuguacuuuauccacuucucauauguuccuaccaaguacgugacagccagggucagucccggguuauguauugccggagaccgcggcauagcuccaaaaagcgguuacuuuguaaaugugaacaauacuuggauguauaccggcuccggguacuauuacccggagccuaucacggaaaacaacguuguggucaugucuacaugcgcagugaauuauaccaaggcccccuacguaaugcucaacacuucgauuccaaaucugcccgauuucaaagaggagcuugaccagugguuuaagaaccagaccagcguggcgccugaucugucauuggacuauaucaaugucacauuccucgaucugcaaguugaaaugaaccggcuacaggaggcuauuaaggugcugaaucaguccuacaucaaccuuaaagacauaggaacuuacgaauauuacgugaaguggccaugguaugucuggcuccugaucuguuuggccggcguggcaaugcugguuuuacucuuuuucauuugcuguugcaccggguguggaacaaguugcuuuaaaaagugcggcgguuguugcgaugacuacacgggguaucaagagcugguaaucaaaaccucucacgaugacugaggacuagucccuguucccagagcccacuuuuuuuucuuuuuuugaaauaaaauagccugucuuucagaucucaaaggcucuuuucagagccaccaaaaaaaaaaaaaaaaaaaaaaaaaaaaaaaaaaaaaaaaaaaaaaaaaaaaaaaaaaaaaaaaaaaaaaaaaaaaaaaaaaaaaaaaaaaaaaaaaaaaa

SEQ ID NO: 15094 - RNA, 4334 nt, Artificial Sequence
  HCoV/OC43__P36334.1 spike protein mRNA human (1-1353)(A1070P_L1071P)
aggagagucccgcagucggcguccagcggcucugcuuguucgugugugugucguugcaggccuuauucaagcuuaccauguuccugauccuccuuauuagccugcccaccgccuuugcugugauaggcgacuugaagugcacauccgauaacaucaaugacaaagauacugggccuccaccgauuucuacggacaccgucgauguuacaaacggauuagguacuuacuaugugcuggacagaguauaccuaaauaccacacucuuccugaacggcuauuaccccaccucagggaguacuuauaggaauauggcacuuaagggaagcgugcuguugucccggcucugguuuaaaccuccauuccugucugauuuuaucaacggcauuuucgccaaggucaaaaauacaaaggugaucaaggaccgcguuauguacucggaguuucccgcgauaaccaucgguucaacguucgugaacacuagcuauagugucgugguacagccucgaaccauuaauuccacacaagauggggacaacaaacugcagggacucuuagaaguuucugugugucaguacaauaugugcgaguacccacagacuaucugucaccccaaccugggcaaucaucguaaggaacuuuggcacuuggauaccggcgucgugagcugccuguauaaaagaaacuuuacauacgacgugaaugcugauuaucuauacuuccauuuuuaucaagaagggggaaccuucuacgccuauuuuacggacacuggugucguuacaaaguuccucuucaacguguaccugggcauggcacuuucccacuacuauguaaugccucugaccuguaacucaaaauugacucucgaguacugggugacaccacugaccaguaggcaguauuuacuggccuuuaaucaggacgggauuaucuucaacgcugaggauugcaugagcgacuuuaugucugagauaaaguguaagacgcaguccauugcaccgcccaccggagucuacgaacucaauggcuauacagugcaaccuaucgccgauguuuaccggcgcaaaccaaaccuucccaauugcaacauugaggcuuggcugaaugacaagucagugccuagcccauugaacugggaaagaaaaacuuucaguaauuguaacuuuaauaugucuucccuaaugagcuucauccaggccgauucguuuaccugcaacaauaucgacgcggcaaagauuuaugguauguguuucucuuccauaacaaucgauaaauuugccauucccaacgggaggaaggucgaccugcagcucggaaaucugggcuaccuucagucauucaacuaccggaucgauacuaccgcuacaaguugccaacuguauuacaacuugccggccgcaaaugugagcguaucccgcuuuaacccuucuaccuggaauaaacgauucggcuuuauagaggacagcguuuucaagcccagaccagcuggggugcucacuaaccaugaugucguguaugcccagcacugcuucaaggcgccuaaaaauuuuugucccugcaagcugaacggaucaugugucgguaguggcccagggaaaaauaacggaauuggcacgugccccgccgguacaaauuacuuaaccugugacaaccugugcacuccugacccaaucaccuucacagggaccuauaaguguccgcagacuaaaucccuagugggcaucggagagcacugcagcggccucgcaguuaagucugauuacugugggggaaauucaugcacauguaggccccaagcguuucuggguuggagugccgacagcugccuucagggcgauaagugcaacauuuucgcuaauuuuaucuugcaugacgugaacuccgggcugacguguucuaccgaucuccagaaagccaauacugacauuauacugggaguaugcgucaacuaugaucuuuacggcauccugggucaggggauuuucguggaaguuaacgcaacauacuauaauucguggcaaaacuugcucuacgacagcaauggcaaccuguauggauuucgggauuacaucaucaaucguaccuucaugauucgcuccuguuauucaggcagagugagugccgcuuuucacgcgaacucuagcgagccugcauuacuguucaggaauauaaagugcaacuacgucuuuaauaacucccuaacacggcagcuccagccaaucaauuauuucgacucauaccuggggugugugguaaacgccuacaauagcacugcuauuucugugcagaccugcgaucuuacgguuggauccgguuauugugucgacuacaguaaaaaccgacgcagcagaggcgccaucaccacaggguauagguuuacuaauuucgaacccuucaccgugaacucugugaacgauuccuuggagccugucggaggccuguacgaaauucaaaucccaucagaguuuacaauagguaauaugguugaguucauccagacuucuagccccaaggugaccauugacugcgcagccuuuguguguggggacuaugcugccugcaaaucgcagcucguagaauacggcuccuucugugauaacaucaaugcaauucugacggaggucaacgaauuacuggacacaacccagcuucaaguggcuaauucuuugaugaacggaguuacucucagcacaaagcugaaggauggcgugaauuuuaacgucgacgauaucaauuucucaccggugcuagggugccugggaagugagugcuccaaagcuaguagccgguccgccauagaagaccuccuguuugauaagguuaaacuuucagacgugggcuucguagaggcauauaacaauuguaccgguggggccgagauucgcgauuugaucugcguccagagcuacaagggaauuaaagugcugccuccauuacucagugaaaaccagaucucuggcuacacucuggcugccaccuccgcaagccuuuuucccccuuggacagcugccgcgggugugcccuucuaucugaauguccaguacagaauaaacggcuuggggguuacgauggacgugcucucgcaaaaucagaagcugaucgccaacgcuuuuaauaacgcacuauaugccauucaggagggauucgaugcuaccaacucagcccugguaaagauccaagcaguggucaaugcgaacgccgaagcucucaauaaccugcuucagcaguugucuaauagguucggcgccauuagugcaucccugcaggagaucuuaagccgucucgacccaccugaagcugaggcccaaauagaucggcugauuaacgggcgacuuacugcacugaaugccuacgugucucagcagcuaagcgacuccacacucguuaaauuuucagcugcgcaggccauggagaaggugaacgaaugugucaaaagucaaagcucuagaaucaauuucugcggaaacggcaaucauaucauuucccuggugcagaacgcacccuaugguuuguacuuuauccacuucucauauguuccaaccaaguacgugacagcuagggucaguccggggcuguguauugccggagaccgcggcauagccccuaaaagcgguuacuuuguaaaugugaacaauacuuggauguauaccggcuccggguacuauuaccccgagccaaucacggaaaacaacguuguggucaugucuacaugcgcugugaauuauaccaaggcacccuacguaauguuaaacacuucgauuccuaaucucccagauuucaaagaggagcuggaccagugguuuaagaaccagaccagcguggcccccgaucuuucacuggacuauaucaaugucacauucuuggaucuccaaguugaaaugaaccggcugcaggaggcgauuaaggugcuaaaucaguccuacaucaaccugaaagacauaggaacuuacgaauauuacgugaaguggccuugguaugucuggcuucucaucugucuggcuggcguggccauguugguucuguuauuuuucauuugcuguugcaccggguguggaacaaguugcuuuaaaaagugcggcgguuguugcgaugacuacacgggguaucaagagcucguaaucaaaaccucucacgaugacugaggacuagucccuguucccagagcccacuuuuuuuucuuuuuuugaaauaaaauagccugucuuucagaucucaaaggcucuuuucagagccaccaaaaaaaaaaaaaaaaaaaaaaaaaaaaaaaaaaaaaaaaaaaaaaaaaaaaaaaaaaaaaaaaaaaaaaaaaaaaaaaaaaaaaaaaaaaaaaaaaaaaa

SEQ ID NO: 15095 - RNA, 4361 nt, Artificial Sequence
  HCoV/OC43/1783A_10__AIL49484.1 spike protein mRNA human (1-1362)
aggagagucccgcagucggcguccagcggcucugcuuguucgugugugugucguugcaggccuuauucaagcuuaccauguuccugauccuccuuauuagccugcccaccgccuuugcugugauaggcgacuugaagugcccuuuagauuccagaacagggucucugaacaauaucgacacuggaccaccgucaauuaguacggcaaccgucgauguuacaaacggucuaggcacuuacuaugugcucgacaggguauaccugaauaccacacuuuuccugaacggguauuaccccaccagcggauccacuuaucggaauauggccuugaaaggcacagauaagcucucuacccugugguuuaaaccuccauuccugucggacuuuaucaacgguauuuucgcgaaggugaaaaauacgaaggucuuuaaggauggggugauguacucagaguuccccgcuaucacuauaggaagcaccuuuguuaacacaaguuauuccguggucgugcagccucgcacuaucaauucuacccaagacggcguaaacaaacuccagggcuuacuggaaguuagcgugugucaguacaauaugugcgaguacccacacacaauuugucaucccaaacuugggaaccacuucaaggaauuguggcauauggauaccggagucguguccugccuguauaagcgaaauuuuacguacgacgugaacgccacuuaucuauacuuccacuuuuaucaggaggguggcacauucuacgcauauuucaccgauacuggggucguuacaaaauuucucuucaauguguaccugggaauggcccuuucacauuacuauguaaugccucugaccuguaucagucguagagacauuggcuuuacguuggaauacugggugaccccacucacaagcaggcaauaucuguuagcuuucaaccaggaugguaucauauuuaacgcagucgacugcaugucugacuucauguccgagauuaaguguaagacucagucaaucgccccgcccaccgggguguacgagcugaauggauauacaguucagccuauugcugauguguaccggcgcaaaccagaccuccccaacugcaauaucgaagccuggcuuaacgauaagagcgucccuaguccacugaauugggagagaaaaacuuuuucuaacuguaauuucaacauguccagcuugaugucguuuauccaagcggacucuuuuaccugcaauaacauugaugcagccaagauauauggcauguguuucuccucaaucacaauugacaaauucgcuauccccaauggcaggaagguggaucuacagcuggggaaccucggauaccugcagaguuuuaauuaccggauagacaccacugccacgagcugccagcuuuauuacaaccugccggcagcuaauguauccguuucucgcuucaacccuagcacauggaacaaacgauucgguuuuauugaaaauucaguguucaagccccaaccagccggcgucuugaccaaccacgauguggucuaugcgcagcacugcuuuaaggccccuaaaaauuucugucccugcaagcucaacaguucccuguguguggggagcggaccaggcaaaaauaacgguaucgggacuugccccgcaggcaccaauuacuuaacaugucauaaccugugcaauccugacccaaucaccuuuacuggaccguauaaguguccccagacaaaaucucuaguuggcauuggggagcacugcucaggacucgcugugaagagugauuacugugguggcaacccuugcacgugucaaccacaggccuuccugggguggagcgcugacuccugccuucagggagacaagugcaauaucuuugccaacuugauucugcaugauguaaauucuggccucaccuguucgacugaccugcagaaagcaaacacagauauaaaacuuggugucugcgugaauuaugaccuguacgggaucagcggccaaggaauuuucguugaggugaacgccaccuacuauaacuccuggcagaauuugcucuacgauucaaacggcaaucuguauggguuuagagacuacaucacaaacaggacuuucaugauccggaguuguuauucuggacgugucagcgcugcguuucacgcaaauuccucagaacccgccuuacuguuccgcaacauuaagugcaauuacguguuuaacaauagccuaauaagacagcuccagccuaucaacuauuucgauucuuaccuggguuguguagugaaugcuuacaacuccaccgccauuaguguucaaacgugcgaccuuaccgucggcagcggguauuguguggauuacucuaagaauaggcggucccgacgcgcaaucacaacuggauauagauucaccaacuuugagccauucacagugaauagcgucaacgacaguuuggaacccguuggcggucuguacgagauucagaucccgagcgaauuuacuauagggaacauggaggaguucauccagaccucguccccuaaagugacgauugauugcgccgcuuuuguguguggcgacuaugccgcaugcaagucucagcucguagaauacggaucauucugugauaauaucaacgcgauucugacagaggucaaugaauuacuggacaccacucaacuucagguggcuaacucauugaugaauggcguuacacucaguaccaagcugaaagacggggugaacuuuaaugucgaugacaucaacuucuccucugugcuaggaugccugggcagcgagugcuccaaggccucaagcaggagugcaauagaagaucuccuguuugacaaaguuaaacuuucugauguggguuucguagccgcuuauaauaacuguacugggggagccgagauucgggacuugaucugcguccaguccuacaagggcauuaaggugcugccacccuuacucagcgagaaucagaucucggguuacacccuggcagcuacaucagccucucuuuuuccucccuggacggcggccgcuggcgugccauucuaucugaacguccaauaccgcauaaauggguugggaguuaccauggaugugcucagucagaaccagaagcugaucgcaaaugccuucaacaaugcucuagacgccauucaagaaggcuuugaugcaacuaacuccgcgcugguaaaaauccaggccguggucaacgcuaaugccgaggcacucaacaaucugcuucagcaguugagcaacagauucggggcuauuucuagcucccugcaagaaaucuuaucaaggcucgacgcccuggaggcagaagcccagauagaucgucuuauuaauggacggcugacagcucuaaacgcguaugugagucagcagcucagcgacucuacccugguuaaguuuuccgccgcacaagcuauggagaaagugaaugagugugucaagucacagaguagccgaaucaacuucugcggcaaugguaaccacaucauuuccuuggugcagaaugccccuuacgggcuguauuuuauccauuucucuuacguucccacaaaauaugugacugccaaggucucgccaggauuauguauugcuggcgauagagguauagcaccgaaaagcggcuacuuuguaaacgugaauaacaccuggauguacacggggucaggauauuacuauccugaacccaucacagagaauaacguuguggucaugaguaccugcgccgugaacuacacuaaggcgccauauguaaugcucaauaccuccacacccaaccugccugacuucagggaggaacuugaccagugguuuaagaaucaaacuucuguggcuccagaucugagcuuggacuacauuaacgucaccuuccucgaucugcagguugagaugaaucgccuacaggaagccaucaaagugcugaaccaauccuauauuaaucuuaaggacaucggcacauacgaguacuaugugaaauggcccugguacgucuggcuccugauaggguuggcaggaguggccaugcugguuuuacucuuuuucaucuguugcuguacgggcugcgguaccucauguuuuaagaaaugcgggggaugcugugaugacuauacuggcuaccaggaacugguaauuaagacaucucacgaugacugaggacuagucccuguucccagagcccacuuuuuuuucuuuuuuugaaauaaaauagccugucuuucagaucucaaaggcucuuuucagagccaccaaaaaaaaaaaaaaaaaaaaaaaaaaaaaaaaaaaaaaaaaaaaaaaaaaaaaaaaaaaaaaaaaaaaaaaaaaaaaaaaaaaaaaaaaaaaaaaaaaaaa

SEQ ID NO: 15096 - RNA, 4361 nt, Artificial Sequence
  HCoV/OC43/1783A_10__AIL49484.1 spike protein mRNA human (1-1362)(A1079P_L1080P)
aggagagucccgcagucggcguccagcggcucugcuuguucgugugugugucguugcaggccuuauucaagcuuaccauguuccugauccuccuuauuagccugcccaccgccuuugcugugauaggcgacuugaagugcccuuuagauuccagaacagggucucugaacaauaucgacacuggaccaccgucaauuaguacggcaaccgucgauguuacaaacggucuaggcacuuacuaugugcucgacaggguauaccugaauaccacacuuuuccugaacggguauuaccccaccagcggauccacuuaucggaauauggccuugaaaggcacagauaagcucucuacccugugguuuaaaccuccauuccugucggacuuuaucaacgguauuuucgcgaaggugaaaaauacgaaggucuuuaaggauggggugauguacucagaguuccccgcuaucacuauaggaagcaccuuuguuaacacaaguuauuccguggucgugcagccucgcacuaucaauucuacccaagacggcguaaacaaacuccagggcuuacuggaaguuagcgugugucaguacaauaugugcgaguacccacacacaauuugucaucccaaacuugggaaccacuucaaggaauuguggcauauggauaccggagucguguccugccuguauaagcgaaauuuuacguacgacgugaacgccacuuaucuauacuuccacuuuuaucaggaggguggcacauucuacgcauauuucaccgauacuggggucguuacaaaauuucucuucaauguguaccugggaauggcccuuucacauuacuauguaaugccucugaccuguaucagucguagagacauuggcuuuacguuggaauacugggugaccccacucacaagcaggcaauaucuguuagcuuucaaccaggaugguaucauauuuaacgcagucgacugcaugucugacuucauguccgagauuaaguguaagacucagucaaucgccccgcccaccgggguguacgagcugaauggauauacaguucagccuauugcugauguguaccggcgcaaaccagaccuccccaacugcaauaucgaagccuggcuuaacgauaagagcgucccuaguccacugaauugggagagaaaaacuuuuucuaacuguaauuucaacauguccagcuugaugucguuuauccaagcggacucuuuuaccugcaauaacauugaugcagccaagauauauggcauguguuucuccucaaucacaauugacaaauucgcuauccccaauggcaggaagguggaucuacagcuggggaaccucggauaccugcagaguuuuaauuaccggauagacaccacugccacgagcugccagcuuuauuacaaccugccggcagcuaauguauccguuucucgcuucaacccuagcacauggaacaaacgauucgguuuuauugaaaauucaguguucaagccccaaccagccggcgucuugaccaaccacgauguggucuaugcgcagcacugcuuuaaggccccuaaaaauuucugucccugcaagcucaacaguucccuguguguggggagcggaccaggcaaaaauaacgguaucgggacuugccccgcaggcaccaauuacuuaacaugucauaaccugugcaauccugacccaaucaccuuuacuggaccguauaaguguccccagacaaaaucucuaguuggcauuggggagcacugcucaggacucgcugugaagagugauuacugugguggcaacccuugcacgugucaaccacaggccuuccugggguggagcgcugacuccugccuucagggagacaagugcaauaucuuugccaacuugauucugcaugauguaaauucuggccucaccuguucgacugaccugcagaaagcaaacacagauauaaaacuuggugucugcgugaauuaugaccuguacgggaucagcggccaaggaauuuucguugaggugaacgccaccuacuauaacuccuggcagaauuugcucuacgauucaaacggcaaucuguauggguuuagagacuacaucacaaacaggacuuucaugauccggaguuguuauucuggacgugucagcgcugcguuucacgcaaauuccucagaacccgccuuacuguuccgcaacauuaagugcaauuacguguuuaacaauagccuaauaagacagcuccagccuaucaacuauuucgauucuuaccuggguuguguagugaaugcuuacaacuccaccgccauuaguguucaaacgugcgaccuuaccgucggcagcggguauuguguggauuacucuaagaauaggcggucccgacgcgcaaucacaacuggauauagauucaccaacuuugagccauucacagugaauagcgucaacgacaguuuggaacccguuggcggucuguacgagauucagaucccgagcgaauuuacuauagggaacauggaggaguucauccagaccucguccccuaaagugacgauugauugcgccgcuuuuguguguggcgacuaugccgcaugcaagucucagcucguagaauacggaucauucugugauaauaucaacgcgauucugacagaggucaaugaauuacuggacaccacucaacuucagguggcuaacucauugaugaauggcguuacacucaguaccaagcugaaagacggggugaacuuuaaugucgaugacaucaacuucuccucugugcuaggaugccugggcagcgagugcuccaaggccucaagcaggagugcaauagaagaucuccuguuugacaaaguuaaacuuucugauguggguuucguagccgcuuauaauaacuguacugggggagccgagauucgggacuugaucugcguccaguccuacaagggcauuaaggugcugccacccuuacucagcgagaaucagaucucggguuacacccuggcagcuacaucagccucucuuuuuccucccuggacggcggccgcuggcgugccauucuaucugaacguccaauaccgcauaaauggguugggaguuaccauggaugugcucagucagaaccagaagcugaucgcaaaugccuucaacaaugcucuagacgccauucaagaaggcuuugaugcaacuaacuccgcgcugguaaaaauccaggccguggucaacgcuaaugccgaggcacucaacaaucugcuucagcaguugagcaacagauucggggcuauuucuagcucccugcaagaaaucuuaucaaggcucgacccucccgaggccgaagcacagauagaucgucugauuaauggacggcuuacagcccugaacgcuuaugugagucagcagcuaagcgacucuacccucguuaaguuuuccgcggcccaagcaauggagaaagugaaugagugugucaagucacagaguagccgaaucaacuucugcggcaaugguaaccacaucauuucccuggugcagaaugcuccauacggguuguauuuuauccauuucucuuacguuccgacaaaauaugugacugccaaggucucgccuggacuguguauugccggcgauagagguauagcucccaaaagcggcuacuuuguaaacgugaauaacaccuggauguacacggggucaggauauuacuauccagaacccaucacagagaauaacguuguggucaugaguaccugcgcagugaacuacacuaaggccccuuauguaauguuaaauaccuccacaccaaaccuccccgacuucagggaggaacuggaccagugguuuaagaaucaaacuucuguggcgccugaucuuagccuggacuacauuaacgucaccuucuuggaucuccagguugagaugaaucgccugcaggaagcuaucaaagugcuaaaccaauccuauauuaaucugaaggacaucggcacauacgaguacuaugugaaauggccgugguacgucuggcuucucauagggcuggccggaguggcaauguugguucuguuauuuuucaucuguugcuguacgggcugcgguaccucauguuuuaagaaaugcgggggaugcugugaugacuauacuggcuaccaggaacucguaauuaagacaucucacgaugacugaggacuagucccuguucccagagcccacuuuuuuuucuuuuuuugaaauaaaauagccugucuuucagaucucaaaggcucuuuucagagccaccaaaaaaaaaaaaaaaaaaaaaaaaaaaaaaaaaaaaaaaaaaaaaaaaaaaaaaaaaaaaaaaaaaaaaaaaaaaaaaaaaaaaaaaaaaaaaaaaaaaaa

SEQ ID NO: 15097 - RNA, 4136 nt, Artificial Sequence
  HCoV/OC43/1783A_10__AIL49484.1 spike protein mRNA human (variant)
aggagagucccgcagucggcguccagcggcucugcuuguucgugugugugucguugcaggccuuauucaagcuuaccauguuccugauccuccuuauuagccugcccaccgccuuugcugugauaggcgacuugaagugcccuuuagauuccagaacagggucucugaacaauaucgacacuggaccaccgucaauuaguacggcaaccgucgauguuacaaacggucuaggcacuuacuaugugcucgacaggguauaccugaauaccacacuuuuccugaacggguauuaccccaccagcggauccacuuaucggaauauggccuugaaaggcacagauaagcucucuacccugugguuuaaaccuccauuccugucggacuuuaucaacgguauuuucgcgaaggugaaaaauacgaaggucuuuaaggauggggugauguacucagaguuccccgcuaucacuauaggaagcaccuuuguuaacacaaguuauuccguggucgugcagccucgcacuaucaauucuacccaagacggcguaaacaaacuccagggcuuacuggaaguuagcgugugucaguacaauaugugcgaguacccacacacaauuugucaucccaaacuugggaaccacuucaaggaauuguggcauauggauaccggagucguguccugccuguauaagcgaaauuuuacguacgacgugaacgccacuuaucuauacuuccacuuuuaucaggaggguggcacauucuacgcauauuucaccgauacuggggucguuacaaaauuucucuucaauguguaccugggaauggcccuuucacauuacuauguaaugccucugaccuguaucagucguagagacauuggcuuuacguuggaauacugggugaccccacucacaagcaggcaauaucuguuagcuuucaaccaggaugguaucauauuuaacgcagucgacugcaugucugacuucauguccgagauuaaguguaagacucagucaaucgccccgcccaccgggguguacgagcugaauggauauacaguucagccuauugcugauguguaccggcgcaaaccagaccuccccaacugcaauaucgaagccuggcuuaacgauaagagcgucccuaguccacugaauugggagagaaaaacuuuuucuaacuguaauuucaacauguccagcuugaugucguuuauccaagcggacucuuuuaccugcaauaacauugaugcagccaagauauauggcauguguuucuccucaaucacaauugacaaauucgcuauccccaauggcaggaagguggaucuacagcuggggaaccucggauaccugcagaguuuuaauuaccggauagacaccacugccacgagcugccagcuuuauuacaaccugccggcagcuaauguauccguuucucgcuucaacccuagcacauggaacaaacgauucgguuuuauugaaaauucaguguucaagccccaaccagccggcgucuugaccaaccacgauguggucuaugcgcagcacugcuuuaaggccccuaaaaauuucugucccugcaagcucaacaguucccuguguguggggagcggaccaggcaaaaauaacgguaucgggacuugccccgcaggcaccaauuacuuaacaugucauaaccugugcaauccugacccaaucaccuuuacuggaccguauaaguguccccagacaaaaucucuaguuggcauuggggagcacugcucaggacucgcugugaagagugauuacugugguggcaacccuugcacgugucaaccacaggccuuccugggguggagcgcugacuccugccuucagggagacaagugcaauaucuuugccaacuugauucugcaugauguaaauucuggccucaccuguucgacugaccugcagaaagcaaacacagauauaaaacuuggugucugcgugaauuaugaccuguacgggaucagcggccaaggaauuuucguugaggugaacgccaccuacuauaacuccuggcagaauuugcucuacgauucaaacggcaaucuguauggguuuagagacuacaucacaaacaggacuuucaugauccggaguuguuauucuggacgugucagcgcugcguuucacgcaaauuccucagaacccgccuuacuguuccgcaacauuaagugcaauuacguguuuaacaauagccuaauaagacagcuccagccuaucaacuauuucgauucuuaccuggguuguguagugaaugcuuacaacuccaccgccauuaguguucaaacgugcgaccuuaccgucggcagcggguauuguguggauuacucuaagaauggaggcuccgguucagcaaucacaacuggguauagguucaccaacuuugagccauucacagugaauagugucaacgacagcuuggaacccguuggcggacuguacgagauucagaucccgucggaauuuacuauaggcaacauggaggaguucauccagaccuccucuccuaaagugacgauugauugcgccgcuuuuguguguggggacuaugccgcaugcaagagccagcucguagaauacggaucauucugugauaauaucaacgcgauucugacagaggucaaugaauuacuggacaccacucaacuucagguggcuaacaguuugaugaauggcguuacacucuccaccaagcugaaagacggugugaacuuuaaugucgaugacaucaacuucucuagcgugcuagggugccugggauccgagugcucaaaggccagcagucggucugcaauagaagaucuccuguuugacaaaguuaaacuuuccgaugugggcuucguagccgcuuauaauaacuguacugguggcgccgagauucgagacuugaucugcguccagagcuacaaggggauuaaggugcugccacccuuacucucggagaaucagaucucaggauacacccuggcagcuacaucugccagucuuuuuccucccuggacggcggccgcuggcgugccauucuaucugaacguccaauaccgcauaaauggguugggaguuaccauggaugugcucucccagaaccagaagcugaucgcaaaugccuucaacaaugcucuagacgccauucaagaaggcuuugaugcaacuaacagcgcgcugguaaaaauccaggccguggucaacgcuaaugccgaggcacucaacaaucugcuucagcaguugucuaacagauucggugcuauuagcuccucacugcaagaaaucuuaaguaggcucgacccucccgaggccgaagcacagauagaucggcugauuaaugggcgccuuacagcccugaacgcuuaugugagccagcagcuaucugacuccacccucguuaaguuuucagcggcccaagcaauggagaaagugaaugagugugucaagagucagagcuccagaaucaacuucugcggaaauggcaaccacaucauuucucuggugcagaaugcuccauacgguuuguauuuuauccauuucucguacguuccgacaaaauaugugacugccaaggucagcccuggccuguguauugccggggauaggggaauagcucccaaaucaggcuacuuuguaaacgugaauaacaccuggauguacacgggguccggauauuacuauccagaacccaucacagagaauaacguuguggucaugaguaccugcgcagugaacuacacuaaggccccuuauguaauguuaaauaccucuacaccaaaccuccccgacuuccgugaggaacuggaccagugguuuaagaaucaaacuagcguggcgccugaucuuucccuggacuacauuaacgucaccuucuuggaucuccagguugagaugaaucggcugcaggaagcuaucaaagugcuaaacugaggacuagucccuguucccagagcccacuuuuuuuucuuuuuuugaaauaaaauagccugucuuucagaucucaaaggcucuuuucagagccaccaaaaaaaaaaaaaaaaaaaaaaaaaaaaaaaaaaaaaaaaaaaaaaaaaaaaaaaaaaaaaaaaaaaaaaaaaaaaaaaaaaaaaaaaaaaaaaaaaaaaa

SEQ ID NO: 15098 - RNA, 4217 nt, Artificial Sequence
  HCoV/OC43/1783A_10__AIL49484.1 spike protein mRNA human (variant)
aggagagucccgcagucggcguccagcggcucugcuuguucgugugugugucguugcaggccuuauucaagcuuaccauguuccugauccuccuuauuagccugcccaccgccuuugcugugauaggcgacuugaagugcccuuuagauuccagaacagggucucugaacaauaucgacacuggaccaccgucaauuaguacggcaaccgucgauguuacaaacggucuaggcacuuacuaugugcucgacaggguauaccugaauaccacacuuuuccugaacggguauuaccccaccagcggauccacuuaucggaauauggccuugaaaggcacagauaagcucucuacccugugguuuaaaccuccauuccugucggacuuuaucaacgguauuuucgcgaaggugaaaaauacgaaggucuuuaaggauggggugauguacucagaguuccccgcuaucacuauaggaagcaccuuuguuaacacaaguuauuccguggucgugcagccucgcacuaucaauucuacccaagacggcguaaacaaacuccagggcuuacuggaaguuagcgugugucaguacaauaugugcgaguacccacacacaauuugucaucccaaacuugggaaccacuucaaggaauuguggcauauggauaccggagucguguccugccuguauaagcgaaauuuuacguacgacgugaacgccacuuaucuauacuuccacuuuuaucaggaggguggcacauucuacgcauauuucaccgauacuggggucguuacaaaauuucucuucaauguguaccugggaauggcccuuucacauuacuauguaaugccucugaccuguaucagucguagagacauuggcuuuacguuggaauacugggugaccccacucacaagcaggcaauaucuguuagcuuucaaccaggaugguaucauauuuaacgcagucgacugcaugucugacuucauguccgagauuaaguguaagacucagucaaucgccccgcccaccgggguguacgagcugaauggauauacaguucagccuauugcugauguguaccggcgcaaaccagaccuccccaacugcaauaucgaagccuggcuuaacgauaagagcgucccuaguccacugaauugggagagaaaaacuuuuucuaacuguaauuucaacauguccagcuugaugucguuuauccaagcggacucuuuuaccugcaauaacauugaugcagccaagauauauggcauguguuucuccucaaucacaauugacaaauucgcuauccccaauggcaggaagguggaucuacagcuggggaaccucggauaccugcagaguuuuaauuaccggauagacaccacugccacgagcugccagcuuuauuacaaccugccggcagcuaauguauccguuucucgcuucaacccuagcacauggaacaaacgauucgguuuuauugaaaauucaguguucaagccccaaccagccggcgucuugaccaaccacgauguggucuaugcgcagcacugcuuuaaggccccuaaaaauuucugucccugcaagcucaacaguucccuguguguggggagcggaccaggcaaaaauaacgguaucgggacuugccccgcaggcaccaauuacuuaacaugucauaaccugugcaauccugacccaaucaccuuuacuggaccguauaaguguccccagacaaaaucucuaguuggcauuggggagcacugcucaggacucgcugugaagagugauuacugugguggcaacccuugcacgugucaaccacaggccuuccugggguggagcgcugacuccugccuucagggagacaagugcaauaucuuugccaacuugauucugcaugauguaaauucuggccucaccuguucgacugaccugcagaaagcaaacacagauauaaaacuuggugucugcgugaauuaugaccuguacgggaucagcggccaaggaauuuucguugaggugaacgccaccuacuauaacuccuggcagaauuugcucuacgauucaaacggcaaucuguauggguuuagagacuacaucacaaacaggacuuucaugauccggaguuguuauucuggacgugucagcgcugcguuucacgcaaauuccucagaacccgccuuacuguuccgcaacauuaagugcaauuacguguuuaacaauagccuaauaagacagcuccagccuaucaacuauuucgauucuuaccuggguuguguagugaaugcuuacaacuccaccgccauuaguguucaaacgugcgaccuuaccgucggcagcggguauuguguggauuacucuaagaauggaggcuccgguucagcaaucacaacuggguauagguucaccaacuuugagccauucacagugaauagugucaacgacagcuuggaacccguuggcggacuguacgagauucagaucccgucggaauuuacuauaggcaacauggaggaguucauccagaccuccucuccuaaagugacgauugauugcgccgcuuuuguguguggggacuaugccgcaugcaagagccagcucguagaauacggaucauucugugauaauaucaacgcgauucugacagaggucaaugaauuacuggacaccacucaacuucagguggcuaacaguuugaugaauggcguuacacucuccaccaagcugaaagacggugugaacuuuaaugucgaugacaucaacuucucuagcgugcuagggugccugggauccgagugcucaaaggccagcagucggucugcaauagaagaucuccuguuugacaaaguuaaacuuuccgaugugggcuucguagccgcuuauaauaacuguacugguggcgccgagauucgagacuugaucugcguccagagcuacaaggggauuaaggugcugccacccuuacucucggagaaucagaucucaggauacacccuggcagcuacaucugccagucuuuuuccucccuggacggcggccgcuggcgugccauucuaucugaacguccaauaccgcauaaauggguugggaguuaccauggaugugcucucccagaaccagaagcugaucgcaaaugccuucaacaaugcucuagacgccauucaagaaggcuuugaugcaacuaacagcgcgcugguaaaaauccaggccguggucaacgcuaaugccgaggcacucaacaaucugcuucagcaguugucuaacagauucggugcuauuagcuccucacugcaagaaaucuuaaguaggcucgacccucccgaggccgaagcacagauagaucggcugauuaaugggcgccuuacagcccugaacgcuuaugugagccagcagcuaucugacuccacccucguuaaguuuucagcggcccaagcaauggagaaagugaaugagugugucaagagucagagcuccagaaucaacuucugcggaaauggcaaccacaucauuucucuggugcagaaugcuccauacgguuuguauuuuauccauuucucguacguuccgacaaaauaugugacugccaaggucagcccuggccuguguauugccggggauaggggaauagcucccaaaucaggcuacuuuguaaacgugaauaacaccuggauguacacgggguccggauauuacuauccagaacccaucacagagaauaacguuguggucaugaguaccugcgcagugaacuacacuaaggccccuuauguaauguuaaauaccucuacaccaaaccuccccgacuuccgugaggaacuggaccagugguuuaagaaucaaacuagcguggcgccugaucuuucccuggacuacauuaacgucaccuucuuggaucuccagguugagaugaaucggcugcaggaagcuaucaaagugcuaaacggcgguuauauuccggaggccccacgagacgggcaagcauacgugagaaaggauggagaauggguccugcuuucaacauuuugaggacuagucccuguucccagagcccacuuuuuuuucuuuuuuugaaauaaaauagccugucuuucagaucucaaaggcucuuuucagagccaccaaaaaaaaaaaaaaaaaaaaaaaaaaaaaaaaaaaaaaaaaaaaaaaaaaaaaaaaaaaaaaaaaaaaaaaaaaaaaaaaaaaaaaaaaaaaaaaaaaaaa

SEQ ID NO: 15099 - RNA, 4328 nt, Artificial Sequence
  HCoV/HKU1/N5__Q0ZME7.1 spike protein mRNA human (1-1351)
aggagagucccgcagucggcguccagcggcucugcuuguucgugugugugucguugcaggccuuauucaagcuuaccauguuccugaucauuuuuauacuccccaccacacuugccgugaucggcgacuucaacugcacuaauagcuuuauuaacgauuacaauaagacgaucccuagaauuuccgaggacgucguugaugugucucugggguugggaaccuauuacguauuaaacaggguguaucugaauacaacucuacucuucaccgguuacuuuccaaaaucaggcgcuaacuuccgggaccuggcacuuaaggggaguaucuaucugagcacauugugguacaaaccgcccuuucucuccgauuucaauaacggaauauuuucuaaggucaaaaauaccaagcuguaugugaacaauacucuguacucggaguucucaacaaucguuauuggcagcguguuugucaacaccaguuacacgaucgugguacagccucacaaugguauucucgaaaucacugccugucaauauaccaugugcgaauacccacauacaguuuguaaguccaaagggucuauacgcaacgagagcuggcacauugacuccucagaacccuuaugccuguucaagaaaaauuuuacuuauaacgugagugcggauuggcuuuacuuccauuucuaucaggagcgaggagucuuuuacgcuuauuacgccgacgugggcaugccuaccacauucuuguuuagccuguaccuaggcaccauccucucucacuauuacgugaugccacugacguguaacgcaauuuccucaaauacugauaacgagacacuugaauauugggucacuccccugagccguagacaguacuugcucaauuucgacgagcaugggguuaucaccaacgccguggauugcaguucuuccuuucugagcgaaauccaguguaagacacaaucguucgcuccuaauaccggaguauaugacuuaucugguuuuacggugaaaccagucgcaaccguguacaggcggauuccgaaccugcccgauugcgacauagacaauuggcucaacaauguuuccgugccuucaccacuuaacugggagcgcagaaucuucaguaauuguaacuuuaaucugagcacauugcuaaggcugguccacguggauuccuucucuugcaacaaucucgacaagagcaagauuuuuggcucauguuucaacaguaucacuguagauaaauuugccauacccaaccggcgccgagacgaucugcagcuuggguccagcggauuccugcagucuucaaauuauaagauugacaucaguagcuccucuugccaguuguacuacucgcucccucugguuaacgugaccaucaauaacuucaauccaagcuccuggaacagaagguauggcuuugguucauucaauuuaaguucuuacgaugucguguauagcgaccacugcuuuuccgucaacucagauuucugucccugcgcugacccgagcgugguuaauucuugugccaaauccaagccucccagugcgauuugcccagcagggacaaaauaccggcauugugaucuggacacuacccuauaugugaagaacuggugccguuguagcugccucccugaccccaucucuacauacuccccaaauaccuguccccaaaagaagguagucgugggaauuggcgagcacugcccuggccuggggauaaacgaagagaaguguggaacucagcuuaaucauucaaguugcuuuugcagcccagaugccuucuuggguuggucguuugacuccuguaucucuaacaaucgcugcaacauuuucagcaacuuuaucuucaauggcaucaacucagggacgacauguaguaaugaucugcucuauuccaacaccgaaauuucuacuggaguuugcgugaauuacgaccuguacggcauaaccggucaggggaucuuuaaagaggucagcgcugccuauuacaacaauuggcagaaccuucuguaugauuccaauggcaacauuaucggauucaaggacuuuuugacaaauaaaaccuacacuauucucccguguuauucaggcagagugagcgcagcuuucuaccaaaacaguucuucccccgcccuguuauauaggaaucugaagugcagcuacguacuaaacaauaucucguucauaucacagccuuuuuacuucgauucuuaucucgggugugugcugaacgcgguuaaccuuacaaguuacuccgucagcucuugcgacuugcggaugggaagcgguuuuuguaucgauuaugcccugccauccucacgacgcaaaagaaggggcauuaguagccccuaccgguucgugacguuugaaccuuucaaugugucuuuugucaacgacuccguugagaccguagggggacucuucgagauccagauuccaacuaauuuuacaaucgcaggccacgaagaguucauacaaaccucaagucccaaggugacaauugauugcagcgcuuuuguguguuccaacuaugccgcuugccacgaccuguuaucugaauacgguacuuucugcgauaauaucaacucgauucugaaugaggucaacgaccuuuuggacaucacccagcuccagguggccaaugcacugaugcaggggguuacgcuaagcucaaaccugaauaccaaccuccauuccgauguggacaauauagauuucaagagucugcuuggcuguuugggaucucaaugcggcagcuccucacgcucucuguuagaagaccuccuguuuaacaaagucaaacuuagcgaugugggguucguugaggccuauaauaacuguacaggagguagugagaucagagaccuguugugcgugcaguccuuuaauggcauuaaaguacucccgccuauccugagcgaaacucagauuucuggguacaccacagcugcgacugucgcagccauguucccacccuggucagcugccgcaggagugccuuuuucccuaaacgugcaguacaggaucaacggccugggugucaccauggauguucucaauaagaaccaaaaacugauagccaaugcuuucaacaaggcccuuuugaguauucagaauggguuuacggcaacaaacagcgcgcuggcuaagauccagucggugguaaaugccaacgcacaggccuuaaauucucuccugcaacagcuuuucaacaaauuuggcgcuaucuccagcucacugcaggagauucuaagucgucucgacaaucuggaagcccaggugcaaaucgaucgguugauuaacggacgacugaccgcauuaaaugcuuaugucucucagcagcucuccgacauaacucugaucaaggccggcgcgagcagagccauugagaaagugaacgaauguguuaagucacaaagucccaggaucaauuucugcgggaacggaaaccacauucuuagccuggugcagaaugcuccauacggcuugcucuuuauccauuucuccuauaaaccuacaucuuuuaagaccguccuggugagccccggucuaugucuguccggggaucgcggaauagcaccaaagcagggcuacuucaucaaacagaacgacucauggauguucacugguucuaguuauuacuauccggagccuauuucggauaagaauguuguguuuaugaacagcugcuccgucaauuucaccaaagcccccuuuaucuaccuuaacaauucuauuccaaaccucucagacuucgaggcugaacugagcuugugguuuaagaaucacacauccaucgcccccaaccugacguucaauagucauauaaacgcaaccuuuuuagaccucuacuaugagaugaauguaauucaagaaucuaucaaaagccugaacucauccuucaucaaucuuaaggagauuggcacuuacgagauguaugugaaauggccuugguacauauggcuguugaucguuauucucuuuaucauuuuccugaugauccuauuuuucauauguugcuguacagggugcggaagugcgugcuuuagcaagugucacaacugcugugaugaauauggcgggcacaacgacuucgugaucaaggccucucaugaugacugaggacuagucccuguucccagagcccacuuuuuuuucuuuuuuugaaauaaaauagccugucuuucagaucucaaaggcucuuuucagagccaccaaaaaaaaaaaaaaaaaaaaaaaaaaaaaaaaaaaaaaaaaaaaaaaaaaaaaaaaaaaaaaaaaaaaaaaaaaaaaaaaaaaaaaaaaaaaaaaaaaaaa

SEQ ID NO: 15100 - RNA, 4328 nt, Artificial Sequence
  HCoV/HKU1/N5__Q0ZME7.1 spike protein mRNA human (1-1351)(N1067P_L1068P)
aggagagucccgcagucggcguccagcggcucugcuuguucgugugugugucguugcaggccuuauucaagcuuaccauguuccugaucauuuuuauacuccccaccacacuugccgugaucggcgacuucaacugcacuaauagcuuuauuaacgauuacaauaagacgaucccuagaauuuccgaggacgucguugaugugucucugggguugggaaccuauuacguauuaaacaggguguaucugaauacaacucuacucuucaccgguuacuuuccaaaaucaggcgcuaacuuccgggaccuggcacuuaaggggaguaucuaucugagcacauugugguacaaaccgcccuuucucuccgauuucaauaacggaauauuuucuaaggucaaaaauaccaagcuguaugugaacaauacucuguacucggaguucucaacaaucguuauuggcagcguguuugucaacaccaguuacacgaucgugguacagccucacaaugguauucucgaaaucacugccugucaauauaccaugugcgaauacccacauacaguuuguaaguccaaagggucuauacgcaacgagagcuggcacauugacuccucagaacccuuaugccuguucaagaaaaauuuuacuuauaacgugagugcggauuggcuuuacuuccauuucuaucaggagcgaggagucuuuuacgcuuauuacgccgacgugggcaugccuaccacauucuuguuuagccuguaccuaggcaccauccucucucacuauuacgugaugccacugacguguaacgcaauuuccucaaauacugauaacgagacacuugaauauugggucacuccccugagccguagacaguacuugcucaauuucgacgagcaugggguuaucaccaacgccguggauugcaguucuuccuuucugagcgaaauccaguguaagacacaaucguucgcuccuaauaccggaguauaugacuuaucugguuuuacggugaaaccagucgcaaccguguacaggcggauuccgaaccugcccgauugcgacauagacaauuggcucaacaauguuuccgugccuucaccacuuaacugggagcgcagaaucuucaguaauuguaacuuuaaucugagcacauugcuaaggcugguccacguggauuccuucucuugcaacaaucucgacaagagcaagauuuuuggcucauguuucaacaguaucacuguagauaaauuugccauacccaaccggcgccgagacgaucugcagcuuggguccagcggauuccugcagucuucaaauuauaagauugacaucaguagcuccucuugccaguuguacuacucgcucccucugguuaacgugaccaucaauaacuucaauccaagcuccuggaacagaagguauggcuuugguucauucaauuuaaguucuuacgaugucguguauagcgaccacugcuuuuccgucaacucagauuucugucccugcgcugacccgagcgugguuaauucuugugccaaauccaagccucccagugcgauuugcccagcagggacaaaauaccggcauugugaucuggacacuacccuauaugugaagaacuggugccguuguagcugccucccugaccccaucucuacauacuccccaaauaccuguccccaaaagaagguagucgugggaauuggcgagcacugcccuggccuggggauaaacgaagagaaguguggaacucagcuuaaucauucaaguugcuuuugcagcccagaugccuucuuggguuggucguuugacuccuguaucucuaacaaucgcugcaacauuuucagcaacuuuaucuucaauggcaucaacucagggacgacauguaguaaugaucugcucuauuccaacaccgaaauuucuacuggaguuugcgugaauuacgaccuguacggcauaaccggucaggggaucuuuaaagaggucagcgcugccuauuacaacaauuggcagaaccuucuguaugauuccaauggcaacauuaucggauucaaggacuuuuugacaaauaaaaccuacacuauucucccguguuauucaggcagagugagcgcagcuuucuaccaaaacaguucuucccccgcccuguuauauaggaaucugaagugcagcuacguacuaaacaauaucucguucauaucacagccuuuuuacuucgauucuuaucucgggugugugcugaacgcgguuaaccuuacaaguuacuccgucagcucuugcgacuugcggaugggaagcgguuuuuguaucgauuaugcccugccauccucacgacgcaaaagaaggggcauuaguagccccuaccgguucgugacguuugaaccuuucaaugugucuuuugucaacgacuccguugagaccguagggggacucuucgagauccagauuccaacuaauuuuacaaucgcaggccacgaagaguucauacaaaccucaagucccaaggugacaauugauugcagcgcuuuuguguguuccaacuaugccgcuugccacgaccuguuaucugaauacgguacuuucugcgauaauaucaacucgauucugaaugaggucaacgaccuuuuggacaucacccagcuccagguggccaaugcacugaugcaggggguuacgcuaagcucaaaccugaauaccaaccuccauuccgauguggacaauauagauuucaagagucugcuuggcuguuugggaucucaaugcggcagcuccucacgcucucuguuagaagaccuccuguuuaacaaagucaaacuuagcgaugugggguucguugaggccuauaauaacuguacaggagguagugagaucagagaccuguugugcgugcaguccuuuaauggcauuaaaguacucccgccuauccugagcgaaacucagauuucuggguacaccacagcugcgacugucgcagccauguucccacccuggucagcugccgcaggagugccuuuuucccuaaacgugcaguacaggaucaacggccugggugucaccauggauguucucaauaagaaccaaaaacugauagccaaugcuuucaacaaggcccuuuugaguauucagaauggguuuacggcaacaaacagcgcgcuggcuaagauccagucggugguaaaugccaacgcacaggccuuaaauucucuccugcaacagcuuuucaacaaauuuggcgcuaucuccagcucacugcaggagauucuaagucgucucgaucccccagaagcccaggugcaaaucgaccggcugauuaauggacgauugaccgcacugaacgcuuaugucucucagcaguuauccgacauaacucucaucaaggccggcgcgagcagagccauugagaaagugaaugaauguguuaagucacaaaguccuaggaucaacuucugcgggaauggaaaccacauucugagccuugugcagaacgcucccuacggccuguuguuuauccauuucuccuauaaaccaacaucuuuuaagaccguccucgugagcccgggucugugucuauccggggaucgcggaauagcaccuaagcagggcuacuucaucaaacagaaugacucauggauguucacugguucuaguuauuacuaucccgagccaauuucggauaagaacguuguguuuaugaauagcugcuccgucaacuucaccaaagcccccuuuaucuaccugaauaacucuauuccuaaucuuucagacuucgaggcugaacucagccugugguuuaagaaccacacauccaucgccccaaauuugacguucaacagucauauaaaugcaaccuuucuggacuuauacuaugagaugaacguaauucaagaaucuaucaaaagccucaauucauccuucaucaaccugaaggagauuggcacuuacgagauguaugugaaauggcccugguacauauggcuucugaucguuauuuuguuuaucauuuuccucaugauccuguuuuucauauguugcuguacagggugcggaagugcgugcuuuagcaagugucacaauugcugugaugaauauggcgggcacaacgacuucgugaucaaggccucucaugaugacugaggacuagucccuguucccagagcccacuuuuuuuucuuuuuuugaaauaaaauagccugucuuucagaucucaaaggcucuuuucagagccaccaaaaaaaaaaaaaaaaaaaaaaaaaaaaaaaaaaaaaaaaaaaaaaaaaaaaaaaaaaaaaaaaaaaaaaaaaaaaaaaaaaaaaaaaaaaaaaaaaaaaa

SEQ ID NO: 15101 - RNA, 4103 nt, Artificial Sequence
  HCoV/HKU1/N5__Q0ZME7.1 spike protein mRNA human (variant)
aggagagucccgcagucggcguccagcggcucugcuuguucgugugugugucguugcaggccuuauucaagcuuaccauguuccugaucauuuuuauacuccccaccacacuugccgugaucggcgacuucaacugcacuaauagcuuuauuaacgauuacaauaagacgaucccuagaauuuccgaggacgucguugaugugucucugggguugggaaccuauuacguauuaaacaggguguaucugaauacaacucuacucuucaccgguuacuuuccaaaaucaggcgcuaacuuccgggaccuggcacuuaaggggaguaucuaucugagcacauugugguacaaaccgcccuuucucuccgauuucaauaacggaauauuuucuaaggucaaaaauaccaagcuguaugugaacaauacucuguacucggaguucucaacaaucguuauuggcagcguguuugucaacaccaguuacacgaucgugguacagccucacaaugguauucucgaaaucacugccugucaauauaccaugugcgaauacccacauacaguuuguaaguccaaagggucuauacgcaacgagagcuggcacauugacuccucagaacccuuaugccuguucaagaaaaauuuuacuuauaacgugagugcggauuggcuuuacuuccauuucuaucaggagcgaggagucuuuuacgcuuauuacgccgacgugggcaugccuaccacauucuuguuuagccuguaccuaggcaccauccucucucacuauuacgugaugccacugacguguaacgcaauuuccucaaauacugauaacgagacacuugaauauugggucacuccccugagccguagacaguacuugcucaauuucgacgagcaugggguuaucaccaacgccguggauugcaguucuuccuuucugagcgaaauccaguguaagacacaaucguucgcuccuaauaccggaguauaugacuuaucugguuuuacggugaaaccagucgcaaccguguacaggcggauuccgaaccugcccgauugcgacauagacaauuggcucaacaauguuuccgugccuucaccacuuaacugggagcgcagaaucuucaguaauuguaacuuuaaucugagcacauugcuaaggcugguccacguggauuccuucucuugcaacaaucucgacaagagcaagauuuuuggcucauguuucaacaguaucacuguagauaaauuugccauacccaaccggcgccgagacgaucugcagcuuggguccagcggauuccugcagucuucaaauuauaagauugacaucaguagcuccucuugccaguuguacuacucgcucccucugguuaacgugaccaucaauaacuucaauccaagcuccuggaacagaagguauggcuuugguucauucaauuuaaguucuuacgaugucguguauagcgaccacugcuuuuccgucaacucagauuucugucccugcgcugacccgagcgugguuaauucuugugccaaauccaagccucccagugcgauuugcccagcagggacaaaauaccggcauugugaucuggacacuacccuauaugugaagaacuggugccguuguagcugccucccugaccccaucucuacauacuccccaaauaccuguccccagaaaaagguagucgugggaauuggcgagcacugcccuggccuggggauaaacgaagagaaguguggaacucaacuuaaucauucaaguugcuuuugcagcccagaugccuucuuggguuggucguuugacuccuguaucucuaacaaucgcugcaacauuuucagcaacuuuaucuucaauggcaucaacucagggacgacauguaguaaugaucugcucuauuccaacaccgaaauuucuacuggaguuugcgugaauuacgaccuguacggcauaaccggucaggggaucuuuaaagaggucagcgcugccuauuacaacaauuggcagaaccuucuguaugauuccaauggcaacauuaucggauucaaggacuuuuugacaaauaaaaccuacacuauucucccguguuauucaggcagagugagcgcagcuuucuaccaaaacaguucuucccccgcccuguuauauaggaaucugaagugcagcuacguacuaaacaauaucucguucauaucacagccuuuuuacuucgauucuuaucucgggugugugcugaacgcgguuaaccuuacaaguuacuccgucagcucuugcgacuugcggaugggaagcgguuuuuguaucgauuaugcccugccauccucaggcgggaguggaagcggcauuucuucccccuaccgauucgugacguuugaaccuuucaaugugucauuugucaacgacaguguugagaccguggguggccucuucgagauccagauuccaacuaauuuuacaaucgcagggcacgaagaguucauacaaaccagcucccccaaagugacaauugauugcucugcuuuuguauguucgaacuaugccgcuugccacgaccuguuaagcgaauacggaacuuucugcgauaauaucaacucaauucugaaugaggucaacgaccuuuuggacaucacccagcuccagguggccaaugcacugaugcagggcguuacgcuauccaguaaccugaauaccaaccuccauucugauguggacaauauagauuucaagagccugcuuggguguuugggaucccaaugcgguucaucuagccgcagucuguuagaagaccuccuguuuaacaaggucaaacuuuccgaugugggcuucguugaggccuauaauaacuguacagggggaagcgagaucagagaccuguugugcgugcagucuuuuaauggcauuaagguacucccgccuauccugucagaaacucagauuuccgguuacaccacagcugcgacugucgcagccauguucccacccuggagugcugccgcaggggugccuuuuagccuaaacgugcaguacaggaucaacggccugggagucaccauggauguucucaauaaaaaccaaaagcugauagccaaugcuuucaacaaagcccuuuugucgauucagaauggcuuuacggcaacaaacucugcgcuggcuaagauccaguccgugguaaaugccaacgcacaggccuuaaauagccuccugcaacagcuuuucaacaaguuuggggcuaucucaaguucucugcaggagauucuaucccggcucgaucccccagaagcccaggugcaaaucgaccgccugauuaauggaagauugaccgcacugaacgcuuaugucagccagcaguuaucagacauaacucucaucaaagccggcgcgaguagggccauugagaaggugaaugaauguguuaaaagccaauccccucguaucaacuucugcgguaaugggaaccacauucugucucuugugcagaacgcucccuacggacuguuguuuauccauuucagcuauaagccaacauccuuuaaaaccguccucgugucaccgggccugugucuaucuggugaucggggcauagcaccuaagcagggguacuucaucaagcagaaugacaguuggauguucacuggaucgagcuauuacuaucccgagccaauuuccgauaaaaacguuguguuuaugaacucuugcucagucaauuucaccaaggcccccuuuaucuaccugaauaacagcauuccuaaucuuuccgacuucgaggcugaacucagucugugguuuaaaaaccacacaucuaucgccccaaauuugacguucaacagccauauaaaugcaaccuuucuggacuuauacuaugagaugaacguaauucaagaaucaaucaagucccucaauugaggacuagucccuguucccagagcccacuuuuuuuucuuuuuuugaaauaaaauagccugucuuucagaucucaaaggcucuuuucagagccaccaaaaaaaaaaaaaaaaaaaaaaaaaaaaaaaaaaaaaaaaaaaaaaaaaaaaaaaaaaaaaaaaaaaaaaaaaaaaaaaaaaaaaaaaaaaaaaaaaaaaa

SEQ ID NO: 15102 - RNA, 4184 nt, Artificial Sequence
  HCoV/HKU1/N5__Q0ZME7.1 spike protein mRNA human (variant)
aggagagucccgcagucggcguccagcggcucugcuuguucgugugugugucguugcaggccuuauucaagcuuaccauguuccugaucauuuuuauacuccccaccacacuugccgugaucggcgacuucaacugcacuaauagcuuuauuaacgauuacaauaagacgaucccuagaauuuccgaggacgucguugaugugucucugggguugggaaccuauuacguauuaaacaggguguaucugaauacaacucuacucuucaccgguuacuuuccaaaaucaggcgcuaacuuccgggaccuggcacuuaaggggaguaucuaucugagcacauugugguacaaaccgcccuuucucuccgauuucaauaacggaauauuuucuaaggucaaaaauaccaagcuguaugugaacaauacucuguacucggaguucucaacaaucguuauuggcagcguguuugucaacaccaguuacacgaucgugguacagccucacaaugguauucucgaaaucacugccugucaauauaccaugugcgaauacccacauacaguuuguaaguccaaagggucuauacgcaacgagagcuggcacauugacuccucagaacccuuaugccuguucaagaaaaauuuuacuuauaacgugagugcggauuggcuuuacuuccauuucuaucaggagcgaggagucuuuuacgcuuauuacgccgacgugggcaugccuaccacauucuuguuuagccuguaccuaggcaccauccucucucacuauuacgugaugccacugacguguaacgcaauuuccucaaauacugauaacgagacacuugaauauugggucacuccccugagccguagacaguacuugcucaauuucgacgagcaugggguuaucaccaacgccguggauugcaguucuuccuuucugagcgaaauccaguguaagacacaaucguucgcuccuaauaccggaguauaugacuuaucugguuuuacggugaaaccagucgcaaccguguacaggcggauuccgaaccugcccgauugcgacauagacaauuggcucaacaauguuuccgugccuucaccacuuaacugggagcgcagaaucuucaguaauuguaacuuuaaucugagcacauugcuaaggcugguccacguggauuccuucucuugcaacaaucucgacaagagcaagauuuuuggcucauguuucaacaguaucacuguagauaaauuugccauacccaaccggcgccgagacgaucugcagcuuggguccagcggauuccugcagucuucaaauuauaagauugacaucaguagcuccucuugccaguuguacuacucgcucccucugguuaacgugaccaucaauaacuucaauccaagcuccuggaacagaagguauggcuuugguucauucaauuuaaguucuuacgaugucguguauagcgaccacugcuuuuccgucaacucagauuucugucccugcgcugacccgagcgugguuaauucuugugccaaauccaagccucccagugcgauuugcccagcagggacaaaauaccggcauugugaucuggacacuacccuauaugugaagaacuggugccguuguagcugccucccugaccccaucucuacauacuccccaaauaccuguccccagaaaaagguagucgugggaauuggcgagcacugcccuggccuggggauaaacgaagagaaguguggaacucaacuuaaucauucaaguugcuuuugcagcccagaugccuucuuggguuggucguuugacuccuguaucucuaacaaucgcugcaacauuuucagcaacuuuaucuucaauggcaucaacucagggacgacauguaguaaugaucugcucuauuccaacaccgaaauuucuacuggaguuugcgugaauuacgaccuguacggcauaaccggucaggggaucuuuaaagaggucagcgcugccuauuacaacaauuggcagaaccuucuguaugauuccaauggcaacauuaucggauucaaggacuuuuugacaaauaaaaccuacacuauucucccguguuauucaggcagagugagcgcagcuuucuaccaaaacaguucuucccccgcccuguuauauaggaaucugaagugcagcuacguacuaaacaauaucucguucauaucacagccuuuuuacuucgauucuuaucucgggugugugcugaacgcgguuaaccuuacaaguuacuccgucagcucuugcgacuugcggaugggaagcgguuuuuguaucgauuaugcccugccauccucaggcgggaguggaagcggcauuucuucccccuaccgauucgugacguuugaaccuuucaaugugucauuugucaacgacaguguugagaccguggguggccucuucgagauccagauuccaacuaauuuuacaaucgcagggcacgaagaguucauacaaaccagcucccccaaagugacaauugauugcucugcuuuuguauguucgaacuaugccgcuugccacgaccuguuaagcgaauacggaacuuucugcgauaauaucaacucaauucugaaugaggucaacgaccuuuuggacaucacccagcuccagguggccaaugcacugaugcagggcguuacgcuauccaguaaccugaauaccaaccuccauucugauguggacaauauagauuucaagagccugcuuggguguuugggaucccaaugcgguucaucuagccgcagucuguuagaagaccuccuguuuaacaaggucaaacuuuccgaugugggcuucguugaggccuauaauaacuguacagggggaagcgagaucagagaccuguugugcgugcagucuuuuaauggcauuaagguacucccgccuauccugucagaaacucagauuuccgguuacaccacagcugcgacugucgcagccauguucccacccuggagugcugccgcaggggugccuuuuagccuaaacgugcaguacaggaucaacggccugggagucaccauggauguucucaauaaaaaccaaaagcugauagccaaugcuuucaacaaagcccuuuugucgauucagaauggcuuuacggcaacaaacucugcgcuggcuaagauccaguccgugguaaaugccaacgcacaggccuuaaauagccuccugcaacagcuuuucaacaaguuuggggcuaucucaaguucucugcaggagauucuaucccggcucgaucccccagaagcccaggugcaaaucgaccgccugauuaauggaagauugaccgcacugaacgcuuaugucagccagcaguuaucagacauaacucucaucaaagccggcgcgaguagggccauugagaaggugaaugaauguguuaaaagccaauccccucguaucaacuucugcgguaaugggaaccacauucugucucuugugcagaacgcucccuacggacuguuguuuauccauuucagcuauaagccaacauccuuuaaaaccguccucgugucaccgggccugugucuaucuggugaucggggcauagcaccuaagcagggguacuucaucaagcagaaugacaguuggauguucacuggaucgagcuauuacuaucccgagccaauuuccgauaaaaacguuguguuuaugaacucuugcucagucaauuucaccaaggcccccuuuaucuaccugaauaacagcauuccuaaucuuuccgacuucgaggcugaacucagucugugguuuaaaaaccacacaucuaucgccccaaauuugacguucaacagccauauaaaugcaaccuuucuggacuuauacuaugagaugaacguaauucaagaaucaaucaagucccucaauggcggguacauccccgaggcgccucgagauggacaggccuaugugagaaaagacggcgaguggguucugcuuaguacuuucugaggacuagucccuguucccagagcccacuuuuuuuucuuuuuuugaaauaaaauagccugucuuucagaucucaaaggcucuuuucagagccaccaaaaaaaaaaaaaaaaaaaaaaaaaaaaaaaaaaaaaaaaaaaaaaaaaaaaaaaaaaaaaaaaaaaaaaaaaaaaaaaaaaaaaaaaaaaaaaaaaaaaa

SEQ ID NO: 15103 - RNA, 3788 nt, Artificial Sequence
  HCoV/229E/BN1/GER/2015__AOG74783.1 spike protein mRNA human (1-1171)
aggagagucccgcagucggcguccagcggcucugcuuguucgugugugugucguugcaggccuuauucaagcuuaccauguucgugcugcucgucgccuacgcacuucugcacaucgcuggcugccagaccacaaacgggacuaauacgagccauuccguuuguaacggaugcgugggucacucugagaauguauuugccguggaaucaggcggguauauucccaguaacuucgcguuuaauaacugguucuuguuaaccaauacaagcuccgucguggacggaguugugagaucuuuucaaccucugcuacucaacugucuguggucggucucaggcagccaguucacuaccgguuuuguguacuucaaugggacaggaaggggcgcuugcaagggcuuuuauaguaacgccuccucugauguaauacgguacaauaucaacuucgaggaaaaucuucgccgagggaccauucuguuuaaaacuagcuauggagcaguuguguucuacuguacaaacaauaccuuggucuccggugacgcccauaucccaucaggcacggugcucgggaacuuuuauugcuucgugaacacuaccauuggaaaugagacaacuagcgcuuucgucggcgcacugccgaagaccguucgugaauuugugaucagcagaacaggucacuucuacauaaacggguacagguauuuuucucugggagauguagaggccgugaauuucaacgucaccaaugcugccacgacuguguguacaguugcgcucgcauccuacgccgacguguuagucaacgugucacagaccgcuaucgccaauauuaucuauugcaacagcguaauuaaucggcugcgcugugaucagcuuaguuuugacguucccgauggcuucuacucuacuuccccuauccaaccaguggaguugcccgucagcauagugucgcugccugucuaucauaaacacacauuuauugugcuauacguuaacuucgaacacagaaggggcccagggaagugcuauaauugucggcccgcagugaucaacauuacccucgcuaauuuuaacgagacgaaaggaccucugugcguagacaccucucauuucacaacucaguuugucgauaaugugaaguuggcccgcugguccgcgucaaucaacaccgguaacugcccauucaguuuuggcaagguuaauaacuucgugaaauucgggagcgucuguuuuucccugaaggacaucccgggaggcugcgccaugcccauuauggcaaauuuggugaacucuaaaagccacaauauagguucacucuacguaaguugguccgauggggacgugaucacaggcguuccuaagccagucgaaggagugagcucuuucaugaacgugacucugaauaaauguaccaaguacaacauuuaugaugucucaggcguuggggugauccgaauaaguaaugacacauuuuuaaacggaauuaccuacacuagcacguccgguaaucugcucggcuucaaggacgugacaaacgggaccaucuauucuaucacucccugcaauccuccagaucagcuuguagucuaccagcaagcugugguuggagccaugcugucggagaacuuuaccagcuauggcuucuccaauguggucgagaugcccaaauuuuucuacgcuucaaacgguacauauaacuguaccgacgccguguugacuuacaguucuuuugggguuugcgcagauggcagcauuaucgccgugcagccgagaaauguauccuacgacucagucagcgcuauugugacagcgaaccuaucuauaccuuucaauuggacgaccuccgugcaggucgaauaucugcagaucacaaguacucccauuguuguggauuguagcaccuacguaugcaacggaaaugugaggugugucgagcuccugaagcaauauacaucugcaugcaaaacuaucgaagacgcccuucggaacuccgcuaugcuggagucagccgaugugagugaaauguugaccuuugacaagaaagcauucacgcucgccaauguuagcucguuuggcgauuacaaccuguccucugugaucccaaguuuaccucguucagggagucgcgucgcuggaagauccgccauugaggacauacuguucucuaagcuagugaccagcggucucggcacaguugaugcagacuauaaaaaguguacuaaggggcuguccaucgcggaccuugcuugcgcccaguacuauaauggaauuaugguguugcccggcgucgcagaugccgagaggauggcuauguacaccgguucacugaucgggggcauugcccucggaggccugacaagcgcagcuaguaucccauucucucuugccauacagucccggcugaacuacguagcguugcaaacugacgugcuccaggaaaaucagcgaauccuggccgcuagcuuuaacaaagcaaugaccaauauuguugaugccuucacgggggugaacgacgcuaucacacagaccucgcaagccuuacagacugucgcaacagcgcugaauaagauucaggaugugguaaaccagcaaggaaacucacuaaaucaucucaccucucagcugcgccagaacuuucaggccaucaguuccagcauacaagcuauuuaugacagacuugauaucauucaggccgaccaacagguggauagguugaucacuggccggcuggcagcucucaaugucuucguuucucacacccugacaaaauacacggaggugcgcgccagcagacaguuagcacagcagaaggugaacgaaugcgucaaaucccaaucaaagagguaugguuuuugugggaauggaacccacauauucagucuggugaacgccgcucccgagggccuuguuuuucuucauacuguacuccugccuacacaguacaaggacguggaagcguggagcggucuaugcgucgauggcaucaauggguaugugcugcgucagccaaaccucgcccuguacaaagagggaaauuauuaccggauuaccucucgaaucauguucgagccgaggauucccacaaucgcagacuuuguucagauagaaaacuguaaugugacuuucgucaacauuuccagaucagagcuucaaaccaucgugccugaauacaucgauguaaauaagacguugcaggagcugaguuauaaauuaccaaacuacacaguccccgaccucgugguugaacaguauaaucagaccauucugaaccuuacuagcgagaucuccacccuggagaauaagucugcugaauugaacuacacagugcaaaaacuccagacucugauugacaacauaaauucgacccuagucgaucugaaguggcucaaccgcguggagacauauaucaaguggccuugguggguuuggcugugcauuagcgugguccuuaucuuugugguaucaauguugcuguuauguugcuguuccacgggcugcuguggguucuucaguugcuuugccucuagcauucggggauguugcgaauccaccaaacucccauacuaugacguggagaagauccacauacagugaggacuagucccuguucccagagcccacuuuuuuuucuuuuuuugaaauaaaauagccugucuuucagaucucaaaggcucuuuucagagccaccaaaaaaaaaaaaaaaaaaaaaaaaaaaaaaaaaaaaaaaaaaaaaaaaaaaaaaaaaaaaaaaaaaaaaaaaaaaaaaaaaaaaaaaaaaaaaaaaaaaaa

SEQ ID NO: 15104 - RNA, 3788 nt, Artificial Sequence
  HCoV/229E/BN1/GER/2015__AOG74783.1 spike protein mRNA human (1-1171)(I869P_I870P)
aggagagucccgcagucggcguccagcggcucugcuuguucgugugugugucguugcaggccuuauucaagcuuaccauguucgugcugcucgucgccuacgcacuucugcacaucgcuggcugccagaccacaaacgggacuaauacgagccauuccguuuguaacggaugcgugggucacucugagaauguauuugccguggaaucaggcggguauauucccaguaacuucgcguuuaauaacugguucuuguuaaccaauacaagcuccgucguggacggaguugugagaucuuuucaaccucugcuacucaacugucuguggucggucucaggcagccaguucacuaccgguuuuguguacuucaaugggacaggaaggggcgcuugcaagggcuuuuauaguaacgccuccucugauguaauacgguacaauaucaacuucgaggaaaaucuucgccgagggaccauucuguuuaaaacuagcuauggagcaguuguguucuacuguacaaacaauaccuuggucuccggugacgcccauaucccaucaggcacggugcucgggaacuuuuauugcuucgugaacacuaccauuggaaaugagacaacuagcgcuuucgucggcgcacugccgaagaccguucgugaauuugugaucagcagaacaggucacuucuacauaaacggguacagguauuuuucucugggagauguagaggccgugaauuucaacgucaccaaugcugccacgacuguguguacaguugcgcucgcauccuacgccgacguguuagucaacgugucacagaccgcuaucgccaauauuaucuauugcaacagcguaauuaaucggcugcgcugugaucagcuuaguuuugacguucccgauggcuucuacucuacuuccccuauccaaccaguggaguugcccgucagcauagugucgcugccugucuaucauaaacacacauuuauugugcuauacguuaacuucgaacacagaaggggcccagggaagugcuauaauugucggcccgcagugaucaacauuacccucgcuaauuuuaacgagacgaaaggaccucugugcguagacaccucucauuucacaacucaguuugucgauaaugugaaguuggcccgcugguccgcgucaaucaacaccgguaacugcccauucaguuuuggcaagguuaauaacuucgugaaauucgggagcgucuguuuuucccugaaggacaucccgggaggcugcgccaugcccauuauggcaaauuuggugaacucuaaaagccacaauauagguucacucuacguaaguugguccgauggggacgugaucacaggcguuccuaagccagucgaaggagugagcucuuucaugaacgugacucugaauaaauguaccaaguacaacauuuaugaugucucaggcguuggggugauccgaauaaguaaugacacauuuuuaaacggaauuaccuacacuagcacguccgguaaucugcucggcuucaaggacgugacaaacgggaccaucuauucuaucacucccugcaauccuccagaucagcuuguagucuaccagcaagcugugguuggagccaugcugucggagaacuuuaccagcuauggcuucuccaauguggucgagaugcccaaauuuuucuacgcuucaaacgguacauauaacuguaccgacgccguguugacuuacaguucuuuugggguuugcgcagauggcagcauuaucgccgugcagccgagaaauguauccuacgacucagucagcgcuauugugacagcgaaccuaucuauaccuuucaauuggacgaccuccgugcaggucgaauaucugcagaucacaaguacucccauuguuguggauuguagcaccuacguaugcaacggaaaugugaggugugucgagcuccugaagcaauauacaucugcaugcaaaacuaucgaagacgcccuucggaacuccgcuaugcuggagucagccgaugugagugaaauguugaccuuugacaagaaagcauucacgcucgccaauguuagcucguuuggcgauuacaaccuguccucugugaucccaaguuuaccucguucagggagucgcgucgcuggaagauccgccauugaggacauacuguucucuaagcuagugaccagcggucucggcacaguugaugcagacuauaaaaaguguacuaaggggcuguccaucgcggaccuugcuugcgcccaguacuauaauggaauuaugguguugcccggcgucgcagaugccgagaggauggcuauguacaccgguucacugaucgggggcauugcccucggaggccugacaagcgcagcuaguaucccauucucucuugccauacagucccggcugaacuacguagcguugcaaacugacgugcuccaggaaaaucagcgaauccuggccgcuagcuuuaacaaagcaaugaccaauauuguugaugccuucacgggggugaacgacgcuaucacacagaccucgcaagccuuacagacugucgcaacagcgcugaauaagauucaggaugugguaaaccagcaaggaaacucacuaaaucaucucaccucucagcugcgccagaacuuucaggccaucaguuccagcauacaagcuauuuaugacagacuugaucccccucaggccgaccaacagguggauagguugaucacuggccggcuggcagcucucaaugucuucguuucucacacccugacaaaauacacggaggugcgcgccagcagacaguuagcacagcagaaggugaacgaaugcgucaaaucccaaucaaagagguaugguuuuugugggaauggaacccacauuuucagucuggugaacgccgcuccagagggccuuguuuuucuucauacuguacuccugccgacacaguacaaggacguggaagcguggagcggucuaugcgucgauggcaucaauggguaugugcugcgucagcccaaccucgcccuguacaaagagggaaauuauuaccggauaaccucucgaaucauguucgagccuaggauuccaacaaucgcagacuuuguucagauugaaaacuguaaugugacuuucgucaacaucuccagaucagagcuucaaaccauagugcccgaauacauugauguaaauaagacguugcaggagcugaguuauaaauuaccuaacuacacagucccagaccucgugguugaacaguauaaucagaccauccugaaccuuacuagcgagaucuccacccuggagaauaagucugcugaauugaacuacacagugcaaaaacuccagacucugauugacaacaucaauucgacccuagucgaucugaaguggcucaaccgcguggagacauauauuaaguggcccugguggguuuggcugugcauaagcgugguccuuaucuuugugguaucaauguugcuguuauguugcuguuccacgggcugcuguggguucuucaguugcuuugccucuagcauucggggauguugcgaauccaccaaacucccguacuaugacguggagaagauccacauucagugaggacuagucccuguucccagagcccacuuuuuuuucuuuuuuugaaauaaaauagccugucuuucagaucucaaaggcucuuuucagagccaccaaaaaaaaaaaaaaaaaaaaaaaaaaaaaaaaaaaaaaaaaaaaaaaaaaaaaaaaaaaaaaaaaaaaaaaaaaaaaaaaaaaaaaaaaaaaaaaaaaaaa

SEQ ID NO: 15105 - RNA, 3599 nt, Artificial Sequence
  HCoV/229E/BN1/GER/2015__AOG74783.1 spike protein mRNA human (variant)
aggagagucccgcagucggcguccagcggcucugcuuguucgugugugugucguugcaggccuuauucaagcuuaccauguucgugcugcucgucgccuacgcacuucugcacaucgcuggcugccagaccacaaacgggacuaauacgagccauuccguuuguaacggaugcgugggucacucugagaauguauuugccguggaaucaggcggguauauucccaguaacuucgcguuuaauaacugguucuuguuaaccaauacaagcuccgucguggacggaguugugagaucuuuucaaccucugcuacucaacugucuguggucggucucaggcagccaguucacuaccgguuuuguguacuucaaugggacaggaaggggcgcuugcaagggcuuuuauaguaacgccuccucugauguaauacgguacaauaucaacuucgaggaaaaucuucgccgagggaccauucuguuuaaaacuagcuauggagcaguuguguucuacuguacaaacaauaccuuggucuccggugacgcccauaucccaucaggcacggugcucgggaacuuuuauugcuucgugaacacuaccauuggaaaugagacaacuagcgcuuucgucggcgcacugccgaagaccguucgugaauuugugaucagcagaacaggucacuucuacauaaacggguacagguauuuuucucugggagauguagaggccgugaauuucaacgucaccaaugcugccacgacuguguguacaguugcgcucgcauccuacgccgacguguuagucaacgugucacagaccgcuaucgccaauauuaucuauugcaacagcguaauuaaucggcugcgcugugaucagcuuaguuuugacguucccgauggcuucuacucuacuuccccuauccaaccaguggaguugcccgucagcauagugucgcugccugucuaucauaaacacacauuuauugugcuauacguuaacuucgaacacagaaggggcccagggaagugcuauaauugucggcccgcagugaucaacauuacccucgcuaauuuuaacgagacgaaaggaccucugugcguagacaccucucauuucacaacucaguuugucgauaaugugaaguuggcccgcugguccgcgucaaucaacaccgguaacugcccauucaguuuuggcaagguuaauaacuucgugaaauucgggagcgucuguuuuucccugaaggacaucccgggaggcugcgccaugcccauuauggcaaauuuggugaacucuaaaagccacaauauagguucacucuacguaaguugguccgauggggacgugaucacaggcguuccuaagccagucgaaggagugagcucuuucaugaacgugacucugaauaaauguaccaaguacaacauuuaugaugucucaggcguuggggugauccgaauaaguaaugacacauuuuuaaacggaauuaccuacacuagcacguccgguaaucugcucggcuucaaggacgugacaaacgggaccaucuauucuaucacucccugcaauccuccagaucagcuuguagucuaccagcaagcugugguuggagccaugcugucggagaacuuuaccagcuauggcuucuccaauguggucgagaugcccaaauuuuucuacgcuucaaacgguacauauaacuguaccgacgccguguugacuuacaguucuuuugggguuugcgcagauggcagcauuaucgccgugcagccgagaaauguauccuacgacucagucagcgcuauugugacagcgaaccuaucuauaccuuucaauuggacgaccuccgugcaggucgaauaucugcagaucacaaguacucccauuguuguggauuguagcaccuacguaugcaacggaaaugugaggugugucgagcuccugaagcaauauacaucugcaugcaaaacuaucgaagacgcccuucggaacuccgcuaugcuggagucagccgaugugagugaaauguugaccuuugacaagaaagcauucacgcucgccaauguuagcucguuuggcgauuacaaccuguccucugugaucccaaguuuaccucguucagggagucgcgucgcuggaagauccgccauugaggacauacuguucucuaagcuagugaccagcggucucggcacaguugaugcagacuauaaaaaguguacuaaggggcuguccaucgcggaccuugcuugcgcccaguacuauaauggaauuaugguguugcccggcgucgcagaugccgagaggauggcuauguacaccgguucacugaucgggggcauugcccucggaggccugacaagcgcagcuaguaucccauucucucuugccauacagucccggcugaacuacguagcguugcaaacugacgugcuccaggaaaaucagcgaauccuggccgcuagcuuuaacaaagcaaugaccaauauuguugaugccuucacgggggugaacgacgcuaucacacagaccucgcaagccuuacagacugucgcaacagcgcugaauaagauucaggaugugguaaaccagcaaggaaacucacuaaaucaucucaccucucagcugcgccagaacuuucaggccaucaguuccagcauacaagcuauuuaugacagacuugaucccccucaggccgaccaacagguggauagguugaucacuggccggcuggcagcucucaaugucuucguuucucacacccugacaaaauacacggaggugcgcgccagcagacaguuagcacagcagaaggugaacgaaugcgucaaaucccaaucaaagagguaugguuuuugugggaauggaacccacauuuucagucuggugaacgccgcuccagagggccuuguuuuucuucauacuguacuccugccgacacaguacaaggacguggaagcguggagcggucuaugcgucgauggcaucaauggguaugugcugcgucagcccaaccucgcccuguacaaagagggaaauuauuaccggauaaccucucgaaucauguucgagccuaggauuccaacaaucgcagacuuuguucagauugaaaacuguaaugugacuuucgucaacaucuccagaucagagcuucaaaccauagugcccgaauacauugauguaaauaagacguugcaggagcugaguuauaaauuaccuaacuacacagucccagaccucgugguugaacaguauaaucagaccauccugaaccuuacuagcgagaucuccacccuggagaauaagucugcugaauugaacuacacagugcaaaaacuccagacucugauugacaacaucaauucgacccuagucgaucugaaguggcucaaccgcguggagacaugaggacuagucccuguucccagagcccacuuuuuuuucuuuuuuugaaauaaaauagccugucuuucagaucucaaaggcucuuuucagagccaccaaaaaaaaaaaaaaaaaaaaaaaaaaaaaaaaaaaaaaaaaaaaaaaaaaaaaaaaaaaaaaaaaaaaaaaaaaaaaaaaaaaaaaaaaaaaaaaaaaaaa

SEQ ID NO: 15106 - RNA, 3680 nt, Artificial Sequence
  HCoV/229E/BN1/GER/2015__AOG74783.1 spike protein mRNA human (variant)
aggagagucccgcagucggcguccagcggcucugcuuguucgugugugugucguugcaggccuuauucaagcuuaccauguucgugcugcucgucgccuacgcacuucugcacaucgcuggcugccagaccacaaacgggacuaauacgagccauuccguuuguaacggaugcgugggucacucugagaauguauuugccguggaaucaggcggguauauucccaguaacuucgcguuuaauaacugguucuuguuaaccaauacaagcuccgucguggacggaguugugagaucuuuucaaccucugcuacucaacugucuguggucggucucaggcagccaguucacuaccgguuuuguguacuucaaugggacaggaaggggcgcuugcaagggcuuuuauaguaacgccuccucugauguaauacgguacaauaucaacuucgaggaaaaucuucgccgagggaccauucuguuuaaaacuagcuauggagcaguuguguucuacuguacaaacaauaccuuggucuccggugacgcccauaucccaucaggcacggugcucgggaacuuuuauugcuucgugaacacuaccauuggaaaugagacaacuagcgcuuucgucggcgcacugccgaagaccguucgugaauuugugaucagcagaacaggucacuucuacauaaacggguacagguauuuuucucugggagauguagaggccgugaauuucaacgucaccaaugcugccacgacuguguguacaguugcgcucgcauccuacgccgacguguuagucaacgugucacagaccgcuaucgccaauauuaucuauugcaacagcguaauuaaucggcugcgcugugaucagcuuaguuuugacguucccgauggcuucuacucuacuuccccuauccaaccaguggaguugcccgucagcauagugucgcugccugucuaucauaaacacacauuuauugugcuauacguuaacuucgaacacagaaggggcccagggaagugcuauaauugucggcccgcagugaucaacauuacccucgcuaauuuuaacgagacgaaaggaccucugugcguagacaccucucauuucacaacucaguuugucgauaaugugaaguuggcccgcugguccgcgucaaucaacaccgguaacugcccauucaguuuuggcaagguuaauaacuucgugaaauucgggagcgucuguuuuucccugaaggacaucccgggaggcugcgccaugcccauuauggcaaauuuggugaacucuaaaagccacaauauagguucacucuacguaaguugguccgauggggacgugaucacaggcguuccuaagccagucgaaggagugagcucuuucaugaacgugacucugaauaaauguaccaaguacaacauuuaugaugucucaggcguuggggugauccgaauaaguaaugacacauuuuuaaacggaauuaccuacacuagcacguccgguaaucugcucggcuucaaggacgugacaaacgggaccaucuauucuaucacucccugcaauccuccagaucagcuuguagucuaccagcaagcugugguuggagccaugcugucggagaacuuuaccagcuauggcuucuccaauguggucgagaugcccaaauuuuucuacgcuucaaacgguacauauaacuguaccgacgccguguugacuuacaguucuuuugggguuugcgcagauggcagcauuaucgccgugcagccgagaaauguauccuacgacucagucagcgcuauugugacagcgaaccuaucuauaccuuucaauuggacgaccuccgugcaggucgaauaucugcagaucacaaguacucccauuguuguggauuguagcaccuacguaugcaacggaaaugugaggugugucgagcuccugaagcaauauacaucugcaugcaaaacuaucgaagacgcccuucggaacuccgcuaugcuggagucagccgaugugagugaaauguugaccuuugacaagaaagcauucacgcucgccaauguuagcucguuuggcgauuacaaccuguccucugugaucccaaguuuaccucguucagggagucgcgucgcuggaagauccgccauugaggacauacuguucucuaagcuagugaccagcggucucggcacaguugaugcagacuauaaaaaguguacuaaggggcuguccaucgcggaccuugcuugcgcccaguacuauaauggaauuaugguguugcccggcgucgcagaugccgagaggauggcuauguacaccgguucacugaucgggggcauugcccucggaggccugacaagcgcagcuaguaucccauucucucuugccauacagucccggcugaacuacguagcguugcaaacugacgugcuccaggaaaaucagcgaauccuggccgcuagcuuuaacaaagcaaugaccaauauuguugaugccuucacgggggugaacgacgcuaucacacagaccucgcaagccuuacagacugucgcaacagcgcugaauaagauucaggaugugguaaaccagcaaggaaacucacuaaaucaucucaccucucagcugcgccagaacuuucaggccaucaguuccagcauacaagcuauuuaugacagacuugaucccccucaggccgaccaacagguggauagguugaucacuggccggcuggcagcucucaaugucuucguuucucacacccugacaaaauacacggaggugcgcgccagcagacaguuagcacagcagaaggugaacgaaugcgucaaaucccaaucaaagagguaugguuuuugugggaauggaacccacauuuucagucuggugaacgccgcuccagagggccuuguuuuucuucauacuguacuccugccgacacaguacaaggacguggaagcguggagcggucuaugcgucgauggcaucaauggguaugugcugcgucagcccaaccucgcccuguacaaagagggaaauuauuaccggauaaccucucgaaucauguucgagccuaggauuccaacaaucgcagacuuuguucagauugaaaacuguaaugugacuuucgucaacaucuccagaucagagcuucaaaccauagugcccgaauacauugauguaaauaagacguugcaggagcugaguuauaaauuaccuaacuacacagucccagaccucgugguugaacaguauaaucagaccauccugaaccuuacuagcgagaucuccacccuggagaauaagucugcugaauugaacuacacagugcaaaaacuccagacucugauugacaacaucaauucgacccuagucgaucugaaguggcucaaccgcguggagacaggcggguauauucccgaagccccgcgggacggacaggccuacguuagaaaggauggcgagugggugcugcuuagcacguuuugaggacuagucccuguucccagagcccacuuuuuuuucuuuuuuugaaauaaaauagccugucuuucagaucucaaaggcucuuuucagagccaccaaaaaaaaaaaaaaaaaaaaaaaaaaaaaaaaaaaaaaaaaaaaaaaaaaaaaaaaaaaaaaaaaaaaaaaaaaaaaaaaaaaaaaaaaaaaaaaaaaaaa

SEQ ID NO: 15107 - RNA, 4343 nt, Artificial Sequence
  HCoV/NL63/RPTEC/2004__AFV53148.1 spike protein mRNA human (1-1356)
aggagagucccgcagucggcguccagcggcucugcuuguucgugugugugucguugcaggccuuauucaagcuuaccaugaagcuguuccucauccuucugguguugcccuuagccagcugcuuuuucaccuguaacuccaaugcuaaccugucuaugcuacagcucggcgucccugacaauucaaguacaauuguuacugggcugcuuccaacgcacugguuuugcgcaaaccaaagcaccuccguguacucugccaauggauucuuuuauauagauguagguaaccauagaucggcguucgcucugcacacaggcuacuaugacgccaaucaguacuauaucuacgugacuaacgagauuggguugaaugcaucagucacccucaaaaucuguaaguuuagcaggaacacaaccuucgauuuucugaguaaugccuccucuagcuucgacugcauugugaaccugcucuuuacugaacaguuaggagcuccgcugggcaucacaauauccggugagaccguucggcuucauuuguauaaugugacgcgcacuuucuacguccccgcagccuacaaacugaccaagcuaucagugaaauguuauuuuaacuacaguugcguauucagcguugugaaugcuacagucacugugaacgugaccacacacaacgggcgagucguuaauuauaccgugugugaugacugcaacggauacacggauaauaucuucucuguacagcaagacggccguauuccuaacggcuuuccauucaauaacugguuucuccugacuaauggguccacacuuguggauggagucucaagacuguaucagcccuugaggcucaccugucuguggccugugccagguuuaaagagcaguacuggcuucguuuacuuuaacgccacagggucugacgugaauugcaacggauaucagcauaauuccgucguggauguaaugcgguacaaccugaauuucagcgcgaacucgcucgacaaucuuaagucuggcguuaucguguuuaaaacccugcaguacgaugucuuguucuauuguuccaacucaaguagcggugugcuagacacgaccauucccuuugggccuuccucucaaccauacuauugcuucaucaacagcacaauaaauacuacccacgucucaacauuugugggcauucugccgcccacuguucgcgaaaucgugguagcaagaaccggacaguucuacauuaacggcuuuaaguauuucgaccucggguucaucgaggccgucaauuuuaacgugacaaccgcuagugccacugauuucuggacgguugcauuugcuacauucguggacguccuggugaauguauccgccaccaacauccagaaucuucuguacugcgauagcccuuuugaaaaauugcagugugagcaccuccaauucggacugcaggacgguuuuuauucugcgaacuucuuagaugacaaugugcugccagagacuuacguugcccuacccauuuacuaucagcauaccgauauaaacuuuacagcaaccgcuucauucggcgggaguugcuacgucuguaagccucaccaagugaauaucagccucaacggaaauacuuccgugugcgucaggacaucucauuuuucgauucgguauaucuacaaccgcguuaaaagcggcuccccaggugacucaaguuggcacauauaucugaagucugggacgugucccuucagcuuuuccaaacuuaauaacuuccagaaguucaagaccauuugcuuuucaacuguggaagugccgggcagcuguaacuucccuuuggaggccacauggcacuacaccucuuauacaaucguaggagcucuguacgucacuugguccgaaggcaauaguaucaccggggugcccuacccaguuagcgguauucgagaguuuucuaaccucgugcugaauaacugcacgaaauauaauaucuacgauuaugucggaaccggcauuauaagauccucaaaccagagucuugccgggggaaucacauacgugagcaauucgggcaaccuguuggguuucaagaauguuuccacugggaacauuuuuaucgugaccccuuguaaucagcccgaccaaguagcagucuaucagcagucuaucauuggcgccaugacagcugugaacgagagcagguacggacuccagaaucuguuacaacugccaaacuucuauuacgugucaaauggcgggaacaacugcacuaccgcggucaugacguacaguaauuuuggaauaugugcagaugguucccuaauccccguucggccucguaacucuagcgacaauggcauuuccgccaucauuacagcuaaccucucaaucccaagcaauuggaccacaagugugcagguagaauaucugcagauaacuucuaccccgaucguggucgacugcgccacuuacgugugcaacgggaauccccgcuguaaaaaccuuuugaagcaguauaccuccgcaugcaaaacaauugaggaugcccugagacucagcgcucaucuggaaacgaaugacguuucgucaauguuaaccuucgauucuaacgccuuuagucuggcaaaugugacuuccuucggagacuacaaccuuagcucugucuugccucaaaggaauauccggagcucccgaauugcgggccgcucagcucucgaggaucugcuauuuaguaaggugguuacaagcggucuggggaccguggacgucgauuauaagucuuguacaaaaggccucuccaucgccgaccuggcaugcgcccaguacuauaacggaauaaugguacuuccaggcguggcugaugccgaaagaauggcaauguacacugggucauugauuggaggcaugguucuggguggguuaaccagugcugccgcgauccccuucagccucgcccugcaggcuaggcuuaauuacguggcacugcagacggacgucuugcaagagaaccagaagauucucgccgcuuccuucaauaaagccaucaacaacauaguggcaucuuuuucgagcguaaaugaugcgaucacacagaccgccgaggcuauucacacugugaccaucgcccugaacaagauucaagacgucguuaaucagcagggaucagcacuaaaccaucugacaucccagcuccggcacaauuuccaagcuaucaguaacucuauacaggccauuuaugaucgccuggacagcauccaggcagaccagcaaguggauagacuuaucacuggcagguuggccgcucugaaugcguuugugucccaggucuuaaacaaauacaccgaagugcgugguucacggcgacucgcccagcagaagauuaaugaguguguuaagucucaaagcaacagauauggcuucugcgggaauggaacacauaucuuuaguauuguaaacuccgcaccugacggccugcuuuuccugcacacggugcuacucccaaccgauuacaaaaaugucaaggcuuggagcgggauauguguggacggaaucuauggcuacguucugaggcagcccaacuuggugcuguauucugauaauggugucuuucgcgugacuucacggauuauguuccagccgagauuaccuguacucuccgacuuuguccaaaucuacaacugcaacgugacauucguuaauauuaguaggguggaacugcacaccgucaucccagauuacguggacguuaacaaaacucuucaggaguuugcccagaaucugcccaaguaugugaaaccuaacuucgauuugacacccuuuaaucucaccuaccugaaccuaagcucggaacugaagcagcuugaggccaagacggcuucucucuuccaaacuaccgucgagcugcagggguugauagaccagaucaauuccacauauguggaucugaaauuacucaaccgcuucgaaaauuacauuaaguggccaugguggguauggcugaucauuagcgugguuuuugucgugcuucugucauugcucguguucuguugccugaguaccggauguugcggcugcuguaacugccuaacuucuuccaugcgagguuguugcgacuguggcagcacaaaacugccuuauuacgaguuugaaaagguccauguacagugaggacuagucccuguucccagagcccacuuuuuuuucuuuuuuugaaauaaaauagccugucuuucagaucucaaaggcucuuuucagagccaccaaaaaaaaaaaaaaaaaaaaaaaaaaaaaaaaaaaaaaaaaaaaaaaaaaaaaaaaaaaaaaaaaaaaaaaaaaaaaaaaaaaaaaaaaaaaaaaaaaaaa

SEQ ID NO: 15108 - RNA, 4343 nt, Artificial Sequence
  HCoV/NL63/RPTEC/2004__AFV53148.1 spike protein mRNA human (1-1356)(S1052P_I1053P)
aggagagucccgcagucggcguccagcggcucugcuuguucgugugugugucguugcaggccuuauucaagcuuaccaugaagcuguuccucauccuucugguguugcccuuagccagcugcuuuuucaccuguaacuccaaugcuaaccugucuaugcuacagcucggcgucccugacaauucaaguacaauuguuacugggcugcuuccaacgcacugguuuugcgcaaaccaaagcaccuccguguacucugccaauggauucuuuuauauagauguagguaaccauagaucggcguucgcucugcacacaggcuacuaugacgccaaucaguacuauaucuacgugacuaacgagauuggguugaaugcaucagucacccucaaaaucuguaaguuuagcaggaacacaaccuucgauuuucugaguaaugccuccucuagcuucgacugcauugugaaccugcucuuuacugaacaguuaggagcuccgcugggcaucacaauauccggugagaccguucggcuucauuuguauaaugugacgcgcacuuucuacguccccgcagccuacaaacugaccaagcuaucagugaaauguuauuuuaacuacaguugcguauucagcguugugaaugcuacagucacugugaacgugaccacacacaacgggcgagucguuaauuauaccgugugugaugacugcaacggauacacggauaauaucuucucuguacagcaagacggccguauuccuaacggcuuuccauucaauaacugguuucuccugacuaauggguccacacuuguggauggagucucaagacuguaucagcccuugaggcucaccugucuguggccugugccagguuuaaagagcaguacuggcuucguuuacuuuaacgccacagggucugacgugaauugcaacggauaucagcauaauuccgucguggauguaaugcgguacaaccugaauuucagcgcgaacucgcucgacaaucuuaagucuggcguuaucguguuuaaaacccugcaguacgaugucuuguucuauuguuccaacucaaguagcggugugcuagacacgaccauucccuuugggccuuccucucaaccauacuauugcuucaucaacagcacaauaaauacuacccacgucucaacauuugugggcauucugccgcccacuguucgcgaaaucgugguagcaagaaccggacaguucuacauuaacggcuuuaaguauuucgaccucggguucaucgaggccgucaauuuuaacgugacaaccgcuagugccacugauuucuggacgguugcauuugcuacauucguggacguccuggugaauguauccgccaccaacauccagaaucuucuguacugcgauagcccuuuugaaaaauugcagugugagcaccuccaauucggacugcaggacgguuuuuauucugcgaacuucuuagaugacaaugugcugccagagacuuacguugcccuacccauuuacuaucagcauaccgauauaaacuuuacagcaaccgcuucauucggcgggaguugcuacgucuguaagccucaccaagugaauaucagccucaacggaaauacuuccgugugcgucaggacaucucauuuuucgauucgguauaucuacaaccgcguuaaaagcggcuccccaggugacucaaguuggcacauauaucugaagucugggacgugucccuucagcuuuuccaaacuuaauaacuuccagaaguucaagaccauuugcuuuucaacuguggaagugccgggcagcuguaacuucccuuuggaggccacauggcacuacaccucuuauacaaucguaggagcucuguacgucacuugguccgaaggcaauaguaucaccggggugcccuacccaguuagcgguauucgagaguuuucuaaccucgugcugaauaacugcacgaaauauaauaucuacgauuaugucggaaccggcauuauaagauccucaaaccagagucuugccgggggaaucacauacgugagcaauucgggcaaccuguuggguuucaagaauguuuccacugggaacauuuuuaucgugaccccuuguaaucagcccgaccaaguagcagucuaucagcagucuaucauuggcgccaugacagcugugaacgagagcagguacggacuccagaaucuguuacaacugccaaacuucuauuacgugucaaauggcgggaacaacugcacuaccgcggucaugacguacaguaauuuuggaauaugugcagaugguucccuaauccccguucggccucguaacucuagcgacaauggcauuuccgccaucauuacagcuaaccucucaaucccaagcaauuggaccacuucggugcagguagaauaucugcagauaacaucuaccccgaucguggucgacugcgccacuuacgugugcaacgggaauccccgcuguaaaaaccuuuugaagcaguauaccuccgcaugcaaaacaauugaggaugcccugagacucagcgcucaucuggaaacgaaugacguuucgucaauguuaaccuucgauucuaacgccuuuagucuggcaaaugugacuuccuucggagacuacaaccuuagcucugucuugccucaaaggaauauccggagcucccgaauugcgggccgcucagcucucgaggaucugcuauuuaguaaggugguuacaagcggucuggggaccguggacgucgauuauaagucuuguacaaaaggccucuccaucgccgaccuggcaugcgcccaguacuauaacggaauaaugguacuuccaggcguggcugaugccgaaagaauggcaauguacacugggucauugauuggaggcaugguucuggguggguuaaccagugcugccgcgauccccuucagccucgcccugcaggcuaggcuuaauuacguggcacugcagacggacgucuugcaagagaaccagaagauucucgccgcuuccuucaauaaagccaucaacaacauaguggcaucuuuuucgagcguaaaugaugcgaucacacagaccgccgaggcuauucacacugugaccaucgcccugaacaagauucaagacgucguuaaucagcagggaucagcacuaaaccaucugacaucccagcuccggcacaauuuccaagcuaucaguaacucuauacaggccauuuaugaucgccuggacccuccacaggcagaccagcaaguggauagacuuaucacuggcagguuggccgcucugaaugcguuugugagccaggucuuaaacaaauacaccgaagugcgugguucccggcgacucgcccagcagaagaucaaugaguguguuaagucacaaucuaacagauauggcuucugcgggaauggaacacauauuuuuagcaucguaaacagugcacccgacggccugcuuuuccugcacacggugcuacucccgaccgauuacaaaaaugucaaggcuugguccgggauuuguguggacggaauauauggcuacguucugaggcagccuaacuuggugcuguauagcgauaauggugucuuucgcgugacuucucggaucauguuccagccaagauuacccguacucucagacuuuguccaaauuuacaacugcaacgugacauucguuaauaucuccaggguggaacugcacaccgucauuccugauuacguggacguuaacaaaacucuucaggaguuugcccagaaucugcccaaguaugugaaaccaaacuucgauuugacaccuuuuaaucucaccuaccugaaccuaaguagcgaacugaagcagcuugaggccaagacggcuagucucuuccaaacuaccgucgagcugcagggguugaucgaccagauaaauucuacauauguggaucugaaauuacucaaccgcuucgaaaauuacaucaaguggcccugguggguauggcugauuaucuccgugguuuuugucgugcuucugagcuugcucguguucuguugccugucaaccggauguugcggcugcuguaacugccuaacaaguucuaugcgagguuguugcgacuguggcuccacuaaacugccauauuacgaguuugaaaagguccauguacagugaggacuagucccuguucccagagcccacuuuuuuuucuuuuuuugaaauaaaauagccugucuuucagaucucaaaggcucuuuucagagccaccaaaaaaaaaaaaaaaaaaaaaaaaaaaaaaaaaaaaaaaaaaaaaaaaaaaaaaaaaaaaaaaaaaaaaaaaaaaaaaaaaaaaaaaaaaaaaaaaaaaaa

SEQ ID NO: 15109 - RNA, 4148 nt, Artificial Sequence
  HCoV/NL63/RPTEC/2004__AFV53148.1 spike protein mRNA human (variant)
aggagagucccgcagucggcguccagcggcucugcuuguucgugugugugucguugcaggccuuauucaagcuuaccaugaagcuguuccucauccuucugguguugcccuuagccagcugcuuuuucaccuguaacuccaaugcuaaccugucuaugcuacagcucggcgucccugacaauucaaguacaauuguuacugggcugcuuccaacgcacugguuuugcgcaaaccaaagcaccuccguguacucugccaauggauucuuuuauauagauguagguaaccauagaucggcguucgcucugcacacaggcuacuaugacgccaaucaguacuauaucuacgugacuaacgagauuggguugaaugcaucagucacccucaaaaucuguaaguuuagcaggaacacaaccuucgauuuucugaguaaugccuccucuagcuucgacugcauugugaaccugcucuuuacugaacaguuaggagcuccgcugggcaucacaauauccggugagaccguucggcuucauuuguauaaugugacgcgcacuuucuacguccccgcagccuacaaacugaccaagcuaucagugaaauguuauuuuaacuacaguugcguauucagcguugugaaugcuacagucacugugaacgugaccacacacaacgggcgagucguuaauuauaccgugugugaugacugcaacggauacacggauaauaucuucucuguacagcaagacggccguauuccuaacggcuuuccauucaauaacugguuucuccugacuaauggguccacacuuguggauggagucucaagacuguaucagcccuugaggcucaccugucuguggccugugccagguuuaaagagcaguacuggcuucguuuacuuuaacgccacagggucugacgugaauugcaacggauaucagcauaauuccgucguggauguaaugcgguacaaccugaauuucagcgcgaacucgcucgacaaucuuaagucuggcguuaucguguuuaaaacccugcaguacgaugucuuguucuauuguuccaacucaaguagcggugugcuagacacgaccauucccuuugggccuuccucucaaccauacuauugcuucaucaacagcacaauaaauacuacccacgucucaacauuugugggcauucugccgcccacuguucgcgaaaucgugguagcaagaaccggacaguucuacauuaacggcuuuaaguauuucgaccucggguucaucgaggccgucaauuuuaacgugacaaccgcuagugccacugauuucuggacgguugcauuugcuacauucguggacguccuggugaauguauccgccaccaacauccagaaucuucuguacugcgauagcccuuuugaaaaauugcagugugagcaccuccaauucggacugcaggacgguuuuuauucugcgaacuucuuagaugacaaugugcugccagagacuuacguugcccuacccauuuacuaucagcauaccgauauaaacuuuacagcaaccgcuucauucggcgggaguugcuacgucuguaagccucaccaagugaauaucagccucaacggaaauacuuccgugugcgucaggacaucucauuuuucgauucgguauaucuacaaccgcguuaaaagcggcuccccaggugacucaaguuggcacauauaucugaagucugggacgugucccuucagcuuuuccaaacuuaauaacuuccagaaguucaagaccauuugcuuuucaacuguggaagugccgggcagcuguaacuucccuuuggaggccacauggcacuacaccucuuauacaaucguaggagcucuguacgucacuugguccgaaggcaauaguaucaccggggugcccuacccaguuagcgguauucgagaguuuucuaaccucgugcugaauaacugcacgaaauauaauaucuacgauuaugucggaaccggcauuauaagauccucaaaccagagucuugccgggggaaucacauacgugagcaauucgggcaaccuguuggguuucaagaauguuuccacugggaacauuuuuaucgugaccccuuguaaucagcccgaccaaguagcagucuaucagcagucuaucauuggcgccaugacagcugugaacgagagcagguacggacuccagaaucuguuacaacugccaaacuucuauuacgugucaaauggcgggaacaacugcacuaccgcggucaugacguacaguaauuuuggaauaugugcagaugguucccuaauccccguucggccucguaacucuagcgacaauggcauuuccgccaucauuacagcuaaccucucaaucccaagcaauuggaccacuucggugcagguagaauaucugcagauaacaucuaccccgaucguggucgacugcgccacuuacgugugcaacgggaauccccgcuguaaaaaccuuuugaagcaguauaccuccgcaugcaaaacaauugaggaugcccugagacucagcgcucaucuggaaacgaaugacguuucgucaauguuaaccuucgauucuaacgccuuuagucuggcaaaugugacuuccuucggagacuacaaccuuagcucugucuugccucaaaggaauauccggagcucccgaauugcgggccgcucagcucucgaggaucugcuauuuaguaaggugguuacaagcggucuggggaccguggacgucgauuauaagucuuguacaaaaggccucuccaucgccgaccuggcaugcgcccaguacuauaacggaauaaugguacuuccaggcguggcugaugccgaaagaauggcaauguacacugggucauugauuggaggcaugguucuggguggguuaaccagugcugccgcgauccccuucagccucgcccugcaggcuaggcuuaauuacguggcacugcagacggacgucuugcaagagaaccagaagauucucgccgcuuccuucaauaaagccaucaacaacauaguggcaucuuuuucgagcguaaaugaugcgaucacacagaccgccgaggcuauucacacugugaccaucgcccugaacaagauucaagacgucguuaaucagcagggaucagcacuaaaccaucugacaucccagcuccggcacaauuuccaagcuaucaguaacucuauacaggccauuuaugaucgccuggacccuccacaggcagaccagcaaguggauagacuuaucacuggcagguuggccgcucugaaugcguuugugagccaggucuuaaacaaauacaccgaagugcgugguucccggcgacucgcccagcagaagaucaaugaguguguuaagucacaaucuaacagauauggcuucugcgggaauggaacacauauuuuuagcaucguaaacagugcacccgacggccugcuuuuccugcacacggugcuacucccgaccgauuacaaaaaugucaaggcuugguccgggauuuguguggacggaauauauggcuacguucugaggcagccuaacuuggugcuguauagcgauaauggugucuuucgcgugacuucucggaucauguuccagccaagauuacccguacucucagacuuuguccaaauuuacaacugcaacgugacauucguuaauaucuccaggguggaacugcacaccgucauuccugauuacguggacguuaacaaaacucuucaggaguuugcccagaaucugcccaaguaugugaaaccaaacuucgauuugacaccuuuuaaucucaccuaccugaaccuaaguagcgaacugaagcagcuugaggccaagacggcuagucucuuccaaacuaccgucgagcugcagggguugaucgaccagauaaauucuacauauguggaucugaaauuacucaaccgcuucgaaaauugaggacuagucccuguucccagagcccacuuuuuuuucuuuuuuugaaauaaaauagccugucuuucagaucucaaaggcucuuuucagagccaccaaaaaaaaaaaaaaaaaaaaaaaaaaaaaaaaaaaaaaaaaaaaaaaaaaaaaaaaaaaaaaaaaaaaaaaaaaaaaaaaaaaaaaaaaaaaaaaaaaaaa

SEQ ID NO: 15110 - RNA, 4229 nt, Artificial Sequence
  HCoV/NL63/RPTEC/2004__AFV53148.1 spike protein mRNA human (variant)
aggagagucccgcagucggcguccagcggcucugcuuguucgugugugugucguugcaggccuuauucaagcuuaccaugaagcuguuccucauccuucugguguugcccuuagccagcugcuuuuucaccuguaacuccaaugcuaaccugucuaugcuacagcucggcgucccugacaauucaaguacaauuguuacugggcugcuuccaacgcacugguuuugcgcaaaccaaagcaccuccguguacucugccaauggauucuuuuauauagauguagguaaccauagaucggcguucgcucugcacacaggcuacuaugacgccaaucaguacuauaucuacgugacuaacgagauuggguugaaugcaucagucacccucaaaaucuguaaguuuagcaggaacacaaccuucgauuuucugaguaaugccuccucuagcuucgacugcauugugaaccugcucuuuacugaacaguuaggagcuccgcugggcaucacaauauccggugagaccguucggcuucauuuguauaaugugacgcgcacuuucuacguccccgcagccuacaaacugaccaagcuaucagugaaauguuauuuuaacuacaguugcguauucagcguugugaaugcuacagucacugugaacgugaccacacacaacgggcgagucguuaauuauaccgugugugaugacugcaacggauacacggauaauaucuucucuguacagcaagacggccguauuccuaacggcuuuccauucaauaacugguuucuccugacuaauggguccacacuuguggauggagucucaagacuguaucagcccuugaggcucaccugucuguggccugugccagguuuaaagagcaguacuggcuucguuuacuuuaacgccacagggucugacgugaauugcaacggauaucagcauaauuccgucguggauguaaugcgguacaaccugaauuucagcgcgaacucgcucgacaaucuuaagucuggcguuaucguguuuaaaacccugcaguacgaugucuuguucuauuguuccaacucaaguagcggugugcuagacacgaccauucccuuugggccuuccucucaaccauacuauugcuucaucaacagcacaauaaauacuacccacgucucaacauuugugggcauucugccgcccacuguucgcgaaaucgugguagcaagaaccggacaguucuacauuaacggcuuuaaguauuucgaccucggguucaucgaggccgucaauuuuaacgugacaaccgcuagugccacugauuucuggacgguugcauuugcuacauucguggacguccuggugaauguauccgccaccaacauccagaaucuucuguacugcgauagcccuuuugaaaaauugcagugugagcaccuccaauucggacugcaggacgguuuuuauucugcgaacuucuuagaugacaaugugcugccagagacuuacguugcccuacccauuuacuaucagcauaccgauauaaacuuuacagcaaccgcuucauucggcgggaguugcuacgucuguaagccucaccaagugaauaucagccucaacggaaauacuuccgugugcgucaggacaucucauuuuucgauucgguauaucuacaaccgcguuaaaagcggcuccccaggugacucaaguuggcacauauaucugaagucugggacgugucccuucagcuuuuccaaacuuaauaacuuccagaaguucaagaccauuugcuuuucaacuguggaagugccgggcagcuguaacuucccuuuggaggccacauggcacuacaccucuuauacaaucguaggagcucuguacgucacuugguccgaaggcaauaguaucaccggggugcccuacccaguuagcgguauucgagaguuuucuaaccucgugcugaauaacugcacgaaauauaauaucuacgauuaugucggaaccggcauuauaagauccucaaaccagagucuugccgggggaaucacauacgugagcaauucgggcaaccuguuggguuucaagaauguuuccacugggaacauuuuuaucgugaccccuuguaaucagcccgaccaaguagcagucuaucagcagucuaucauuggcgccaugacagcugugaacgagagcagguacggacuccagaaucuguuacaacugccaaacuucuauuacgugucaaauggcgggaacaacugcacuaccgcggucaugacguacaguaauuuuggaauaugugcagaugguucccuaauccccguucggccucguaacucuagcgacaauggcauuuccgccaucauuacagcuaaccucucaaucccaagcaauuggaccacuucggugcagguagaauaucugcagauaacaucuaccccgaucguggucgacugcgccacuuacgugugcaacgggaauccccgcuguaaaaaccuuuugaagcaguauaccuccgcaugcaaaacaauugaggaugcccugagacucagcgcucaucuggaaacgaaugacguuucgucaauguuaaccuucgauucuaacgccuuuagucuggcaaaugugacuuccuucggagacuacaaccuuagcucugucuugccucaaaggaauauccggagcucccgaauugcgggccgcucagcucucgaggaucugcuauuuaguaaggugguuacaagcggucuggggaccguggacgucgauuauaagucuuguacaaaaggccucuccaucgccgaccuggcaugcgcccaguacuauaacggaauaaugguacuuccaggcguggcugaugccgaaagaauggcaauguacacugggucauugauuggaggcaugguucuggguggguuaaccagugcugccgcgauccccuucagccucgcccugcaggcuaggcuuaauuacguggcacugcagacggacgucuugcaagagaaccagaagauucucgccgcuuccuucaauaaagccaucaacaacauaguggcaucuuuuucgagcguaaaugaugcgaucacacagaccgccgaggcuauucacacugugaccaucgcccugaacaagauucaagacgucguuaaucagcagggaucagcacuaaaccaucugacaucccagcuccggcacaauuuccaagcuaucaguaacucuauacaggccauuuaugaucgccuggacccuccacaggcagaccagcaaguggauagacuuaucacuggcagguuggccgcucugaaugcguuugugagccaggucuuaaacaaauacaccgaagugcgugguucccggcgacucgcccagcagaagaucaaugaguguguuaagucacaaucuaacagauauggcuucugcgggaauggaacacauauuuuuagcaucguaaacagugcacccgacggccugcuuuuccugcacacggugcuacucccgaccgauuacaaaaaugucaaggcuugguccgggauuuguguggacggaauauauggcuacguucugaggcagccuaacuuggugcuguauagcgauaauggugucuuucgcgugacuucucggaucauguuccagccaagauuacccguacucucagacuuuguccaaauuuacaacugcaacgugacauucguuaauaucuccaggguggaacugcacaccgucauuccugauuacguggacguuaacaaaacucuucaggaguuugcccagaaucugcccaaguaugugaaaccaaacuucgauuugacaccuuuuaaucucaccuaccugaaccuaaguagcgaacugaagcagcuugaggccaagacggcuagucucuuccaaacuaccgucgagcugcagggguugaucgaccagauaaauucuacauauguggaucugaaauuacucaaccgcuucgaaaauggaggcuacauccccgaggcaccacgagacggucaggccuauguacggaaggauggcgaaugggugcugcuuuccaccuuuugaggacuagucccuguucccagagcccacuuuuuuuucuuuuuuugaaauaaaauagccugucuuucagaucucaaaggcucuuuucagagccaccaaaaaaaaaaaaaaaaaaaaaaaaaaaaaaaaaaaaaaaaaaaaaaaaaaaaaaaaaaaaaaaaaaaaaaaaaaaaaaaaaaaaaaaaaaaaaaaaaaaaa

SEQ ID NO: 15111 - RNA, 4043 nt, Artificial Sequence
  Bat SARS-like CoV/WIV1__AGZ48828.1 spike protein mRNA human (1-1256)
aggagagucccgcagucggcguccagcggcucugcuuguucgugugugugucguugcaggccuuauucaagcuuaccaugaagcugcucgugcuugucuucgccacccugguuagcuccuacacaaucgagaaaugcuuggacuuugaugacagaacucccccugcuaacacgcaguucuuaucuucacacaggggcguguauuacccagaugacauuuuucggaguaauguacugcaucuagugcaagaucacuuccucccguuugacagcaacgucacccgcuucauaacauuugggcugaauuucgauaaccccaucauuccuuuuaaggacggaaucuauuucgcagccacugaaaaauccaaugugauucgagguuggguuuuuggcucuaccaugaacaauaagucgcagucagugaucauaaugaacaauagcacaaaccuugucauccgugcguguaauuucgagcugugcgauaacccauuuuucgugguauugaaaaguaauaacacccagauucccuccuacaucuucaauaacgcuuuuaacuguacuuucgaauauguuucuaaggacuuuaaucucgaucugggggagaagccuggaaacuucaaagaccugagagaauuuguguucaggaauaaggauggcuuucuccaugucuacagcgguuaucagccaauuuccgccgcaucaggguuacccacaggauucaacgcccugaaaccuaucuuuaagcuaccauugggcauaaauauuaccaacuuccggacgcugcuaacugcuuuuccgccccgcccugacuacuggggcaccagugcagccgcuuacuucgugggguaucucaaaccaacaacuuuuaugcugaaguacgacgagaauggaaccaucacagaugccguggacugcagccaaaacccccuugcggagcugaaguguucugucaaauccuucgaaauugauaaggguaucuaucagaccucaaauuucagaguugcaccuagcaaagaggugguaagguuuccaaacaucacgaauuugugccccuucggcgaaguguuuaacgccacuacauucccgagugucuacgcuugggagcggaagcgcauuucuaauuguguggccgacuauuccguucucuacaacagcaccucguuuucuacuuucaaaugcuaugggguguccgcaacaaagcugaaugauuuauguuuuucaaacgucuacgcugacaguuucgugguaaaaggagaugacguucgacagauagccccuggccagaccggugugaucgcggauuacaacuauaagcugcccgacgauuuuacggggugcguccucgccuggaauaccagaaacauugacgcaacacaaacuggaaauuacaacuauaaguacaggagccuucggcacggcaaacugcguccauucgagcgcgacaucuccaaugugccuuuuucucccgauggcaagccauguacacccccugcuuucaacugcuauuggccauugaaugacuacggguuuuauauaaccaacggaauugguuaccagccguacagagucgugguucuuagcuucgaacugcucaaugcccccgcuacugugugcggcccuaaacugucaaccgaucuuaucaagaaccaguguguaaauuucaacuuuaaugggcugacaggaaccggcgucuugacuccaaguuccaaaagguuccagcccuuucaacaguucggucgggacgugagcgauuuuacggacucuguucgagauccuaagacaucagagauccucgacauuaguccaugcagcuucgggggcguguccgucaucacccccggaacuaacaccucuucggaaguggccguacuguaucaggaugugaauuguacagacguuccggucgcaauucaugccgaucaauuaaccccuagcuggcgcgugcacuccacuggcaacaacguguuucagacacaggcugggugccugauaggagcggagcacgucgacacgucauacgaaugugauaucccaauuggugcaggcaucugcgccaguuaucauaccguuucuagccuaagauccacuucacaaaagagcaucguggcuuacacaaugucucucggggccgacuccaguauugcauauagcaauaacaccauagccauccccacaaauuucucuauuuccaucacuaccgaggugaugccuguaucaauggcuaaaacgagugucgacuguaacauguacauuugcggagauagcaccgagugugccaaucugcuuuugcaguauggcucguuuugcacacagcugaacagggcacucuccgguaucgcgguggaacaggaccggaauacucgcgagguuuucgcucaggugaagcaaauguacaaaacccccacacugaaggauuuugggggcuucaacuucucucagauacuuccagacccucugaaacccacuaagagauccuuuaucgaagaucuucucuucaauaaggucacccuggccgacgcaggauuuaugaaacaguacggcgaguguuuaggggauauuaacgccagggaccugaucugcgcucagaaguucaauggacuaacggugcucccaccgcugcuuacagaugacaugauugccgcauauaccgcugccuugguuucagguacugcgacagccggcuggaccuuuggggcuggagcagcccugcaaaucccuuucgcuaugcagauggccuaccguuuuaacggcauaggugugacucagaauguacucuaugaaaaccagaaacaaauugcaaaucaguucaacaaggcgaucagucagauucaagagucccugaccacaacgucuaccgccuuagggaaacugcaggaugucgugaaccagaaugcucaggcccuuaacacuuuggugaagcaacucagcuccaauuuuggcgcaaucucaagcguccugaacgacauacuaagucggcuggauaagguugaggcugaagugcagaucgaccgacucauuacaggaagacugcagucucuucagaccuacguaacacaacaguugaucagggccgcagagauucgcgccuccgcuaaucuggcggccacuaaaaugagcgaaugcguguuaggccagucgaagcgggucgacuucugugggaaaggauaucaccucaugucauuuccccaggcagcuccacauggcgugguuuuccugcacgugaccuacguccccucucaagagagaaacuuuacgacagccccugccaucugccacgaagguaaggcuuauuucccaagggaggggguguucguuuuuaauggaaccaguugguucauaacucagcgcaacuuuuucagcccccagauuaucaccacagauaauacuuuugugagcggcucuugugacgucguaaucgguauuaucaacaauaccguguacgauccucuucaaccggagcuggacagcuucaaagaagaguuggauaaguacuuuaaaaaccauacauccccagacguugaucucggcgacauuucagggauaaaugcaaguguggucaacauccagaaggaaauugaucgacugaaugagguggccaagaaccuaaaugagagccugaucgaccuccaggaacugggaaaauaugagcaguacauuaaguggcccugguauguauggcuuggcuucaucgcgggguugauagcuaucgugauggucacgauucuguuaugcuguaugaccucuugcuguuccugccucaaaggagccuguucaugcggcaguuguugcaaguuugaugaagacgacagcgagccuguucugaaaggugugaaguugcacuacacuugaggacuagucccuguucccagagcccacuuuuuuuucuuuuuuugaaauaaaauagccugucuuucagaucucaaaggcucuuuucagagccaccaaaaaaaaaaaaaaaaaaaaaaaaaaaaaaaaaaaaaaaaaaaaaaaaaaaaaaaaaaaaaaaaaaaaaaaaaaaaaaaaaaaaaaaaaaaaaaaaaaaaa

SEQ ID NO: 15112 - RNA, 4043 nt, Artificial Sequence
  Bat SARS-like CoV/WIV1__AGZ48828.1 spike protein mRNA human (1-1256)(K969P_V970P)
aggagagucccgcagucggcguccagcggcucugcuuguucgugugugugucguugcaggccuuauucaagcuuaccaugaagcugcucgugcuugucuucgccacccugguuagcuccuacacaaucgagaaaugcuuggacuuugaugacagaacucccccugcuaacacgcaguucuuaucuucacacaggggcguguauuacccagaugacauuuuucggaguaauguacugcaucuagugcaagaucacuuccucccguuugacagcaacgucacccgcuucauaacauuugggcugaauuucgauaaccccaucauuccuuuuaaggacggaaucuauuucgcagccacugaaaaauccaaugugauucgagguuggguuuuuggcucuaccaugaacaauaagucgcagucagugaucauaaugaacaauagcacaaaccuugucauccgugcguguaauuucgagcugugcgauaacccauuuuucgugguauugaaaaguaauaacacccagauucccuccuacaucuucaauaacgcuuuuaacuguacuuucgaauauguuucuaaggacuuuaaucucgaucugggggagaagccuggaaacuucaaagaccugagagaauuuguguucaggaauaaggauggcuuucuccaugucuacagcgguuaucagccaauuuccgccgcaucaggguuacccacaggauucaacgcccugaaaccuaucuuuaaacuuccauugggcauaaauauuaccaacuuccggacgcugcuaacugcuuuuccgccccgcccugacuacuggggcaccagugcagccgcuuacuucgugggguaucucaaaccaacaacuuuuaugcugaaguacgacgagaauggaaccaucacagaugccguggacugcagccaaaacccccuugcggagcugaaguguucugucaaauccuucgaaauugauaaggguaucuaucagaccucaaauuucagaguugcaccuagcaaagaggugguaagguuuccaaacaucacgaauuugugccccuucggcgaaguguuuaacgccacuacauucccgagugucuacgcuugggagcggaagcgcauuucuaauuguguggccgacuauuccguucucuacaacagcaccucguuuucuacuuucaaaugcuaugggguguccgcaacaaagcugaaugauuuauguuuuucaaacgucuacgcugacaguuucgugguaaaaggagaugacguucgacagauagccccuggccagaccggugugaucgcggauuacaacuauaagcugcccgacgauuuuacggggugcguccucgccuggaauaccagaaacauugacgcaacacaaacuggaaauuacaacuauaaguacaggagccuucggcacggcaaacugcguccauucgagcgcgacaucuccaaugugccuuuuucucccgauggcaagccauguacacccccugcuuucaacugcuauuggccauugaaugacuacggguuuuauauaaccaacggaauugguuaccagccguacagagucgugguuuugagcuucgaacugcucaaugcccccgcuacugugugcggcccuaaacugucaaccgaucuuaucaagaaccaguguguaaauuucaacuuuaaugggcugacaggaaccggcgucuugacuccaaguuccaaaagguuccagcccuuucaacaguucggucgggacgugagcgauuuuacggacucuguucgagauccuaagacaucagagauccucgacauuaguccaugcagcuucgggggcguguccgucaucacccccggaacuaacaccucuucggaaguggccguacuguaucaggaugugaauuguacagacguuccggucgcaauucaugccgaucaauuaaccccuagcuggcgcgugcacuccacuggcaacaacguguuucagacacaggcugggugccugauaggagcggagcacgucgacacgucauacgaaugugauaucccaauuggugcaggcaucugcgccaguuaucauaccguuucuagccuaagauccacuucacaaaagagcaucguggcuuacacaaugucucucggggccgacuccaguauugcauauagcaauaacaccauagccauccccacaaauuucucuauuuccaucacuaccgaggugaugccuguaucaauggcuaaaacgagugucgacuguaacauguacauuugcggagauagcaccgagugugccaaucugcuuuugcaguauggcucguuuugcacacagcugaacagggcacucuccgguaucgcgguggaacaggaccggaauacucgcgagguuuucgcucaggugaagcaaauguacaaaacccccacacugaaggauuuugggggcuucaacuucucucagauacuuccagacccucugaaacccacuaagaggagcuuuaucgaagaucuacucuucaauaaggucacccuggccgacgcaggauuuaugaaacaguacggcgaguguuuaggggauauuaacgccagagaccugaucugcgcucagaaguucaauggacuaacggugcucccaccgcugcuuacagaugacaugauugccgcauauaccgcugccuugguuucagguacugcgacagccggcuggaccuuuggggcuggagcagcccugcaaaucccuuucgcuaugcagauggccuaccguuuuaacggcauaggugugacucagaauguacucuaugaaaaccagaaacaaauugcaaaucaguucaacaaggcgaucagucagauucaagagucccugaccacaacgucuaccgccuuagggaaacugcaggaugucgugaaccagaaugcucaggcccuuaacacuuuggugaagcaacucagcuccaauuuuggcgcaaucucaagcguccugaacgacauacuaagucggcuggaucccccagaggcugaaguucagaucgaccgacucauuacaggaagacugcagucucuucagaccuacgugacacaacaguugaucagggccgcagagauucgcgccuccgcuaaucuggcggccacuaagaugagcgaaugcguauuaggccagucgaaacggguggacuucugugggaagggauaucaccucaugucauuuccccaggcagcuccucauggcgucguguuccugcacguuaccuacgugccaucucaagagagaaacuuuacgacagcccccgccaucugccacgaagguaaggcuuauuucccuagggagggggucuucguguuuaauggaaccaguugguucauaacucagcgcaacuuuuucuccccgcagauuaucaccacagauaauacuuuuguuagcggcucuugugacguggucaucgguauuaucaacaauaccguauacgauccacuucaacccgagcuggacagcuucaaggaagaguuggauaaauacuuuaagaaccauacauccccugacguggaucucggcgacauuucagggauaaaugcaaguguugugaacauccagaaagaaauugaucgacugaaugaggucgccaagaaccuaaaugagagccugaucgaccuccaggaacugggaaaguaugagcaguacauuaaauggccaugguauguguggcuuggcuucaucgcgggguugauagcuaucguaauggugacgauucuguuaugcuguaugaccucuugcuguuccugccucaagggagccuguucaugcggcaguuguugcaaauuugaugaagacgacagcgagcccguccugaaggguguuaaacuucacuacacuugaggacuagucccuguucccagagcccacuuuuuuuucuuuuuuugaaauaaaauagccugucuuucagaucucaaaggcucuuuucagagccaccaaaaaaaaaaaaaaaaaaaaaaaaaaaaaaaaaaaaaaaaaaaaaaaaaaaaaaaaaaaaaaaaaaaaaaaaaaaaaaaaaaaaaaaaaaaaaaaaaaaaa

SEQ ID NO: 15113 - RNA, 3848 nt, Artificial Sequence
  Bat SARS-like CoV/WIV1__AGZ48828.1 spike protein mRNA human (variant)
aggagagucccgcagucggcguccagcggcucugcuuguucgugugugugucguugcaggccuuauucaagcuuaccaugaagcugcucgugcuugucuucgccacccugguuagcuccuacacaaucgagaaaugcuuggacuuugaugacagaacucccccugcuaacacgcaguucuuaucuucacacaggggcguguauuacccagaugacauuuuucggaguaauguacugcaucuagugcaagaucacuuccucccguuugacagcaacgucacccgcuucauaacauuugggcugaauuucgauaaccccaucauuccuuuuaaggacggaaucuauuucgcagccacugaaaaauccaaugugauucgagguuggguuuuuggcucuaccaugaacaauaagucgcagucagugaucauaaugaacaauagcacaaaccuugucauccgugcguguaauuucgagcugugcgauaacccauuuuucgugguauugaaaaguaauaacacccagauucccuccuacaucuucaauaacgcuuuuaacuguacuuucgaauauguuucuaaggacuuuaaucucgaucugggggagaagccuggaaacuucaaagaccugagagaauuuguguucaggaauaaggauggcuuucuccaugucuacagcgguuaucagccaauuuccgccgcaucaggguuacccacaggauucaacgcccugaaaccuaucuuuaaacuuccauugggcauaaauauuaccaacuuccggacgcugcuaacugcuuuuccgccccgcccugacuacuggggcaccagugcagccgcuuacuucgugggguaucucaaaccaacaacuuuuaugcugaaguacgacgagaauggaaccaucacagaugccguggacugcagccaaaacccccuugcggagcugaaguguucugucaaauccuucgaaauugauaaggguaucuaucagaccucaaauuucagaguugcaccuagcaaagaggugguaagguuuccaaacaucacgaauuugugccccuucggcgaaguguuuaacgccacuacauucccgagugucuacgcuugggagcggaagcgcauuucuaauuguguggccgacuauuccguucucuacaacagcaccucguuuucuacuuucaaaugcuaugggguguccgcaacaaagcugaaugauuuauguuuuucaaacgucuacgcugacaguuucgugguaaaaggagaugacguucgacagauagccccuggccagaccggugugaucgcggauuacaacuauaagcugcccgacgauuuuacggggugcguccucgccuggaauaccagaaacauugacgcaacacaaacuggaaauuacaacuauaaguacaggagccuucggcacggcaaacugcguccauucgagcgcgacaucuccaaugugccuuuuucucccgauggcaagccauguacacccccugcuuucaacugcuauuggccauugaaugacuacggguuuuauauaaccaacggaauugguuaccagccguacagagucgugguuuugagcuucgaacugcucaaugcccccgcuacugugugcggcccuaaacugucaaccgaucuuaucaagaaccaguguguaaauuucaacuuuaaugggcugacaggaaccggcgucuugacuccaaguuccaaaagguuccagcccuuucaacaguucggucgggacgugagcgauuuuacggacucuguucgagauccuaagacaucagagauccucgacauuaguccaugcagcuucgggggcguguccgucaucacccccggaacuaacaccucuucggaaguggccguacuguaucaggaugugaauuguacagacguuccggucgcaauucaugccgaucaauuaaccccuagcuggcgcgugcacuccacuggcaacaacguguuucagacacaggcugggugccugauaggagcggagcacgucgacacgucauacgaaugugauaucccaauuggugcaggcaucugcgccaguuaucauaccguuucuagccuaagauccacuucacaaaagagcaucguggcuuacacaaugucucucggggccgacuccaguauugcauauagcaauaacaccauagccauccccacaaauuucucuauuuccaucacuaccgaggugaugccuguaucaauggcuaaaacgagugucgacuguaacauguacauuugcggagauagcaccgagugugccaaucugcuuuugcaguauggcucguuuugcacacagcugaacagggcacucuccgguaucgcgguggaacaggaccggaauacucgcgagguuuucgcucaggugaagcaaauguacaaaacccccacacugaaggauuuugggggcuucaacuucucucagauacuuccagacccucugaaacccacuaagaggagcuuuaucgaagaucuacucuucaauaaggucacccuggccgacgcaggauuuaugaaacaguacggcgaguguuuaggggauauuaacgccagagaccugaucugcgcucagaaguucaauggacuaacggugcucccaccgcugcuuacagaugacaugauugccgcauauaccgcugccuugguuucagguacugcgacagccggcuggaccuuuggggcuggagcagcccugcaaaucccuuucgcuaugcagauggccuaccguuuuaacggcauaggugugacucagaauguacucuaugaaaaccagaaacaaauugcaaaucaguucaacaaggcgaucagucagauucaagagucccugaccacaacgucuaccgccuuagggaaacugcaggaugucgugaaccagaaugcucaggcccuuaacacuuuggugaagcaacucagcuccaauuuuggcgcaaucucaagcguccugaacgacauacuaagucggcuggaucccccagaggcugaaguucagaucgaccgacucauuacaggaagacugcagucucuucagaccuacgugacacaacaguugaucagggccgcagagauucgcgccuccgcuaaucuggcggccacuaagaugagcgaaugcguauuaggccagucgaaacggguggacuucugugggaagggauaucaccucaugucauuuccccaggcagcuccucauggcgucguguuccugcacguuaccuacgugccaucucaagagagaaacuuuacgacagcccccgccaucugccacgaagguaaggcuuauuucccuagggagggggucuucguguuuaauggaaccaguugguucauaacucagcgcaacuuuuucuccccgcagauuaucaccacagauaauacuuuuguuagcggcucuugugacguggucaucgguauuaucaacaauaccguauacgauccacuucaacccgagcuggacagcuucaaggaagaguuggauaaauacuuuaagaaccauacauccccugacguggaucucggcgacauuucagggauaaaugcaaguguugugaacauccagaaagaaauugaucgacugaaugaggucgccaagaaccuaaaugagagccugaucgaccuccaggaacugggaaaguaugagcagugaggacuagucccuguucccagagcccacuuuuuuuucuuuuuuugaaauaaaauagccugucuuucagaucucaaaggcucuuuucagagccaccaaaaaaaaaaaaaaaaaaaaaaaaaaaaaaaaaaaaaaaaaaaaaaaaaaaaaaaaaaaaaaaaaaaaaaaaaaaaaaaaaaaaaaaaaaaaaaaaaaaaa

SEQ ID NO: 15114 - RNA, 3929 nt, Artificial Sequence
  Bat SARS-like CoV/WIV1__AGZ48828.1 spike protein mRNA human (variant)
aggagagucccgcagucggcguccagcggcucugcuuguucgugugugugucguugcaggccuuauucaagcuuaccaugaagcugcucgugcuugucuucgccacccugguuagcuccuacacaaucgagaaaugcuuggacuuugaugacagaacucccccugcuaacacgcaguucuuaucuucacacaggggcguguauuacccagaugacauuuuucggaguaauguacugcaucuagugcaagaucacuuccucccguuugacagcaacgucacccgcuucauaacauuugggcugaauuucgauaaccccaucauuccuuuuaaggacggaaucuauuucgcagccacugaaaaauccaaugugauucgagguuggguuuuuggcucuaccaugaacaauaagucgcagucagugaucauaaugaacaauagcacaaaccuugucauccgugcguguaauuucgagcugugcgauaacccauuuuucgugguauugaaaaguaauaacacccagauucccuccuacaucuucaauaacgcuuuuaacuguacuuucgaauauguuucuaaggacuuuaaucucgaucugggggagaagccuggaaacuucaaagaccugagagaauuuguguucaggaauaaggauggcuuucuccaugucuacagcgguuaucagccaauuuccgccgcaucaggguuacccacaggauucaacgcccugaaaccuaucuuuaaacuuccauugggcauaaauauuaccaacuuccggacgcugcuaacugcuuuuccgccccgcccugacuacuggggcaccagugcagccgcuuacuucgugggguaucucaaaccaacaacuuuuaugcugaaguacgacgagaauggaaccaucacagaugccguggacugcagccaaaacccccuugcggagcugaaguguucugucaaauccuucgaaauugauaaggguaucuaucagaccucaaauuucagaguugcaccuagcaaagaggugguaagguuuccaaacaucacgaauuugugccccuucggcgaaguguuuaacgccacuacauucccgagugucuacgcuugggagcggaagcgcauuucuaauuguguggccgacuauuccguucucuacaacagcaccucguuuucuacuuucaaaugcuaugggguguccgcaacaaagcugaaugauuuauguuuuucaaacgucuacgcugacaguuucgugguaaaaggagaugacguucgacagauagccccuggccagaccggugugaucgcggauuacaacuauaagcugcccgacgauuuuacggggugcguccucgccuggaauaccagaaacauugacgcaacacaaacuggaaauuacaacuauaaguacaggagccuucggcacggcaaacugcguccauucgagcgcgacaucuccaaugugccuuuuucucccgauggcaagccauguacacccccugcuuucaacugcuauuggccauugaaugacuacggguuuuauauaaccaacggaauugguuaccagccguacagagucgugguuuugagcuucgaacugcucaaugcccccgcuacugugugcggcccuaaacugucaaccgaucuuaucaagaaccaguguguaaauuucaacuuuaaugggcugacaggaaccggcgucuugacuccaaguuccaaaagguuccagcccuuucaacaguucggucgggacgugagcgauuuuacggacucuguucgagauccuaagacaucagagauccucgacauuaguccaugcagcuucgggggcguguccgucaucacccccggaacuaacaccucuucggaaguggccguacuguaucaggaugugaauuguacagacguuccggucgcaauucaugccgaucaauuaaccccuagcuggcgcgugcacuccacuggcaacaacguguuucagacacaggcugggugccugauaggagcggagcacgucgacacgucauacgaaugugauaucccaauuggugcaggcaucugcgccaguuaucauaccguuucuagccuaagauccacuucacaaaagagcaucguggcuuacacaaugucucucggggccgacuccaguauugcauauagcaauaacaccauagccauccccacaaauuucucuauuuccaucacuaccgaggugaugccuguaucaauggcuaaaacgagugucgacuguaacauguacauuugcggagauagcaccgagugugccaaucugcuuuugcaauauggcucguuuugcacacagcugaacagggcacucuccgguaucgcgguggaacaggaccggaauacucgcgagguuuucgcucaggugaagcaaauguacaaaacccccacacugaaggauuuugggggcuucaacuucucucagauacuuccagacccucugaaacccacuaagaggagcuuuaucgaagaucuacucuucaauaaggucacccuggccgacgcaggauuuaugaaacaguacggcgaguguuuaggggauauuaacgccagagaccugaucugcgcucagaaguucaauggacuaacggugcucccaccgcugcuuacagaugacaugauugccgcauauaccgcugccuugguuucagguacugcgacagccggcuggaccuuuggggcuggagcagcccugcaaaucccuuucgcuaugcagauggccuaccguuuuaacggcauaggugugacucagaauguacucuaugaaaaccagaaacaaauugcaaaucaguucaacaaggcgaucagucagauucaagagucccugaccacaacgucuaccgccuuagggaaacugcaggaugucgugaaccagaaugcucaggcccuuaacacuuuggugaagcaacucagcuccaauuuuggcgcaaucucaagcguccugaacgacauacuaagucggcuggaucccccagaggcugaaguucagaucgaccgacucauuacaggaagacugcagucucuucagaccuacgugacacaacaguugaucagggccgcagagauucgcgccuccgcuaaucuggcggccacuaagaugagcgaaugcguauuaggccagucgaaacggguggacuucugugggaagggauaucaccucaugucauuuccccaggcagcuccucauggcgucguguuccugcacguuaccuacgugccaucucaagagagaaacuuuacgacagcccccgccaucugccacgaagguaaggcuuauuucccuagggagggggucuucguguuuaauggaaccaguugguucauaacucagcgcaacuuuuucuccccgcagauuaucaccacagauaauacuuuuguuagcggcucuugugacguggucaucgguauuaucaacaauaccguauacgauccacuucaacccgagcuggacagcuucaaggaagaguuggauaaauacuuuaagaaccauacauccccugacguggaucucggcgacauuucagggauaaaugcaaguguugugaacauccagaaagaaauugaucgacugaaugaggucgccaagaaccuaaaugagagccugaucgaccuccaggaacugggaaaguaugagcagggcggguacauuccagaagcgccccgggauggacaggcuuaugugcguaaagacggcgaguggguacuuuugucuacguucugaggacuagucccuguucccagagcccacuuuuuuuucuuuuuuugaaauaaaauagccugucuuucagaucucaaaggcucuuuucagagccaccaaaaaaaaaaaaaaaaaaaaaaaaaaaaaaaaaaaaaaaaaaaaaaaaaaaaaaaaaaaaaaaaaaaaaaaaaaaaaaaaaaaaaaaaaaaaaaaaaaaaa

SEQ ID NO: 15115 - RNA, 4097 nt, Artificial Sequence
  BatCoV/HKU9-1 BF_005I__YP_001039971.1 spike protein mRNA human (1-1274)
aggagagucccgcagucggcguccagcggcucugcuuguucgugugugugucguugcaggccuuauucaagcuuaccaugcugcucauccuugugcugggcgucagcuuggccgcugcauccagacccgagugcuucaacccuagguuuaccuuaacaccacugaaucacacucuaaacuacacgucuauuaaggccaaaguuucaaaugugcuccugccggaccccuauauagcguacagugggcagacccuucggcaaaaccuguucauggcugauaugagcaauacaaucuuguauccuguaacuccacccgccaacggagcaaaugguggcuuuauuuacaacaccuccaucauuccugugucugccggacucuucgucaauacauggauguaucgccagccagcuucgucacgagcauacugucaggaacccuuugggguggccuucggcgacaccuuugagaacgaucguaucgcuauacugaucauggccccugacaaucuggguagcuggagugcgguugcaccaagaaaccagacuaauauuuaucucuuagugugcuccaacgccacacuguguaucaauccgggguucaacagguggggacccgcuggcucuuuuauugccccugaugcacuugucgaccauagcaacuccugcuucgugaauaacaccuuuucaguaaauaucaguacgagccggauaucuuuggcuuuccuguuuaaggauggcgaccuacucauuuaccacuccggguggcugccaacuucaaacuucgaacauggauucagccgcgguagucaccccaugaccuacuuuaugucucuuccuguuggcgggaaucugccaagagcccaauucuuucaguccaucgugaggagcaacgcgauugauaaaggagacggcauguguacaaauuucgaugucaacuugcauguggcccaccucaucaaucgggaccuguuagugucguauuuuaacaaugguucugucgcaaacgcugccgauugcgcugacuccgccgcagaggaacuguacuguguuacugggucauucgaucccccgaccggaguguauccucucagucgcuaccgagcccagguagcuggcuuugugagagucacacagaggggcagcuauugcacgcccccauacuccgugcuucaagacccuccccagccaguuguguggcggcguuauaugcuguacgacugugucuucgauuuuaccgugguaguugacucuuugcccacucaccagcuacagugcuacggggugagcccucgcagacuggcgucaauguguuauggaagugucacacucgaugugaugaggaucaaugagacccaucugaacaaucuuuucaaccgggucccagacacuuuuucccuguacaacuaugcauugccggauaauuucuacgguugccuccacgccuuuuaucugaacagcacagcucccuacgccguggcaaaucgauucccuauuaagccaggcgggcgccaaucuaacucagccuucauagacaccguuaucaaugcugcccauuauagucccuuuagcuacguguacggauuagcaguaauuacgcugaaaccugcggcuggcuccaagcuagucugcccaguggccaacgauaccguugugaucacagacagauguguccaguauaaucucuacgguuauacugggaccggcgugcugucuaagaacacaucgcuuguaauacccgauggaaaaguguucacugcaagcuccaccggcacaauuaucgggguuucaaucaauaguaccacuuacucuauuaugccgugcgucacggugccugugagcgucggauaucacccaaacuuugagagggccuugcuguucaauggucucuccuguucacagcggagccgcgcuguuacagaacccgugucugugcugugguccgccagugcaaccgcucaagacgccuuugacacuccuagcggcugcguagucaacguggagcuuagaaauaccacaaucguuaacaccugugcgaugcccauuggaaauucucugugcuucauaaacggguccaucgccacugcuaacgcagauucauugccaaggcuccagcuggugaauuacgacccuuuauaugauaacaguacagccacgcccaugaccccagucuacugggugaagguuccgacuaauuuuacacugagcgcuaccgaagaguacauucagacaacugccccuaaaaucaccaucgacugugcacguuaucuaugcggcgauucgucccggugucucaacgugcugcuucacuacgguacguucugcaaugacauuaacaaggcguugucucgaguaagcaccauacuggauucagcccuccugaguuuagucaaagagcuguccaucaauacaagagacgaagugacuaccuuuucuuucgauggggacuauaacuuuacaggccuuaugggauguuugggccccaauugcggggcuacuaccuacaggagcgccuucuccgaucuccuguaugacaaggugcgcauuacggauccaggauuuaugcagucauaccaaaagugcaucgacagccagugggguggcaguauucgggaccuacuguguacacagaccuauaacgggaucgcaguccugcccccuauaguuucuccagcuaugcaggcccucuacacuucccuuuuggugggagcaguagccagcucgggcuacacauucgguaucaccucagcuggggugauucccuucgcgacucaacugcaguuuagauuaaauggcaucggagucaccacacaggugcucguugagaaccagaaacugauugccucuaguuucaauaacgcacuugugaauauccaaaagggcuuuacggaaaccuccauagcucugagcaaaaugcaggaugucauuaaccagcaugccgcccaguugcacacucucgugguucaacuggggaacucuuucggagcuaucagcuccucaauuaaugagaucuuuaguaggcuagaaggccuggcagccaacgcggagguggaccgccucauaaauggucgaaugaugguccugaacacauauguaacccagcuuuugauccaggcuagcgaggccaaggcacaaaaugcccuggcugcacagaaaauuucugaaugcgugaaggcccaguccuuacggaacgauuucugugggaauggaacacauguucucucaaucccucagcuggcgccgaacggcgugcuuuuuauucacuacgcuuauacuccaaccgaguacgccuucguccaaacgagugcaggucugugccauaauggcacaggguaugcuccccgucagggaauguuugugcuaccuaacaauaccaacauguggcacuucacuaccaugcaguuuuacaauccaguaaacaucagcgccuccaauacacaggugcucacuucuuguucggucaacuauaccagcguuaauuacacagugcuggaacccucagugccuggcgacuacgauuuccaaaaagaguucgacaaguuuuauaagaacuuguccacgauauucaacaauaccuuuaacccgaaugauuucaacuuuaguacugucgacgugacagcccagauuaaaucucugcacgauguuguaaaucaguuaaaccagagcuucaucgaccucaagaaacugaauguguacgaaaagaccaucaaauggcccugguaugucuggcuugcaaugauugcugggaucgugggacugguuuuggccgugauuaugcucaugugcaugacuaacuguugcuccuguuuuaagggcaugugcgauuguagaaggugcugcgguucauacgacucuuaugaugacgucuacccagcggugcgcguaaauaagaaacggacagucugaggacuagucccuguucccagagcccacuuuuuuuucuuuuuuugaaauaaaauagccugucuuucagaucucaaaggcucuuuucagagccaccaaaaaaaaaaaaaaaaaaaaaaaaaaaaaaaaaaaaaaaaaaaaaaaaaaaaaaaaaaaaaaaaaaaaaaaaaaaaaaaaaaaaaaaaaaaaaaaaaaaaa

SEQ ID NO: 15116 - RNA, 4097 nt, Artificial Sequence
  BatCoV/HKU9-1 BF_005I__YP_001039971.1 spike protein mRNA human (1-1274)(G983P_L984P)
aggagagucccgcagucggcguccagcggcucugcuuguucgugugugugucguugcaggccuuauucaagcuuaccaugcugcucauccuugugcugggcgucagcuuggccgcugcauccagacccgagugcuucaacccuagguuuaccuuaacaccacugaaucacacucuaaacuacacgucuauuaaggccaaaguuucaaaugugcuccugccggaccccuauauagcguacagugggcagacccuucggcaaaaccuguucauggcugauaugagcaauacaaucuuguauccuguaacuccacccgccaacggagcaaaugguggcuuuauuuacaacaccuccaucauuccugugucugccggacucuucgucaauacauggauguaucgccagccagcuucgucacgagcauacugucaggaacccuuugggguggccuucggcgacaccuuugagaacgaucguaucgcuauacugaucauggccccugacaaucuggguagcuggagugcgguugcaccaagaaaccagacuaauauuuaucucuuagugugcuccaacgccacacuguguaucaauccgggguucaacagguggggacccgcuggcucuuuuauugccccugaugcacuugucgaccauagcaacuccugcuucgugaauaacaccuuuucaguaaauaucaguacgagccggauaucuuuggcuuuccuguuuaaggauggcgaccuacucauuuaccacuccggguggcugccaacuucaaacuucgaacauggauucagccgcgguagucaccccaugaccuacuuuaugucucuuccuguuggcgggaaucugccaagagcccaauucuuucaguccaucgugaggagcaacgcgauugauaaaggagacggcauguguacaaauuucgaugucaacuugcauguggcccaccucaucaaucgggaccuguuagugucguauuuuaacaaugguucugucgcaaacgcugccgauugcgcugacuccgccgcagaggaacuguacuguguuacugggucauucgaucccccgaccggaguguauccucucagucgcuaccgagcccagguagcuggcuuugugagagucacacagaggggcagcuauugcacgcccccauacuccgugcuucaagacccuccccagccaguuguguggcggcguuauaugcuguacgacugugucuucgauuuuaccgugguaguugacucuuugcccacucaccagcuacagugcuacggggugagcccucgcagacuggcgucaauguguuauggaagugucacacucgaugugaugaggaucaaugagacccaucugaacaaucuuuucaaccgggucccagacacuuuuucccuguacaacuaugcauugccggauaauuucuacgguugccuccacgccuuuuaucugaacagcacagcucccuacgccguggcaaaucgauucccuauuaagccaggcgggcgccaaucuaacucagccuucauagacaccguuaucaaugcugcccauuauagucccuuuagcuacguguacggauuagcaguaauuacgcugaaaccugcggcuggcuccaagcuagucugcccaguggccaacgauaccguugugaucacagacagauguguccaguauaaucucuacgguuauacugggaccggcgugcugucuaagaacacaucgcuuguaauacccgauggaaaaguguucacugcaagcuccaccggcacaauuaucgggguuucaaucaauaguaccacuuacucuauuaugccgugcgucacggugccugugagcgucggauaucacccaaacuuugagagggccuugcuguucaauggucucuccuguucacagcggagccgcgcuguuacagaacccgugucugugcugugguccgccagugcaaccgcucaagacgccuuugacacuccuagcggcugcguagucaacguggagcuuagaaauaccacaaucguuaacaccugugcgaugcccauuggaaauucucugugcuucauaaacggguccaucgccacugcuaacgcagauucauugccaaggcuccagcuggugaauuacgacccuuuauaugauaacaguacagccacgcccaugaccccagucuacugggugaagguuccgacuaauuuuacacugagcgcuaccgaagaguacauucagacaacugccccuaaaaucaccaucgacugugcacguuaucuaugcggcgauucgucccggugucucaacgugcugcuucacuacgguacguucugcaaugacauuaacaaggcguugucucgaguaagcaccauacuggauucagcccuccugaguuuagucaaagagcuguccaucaauacaagagacgaagugacuaccuuuucuuucgauggggacuauaacuuuacaggccuuaugggauguuugggccccaauugcggggcuacuaccuacaggagcgccuucuccgaucuccuguaugacaaggugcgcauuacggauccaggauuuaugcagucauaccaaaagugcaucgacagccagugggguggcaguauucgggaccuacuguguacacagaccuauaacgggaucgcaguccugcccccuauaguuucuccagcuaugcaggcccucuacacuucccuuuuggugggagcaguagccagcucgggcuacacauucgguaucaccucagcuggggugauucccuucgcgacucaacugcaguuuagauuaaauggcaucggagucaccacacaggugcucguugagaaccagaaacugauugccucuaguuucaauaacgcacuugugaauauccaaaagggcuuuacggaaaccuccauagcucugagcaaaaugcaggaugucauuaaccagcaugccgcccaguugcacacucucgugguucaacuggggaacucuuucggagcuaucagcuccucaauuaaugagaucuuuaguaggcuagaaccuccggcagccaacgcggagguggaccgccugauaaauggccgaaugaugguccucaacacauauguaacccagcugcuuauccaggcuagcgaggccaaggcacaaaaugccuuggcugcacagaaaauuucugaaugcgugaaggcccagucccugcggaacgauuucugugguaaugggacacauguuuuaucaaucccacagcucgcgcccaacggagugcuguuuauucacuacgcuuauacuccuaccgaguacgccuucguccaaacgagugcaggccuuugccauaaugguacaggcuaugccccacgucaggggauguuugugcugcccaacaauaccaacauguggcacuucacuaccaugcaguuuuacaauccuguaaacaucagcgcuuccaauacacaggugcuaacuucuuguucggucaacuauaccagcguuaauuacacagugcucgaaccgucagugcccggagacuacgauuuccaaaaagaguucgacaaguuuuauaagaaccuguccacgauauucaacaauaccuuuaacccaaaugauuucaacuuuaguacugucgacgugacagcccagauuaaaucuuugcacgauguuguaaaucagcugaaccagagcuucaucgacuuaaagaaacucaauguguacgaaaagaccaucaaauggccuugguaugucuggcuggcaaugauugcuggcaucguggggcuuguucuggccgugauuauguugaugugcaugacuaacuguugcuccuguuuuaagggaaugugcgauuguagaaggugcugcggcucauacgacucuuaugaugacgucuaccccgcggugcgcguaaauaagaaacggacagucugaggacuagucccuguucccagagcccacuuuuuuuucuuuuuuugaaauaaaauagccugucuuucagaucucaaaggcucuuuucagagccaccaaaaaaaaaaaaaaaaaaaaaaaaaaaaaaaaaaaaaaaaaaaaaaaaaaaaaaaaaaaaaaaaaaaaaaaaaaaaaaaaaaaaaaaaaaaaaaaaaaaaa

SEQ ID NO: 15117 - RNA, 3896 nt, Artificial Sequence
  BatCoV/HKU9-1 BF_005I__YP_001039971.1 spike protein mRNA human (variant)
aggagagucccgcagucggcguccagcggcucugcuuguucgugugugugucguugcaggccuuauucaagcuuaccaugcugcucauccuugugcugggcgucagcuuggccgcugcauccagacccgagugcuucaacccuagguuuaccuuaacaccacugaaucacacucuaaacuacacgucuauuaaggccaaaguuucaaaugugcuccugccggaccccuauauagcguacagugggcagacccuucggcaaaaccuguucauggcugauaugagcaauacaaucuuguauccuguaacuccacccgccaacggagcaaaugguggcuuuauuuacaacaccuccaucauuccugugucugccggacucuucgucaauacauggauguaucgccagccagcuucgucacgagcauacugucaggaacccuuugggguggccuucggcgacaccuuugagaacgaucguaucgcuauacugaucauggccccugacaaucuggguagcuggagugcgguugcaccaagaaaccagacuaauauuuaucucuuagugugcuccaacgccacacuguguaucaauccgggguucaacagguggggacccgcuggcucuuuuauugccccugaugcacuugucgaccauagcaacuccugcuucgugaauaacaccuuuucaguaaauaucaguacgagccggauaucuuuggcuuuccuguuuaaggauggcgaccuacucauuuaccacuccggguggcugccaacuucaaacuucgaacauggauucagccgcgguagucaccccaugaccuacuuuaugucucuuccuguuggcgggaaucugccaagagcccaauucuuucaguccaucgugaggagcaacgcgauugauaaaggagacggcauguguacaaauuucgaugucaacuugcauguggcccaccucaucaaucgggaccuguuagugucguauuuuaacaaugguucugucgcaaacgcugccgauugcgcugacuccgccgcagaggaacuguacuguguuacugggucauucgaucccccgaccggaguguauccucucagucgcuaccgagcccagguagcuggcuuugugagagucacacagaggggcagcuauugcacgcccccauacuccgugcuucaagacccuccccagccaguuguguggcggcguuauaugcuguacgacugugucuucgauuuuaccgugguaguugacucuuugcccacucaccagcuacagugcuacggggugagcccucgcagacuggcgucaauguguuauggaagugucacacucgaugugaugaggaucaaugagacccaucugaacaaucuuuucaaccgggucccagacacuuuuucccuguacaacuaugcauugccggauaauuucuacgguugccuccacgccuuuuaucugaacagcacagcucccuacgccguggcaaaucgauucccuauuaagccaggcgggcgccaaucuaacucagccuucauagacaccguuaucaaugcugcccauuauagucccuuuagcuacguguacggauuagcaguaauuacgcugaaaccugcggcuggcuccaagcuagucugcccaguggccaacgauaccguugugaucacagacagauguguccaguauaaucucuacgguuauacugggaccggcgugcugucuaagaacacaucgcuuguaauacccgauggaaaaguguucacugcaagcuccaccggcacaauuaucgggguuucaaucaauaguaccacuuacucuauuaugccgugcgucacggugccugugagcgucggauaucacccaaacuuugagagggccuugcuguucaauggucucuccuguucacagcggagccgcgcuguuacagaacccgugucugugcugugguccgccagugcaaccgcucaagacgccuuugacacuccuagcggcugcguagucaacguggagcuuagaaauaccacaaucguuaacaccugugcgaugcccauuggaaauucucugugcuucauaaacggguccaucgccacugcuaacgcagauucauugccaaggcuccagcuggugaauuacgacccuuuauaugauaacaguacagccacgcccaugaccccagucuacugggugaagguuccgacuaauuuuacacugagcgcuaccgaagaguacauucagacaacugccccuaaaaucaccaucgacugugcacguuaucuaugcggcgauucgucccggugucucaacgugcugcuucacuacgguacguucugcaaugacauuaacaaggcguugucucgaguaagcaccauacuggauucagcccuccugaguuuagucaaagagcuguccaucaauacaagagacgaagugacuaccuuuucuuucgauggggacuauaacuuuacaggccuuaugggauguuugggccccaauugcggggcuacuaccuacaggagcgccuucuccgaucuccuguaugacaaggugcgcauuacggauccaggauuuaugcagucauaccaaaagugcaucgacagccagugggguggcaguauucgggaccuacuguguacacagaccuauaacgggaucgcaguccugcccccuauaguuucuccagcuaugcaggcccucuacacuucccuuuuggugggagcaguagccagcucgggcuacacauucgguaucaccucagcuggggugauucccuucgcgacucaacugcaguuuagauuaaauggcaucggagucaccacacaggugcucguugagaaccagaaacugauugccucuaguuucaauaacgcacuugugaauauccaaaagggcuuuacggaaaccuccauagcucugagcaaaaugcaggaugucauuaaccagcaugccgcccaguugcacacucucgugguucaacuggggaacucuuucggagcuaucagcuccucaauuaaugagaucuuuaguaggcuagaaccuccggcagccaacgcggagguggaccgccugauaaauggccgaaugaugguccucaacacauauguaacccagcugcuuauccaggcuagcgaggccaaggcacaaaaugccuuggcugcacagaaaauuucugaaugcgugaaggcccagucccugcggaacgauuucugugguaaugggacacauguuuuaucaaucccacagcucgcgcccaacggagugcuguuuauucacuacgcuuauacuccuaccgaguacgccuucguccaaacgagugcaggccuuugccauaaugguacaggcuaugccccacgucaggggauguuugugcugcccaacaauaccaacauguggcacuucacuaccaugcaguuuuacaauccuguaaacaucagcgcuuccaauacacaggugcuaacuucuuguucggucaacuauaccagcguuaauuacacagugcucgaaccgucagugcccggagacuacgauuuccaaaaagaguucgacaaguuuuauaagaaccuguccacgauauucaacaauaccuuuaacccaaaugauuucaacuuuaguacugucgacgugacagcccagauuaaaucuuugcacgauguuguaaaucagcugaaccagagcuucaucgacuuaaagaaacucaauguguacgaaaagugaggacuagucccuguucccagagcccacuuuuuuuucuuuuuuugaaauaaaauagccugucuuucagaucucaaaggcucuuuucagagccaccaaaaaaaaaaaaaaaaaaaaaaaaaaaaaaaaaaaaaaaaaaaaaaaaaaaaaaaaaaaaaaaaaaaaaaaaaaaaaaaaaaaaaaaaaaaaaaaaaaaaa

SEQ ID NO: 15118 - RNA, 3977 nt, Artificial Sequence
  BatCoV/HKU9-1 BF_005I__YP_001039971.1 spike protein mRNA human (variant)
aggagagucccgcagucggcguccagcggcucugcuuguucgugugugugucguugcaggccuuauucaagcuuaccaugcugcucauccuugugcugggcgucagcuuggccgcugcauccagacccgagugcuucaacccuagguuuaccuuaacaccacugaaucacacucuaaacuacacgucuauuaaggccaaaguuucaaaugugcuccugccggaccccuauauagcguacagugggcaaacccuucggcaaaaccuguucauggcugauaugagcaauacaaucuuguauccuguaacuccacccgccaacggagcaaaugguggcuuuauuuacaacaccuccaucauuccugugucugccggacucuucgucaauacauggauguaucgccagccagcuucgucacgagcauacugucaggaacccuuugggguggccuucggcgacaccuuugagaacgaucguaucgcuauacugaucauggccccugacaaucuggguagcuggagugcgguugcaccaagaaaccagacuaauauuuaucucuuagugugcuccaacgccacacuguguaucaauccgggguucaacagguggggacccgcuggcucuuuuauugccccugaugcacuugucgaccauagcaacuccugcuucgugaauaacaccuuuucaguaaauaucaguacgagccggauaucuuuggcuuuccuguuuaaggauggcgaccuacucauuuaccacuccggguggcugccaacuucaaacuucgaacauggauucagccgcgguagucaccccaugaccuacuuuaugucucuuccuguuggcgggaaucugccaagagcccaauucuuucaguccaucgugaggagcaacgcgauugauaaaggagacggcauguguacaaauuucgaugucaacuugcauguggcccaccucaucaaucgggaccuguuagugucguauuuuaacaaugguucugucgcaaacgcugccgauugcgcugacuccgccgcagaggaacuguacuguguuacugggucauucgaucccccgaccggaguguauccucucagucgcuaccgagcccagguagcuggcuuugugagagucacacagaggggcagcuauugcacgcccccauacuccgugcuucaagacccuccccagccaguuguguggcggcguuauaugcuguacgacugugucuucgauuuuaccgugguaguugacucuuugcccacucaccagcuacagugcuacggggugagcccucgcagacuggcgucaauguguuauggaagugucacacucgaugugaugaggaucaaugagacccaucugaacaaucuuuucaaccgggucccagacacuuuuucccuguacaacuaugcauugccggauaauuucuacgguugccuccacgccuuuuaucugaacagcacagcucccuacgccguggcaaaucgauucccuauuaagccaggcgggcgccaaucuaacucagccuucauagacaccguuaucaaugcugcccauuauagucccuuuagcuacguguacggauuagcaguaauuacgcugaaaccugcggcuggcuccaagcuagucugcccaguggccaacgauaccguugugaucacagacagauguguccaguauaaucucuacgguuauacugggaccggcgugcugucuaagaacacaucgcuuguaauacccgauggaaaaguguucacugcaagcuccaccggcacaauuaucgggguuucaaucaauaguaccacuuacucuauuaugccgugcgucacggugccugugagcgucggauaucacccaaacuuugagagggccuugcuguucaauggucucuccuguucacagcggagccgcgcuguuacagaacccgugucugugcugugguccgccagugcaaccgcucaagacgccuuugacacuccuagcggcugcguagucaacguggagcuuagaaauaccacaaucguuaacaccugugcgaugcccauuggaaauucucugugcuucauaaacggguccaucgccacugcuaacgcagauucauugccaaggcuccagcuggugaauuacgacccuuuauaugauaacaguacagccacgcccaugaccccagucuacugggugaagguuccgacuaauuuuacacugagcgcuaccgaagaguacauucagacaacugccccuaaaaucaccaucgacugugcacguuaucuaugcggcgauucgucccggugucucaacgugcugcuucacuacgguacguucugcaaugacauuaacaaggcguugucucgaguaagcaccauacuggauucagcccuccugaguuuagucaaagagcuguccaucaauacaagagacgaagugacuaccuuuucuuucgauggggacuauaacuuuacaggccuuaugggauguuugggccccaauugcggggcuacuaccuacaggagcgccuucuccgaucuccuguaugacaaggugcgcauuacggauccaggauuuaugcagucauaccaaaagugcaucgacagccagugggguggcaguauucgggaccuacuguguacacagaccuauaacgggaucgcaguccugcccccuauaguuucuccagcuaugcaggcccucuacacuucccuuuuggugggagcaguagccagcucgggcuacacauucgguaucaccucagcuggggugauucccuucgcgacucaacugcaguuuagauuaaauggcaucggagucaccacacaggugcucguugagaaccagaaacugauugccucuaguuucaauaacgcacuugugaauauccaaaagggcuuuacggaaaccuccauagcucugagcaaaaugcaggaugucauuaaccagcaugccgcccaguugcacacucucgugguucaacuggggaacucuuucggagcuaucagcuccucaauuaaugagaucuuuaguaggcuagaaccuccggcagccaacgcggagguggaccgccugauaaauggccgaaugaugguccucaacacauauguaacccagcugcuuauccaggcuagcgaggccaaggcacaaaaugccuuggcugcacagaaaauuucugaaugcgugaaggcccagucccugcggaacgauuucugugguaaugggacacauguuuuaucaaucccacagcucgcgcccaacggagugcuguuuauucacuacgcuuauacuccuaccgaguacgccuucguccaaacgagugcaggccuuugccauaaugguacaggcuaugccccacgucaggggauguuugugcugcccaacaauaccaacauguggcacuucacuaccaugcaguuuuacaauccuguaaacaucagcgcuuccaauacacaggugcuaacuucuuguucggucaacuauaccagcguuaauuacacagugcucgaaccgucagugcccggagacuacgauuuccaaaaagaguucgacaaguuuuauaagaaccuguccacgauauucaacaauaccuuuaacccaaaugauuucaacuuuaguacugucgacgugacagcccagauuaaaucuuugcacgauguuguaaaucagcugaaccagagcuucaucgacuuaaagaaacucaauguguacgaaaagggcggguauaucccugaggcacccagagauggacaggcuuacgucaggaaagacggcgagugggugcugcuuuccaccuuuugaggacuagucccuguucccagagcccacuuuuuuuucuuuuuuugaaauaaaauagccugucuuucagaucucaaaggcucuuuucagagccaccaaaaaaaaaaaaaaaaaaaaaaaaaaaaaaaaaaaaaaaaaaaaaaaaaaaaaaaaaaaaaaaaaaaaaaaaaaaaaaaaaaaaaaaaaaaaaaaaaaaaa

SEQ ID NO: 15119 - RNA, 3755 nt, Artificial Sequence
  PDCoV/Swine/Thailand/S5011/2015__AMN91621.1 spike protein mRNA human (1-1160)
aggagagucccgcagucggcguccagcggcucugcuuguucgugugugugucguugcaggccuuauucaagcuuaccaugcagagagcccugcucaucaugacccuucugugcuuggcuagggcaaaguucgccgacgauuuacuggaccuacucacauuucccggcgcgcaccgguuccugcauaaaccuacucgcaacgauagcauucuuuacucccgagcuaauaacaauuuugacguggggguccugccaggauauccgacgaagaacguuaauuuguucucuccccucaccaacucaacacugccuauaaauggucugcaccguaguuaccaaccacucauguuaaacugucugacuaaaaucaccaaucagacacuuagcauguauuugcagcccuccgagauucagaccuacucuugcggcggggccauggugaaguaucaaacucaugaugcaguaagaaucauucuggaccuaaucgccacagauaggauaucgguggaagucgugggacaggcuggcgagaacuacguuuuuguguguucagaccaguucaauuauaccacggcacuccacaacagcaccuuuuucagucuuaauucccagcuguacugcuuuacuaacaauacauaccuggguaucuugccuccagaucucacugacuucaccgucuaucggacagggcaauuuuacgccaacggauaucuguuaggcacccugcccauuacggugaacuacguacgccucuauagaggccagcuuucugcuaauagcgcccauuucgcgcuggcaaacuugacugauacacuaaucacccugacuaauacaaccauuucccagaucacguacugugacaaaucaguuguggauaguauagccugccagaggagcucucaccaagucgaagacggguuuuauuccgacccuaagucagcugugcgggcccgccagcgaaccauugugacacucccaaagcugccggagcuugaagucguucagcugaacaucagcgcacacauggauuucggagaggcuagauuggacagugugacuauuaaugguaacaccucuuacuguguaacaaaacccuacuucaggcucgagacuaauuuucugugccggggcuguaccaugaacuuacguacagauaccugcuccuucgaccugagcgccgugaauaacgggaugucguuuucucaauucugucuauccacugaaucaggagcgugcgagaugaagaucaucgucacguauguguggaauuaccuccugcgccagagacuuuauguuacagccguggaaggccagacccauacugguaccacaaguguccacgcaaccgauacuagcuccgugauuacagacguaugcacggauuacaccauauaugggguuucuggaacuggcaucauuaaaccuagcgacuugcugcuccauaacggcaucgcuuuuacaucaccaaccggggagcuguacgccuucaagaauauaacaacuggaaaaacccuucaggugcugcccugugagacgccuagucaauugauugucaucaacaauaccguggucggugcuaucacauccagcaacucuacugaaaacaauagguuuaccacaacuauugugaccccaacguucuuuuauucaacaaacgccaccacucucaauugcacaaagcccguucugaguuacggcccgaucagcguguguuccgauggggcaauugccggaaccucuacuuuacagaacacccggccuucgauaguaagccuguacgacggcgagaucgaaauucccuccgcuuucucacuaaguguccagacagaguaucuccaggugcaagcggaacagguuaucguggauugcccacaguacgucuguaaugguaacucucgaugccugcagcuuuuggcacaauauacgagcgccuguuccaauaucgagguggcucugcacucaagcgcccagcucgacucucgcgagauuauauccauguuuaagaccaguacucagagccugcaguuagcaaacaucacaaauuucaaaggggacuacaacuuuucuuccauucugaccucaagaguaggcggaaggagugccaucgaagaucuuuuguucaauaaggugguuacaagcggccucgggacugucgaccaagauuauaaaucgugcucccggaacauggcuauugccgaccugguguguucucaguacuauaauggaaucauggugcuaccuggugucguugaugcagagaagauggcgauguacaccggcagccugacgggggcuaugguguucggaggccucacagccgcagccgcuauacccuuugccaccgcagugcaggcucgccugaacuacguagcccuucaaacuaaugucuugcaggaaaaccagaaaauccuggcggagucauucaaccaggccguggguaauauuaguuuagcucucuccucuguuaacgacgcaauccaacagaccagcgaagcccugaauacaguggcuauugccaucaagaaaauacagacugucgugaaccagcaaggggaggcacuuucccaccugaccgcgcaguugucaaauaacuuucaggccauuagcacaaguauccaggauauuuauaauagacucgaggaaguugaggcuaaccaacagguggacaggcugaucaauggccgucuagccgcacugaacgcuuacguaacgcagcuccugaaucaaaugucucagauacggcagucccgacuuuuggcccagcaaaagaucaacgaaugcgucaagagccagucgccaagauauggauucuguggcaaugggacccauaucuuuucacugacucagacagcacccaacggaauuuucuuuaugcacgccguguuagugccuaauaaauucaccagggucaacgcuucugcggguauuugcguugauaacacucgcggcuacagucuccagccacaacugauccuuuaucaguuuaauaacuccuggcgggugacaccgagaaauauguacgagcccaggcugccucgccaggccgacuucauacagcuaaccgauugcagcguaacguuuuauaacacuaccgcagcuaaucucccaaacauuauccccgacgugaucgaugucaaucaaacagugucugacauuaucgacaaccugccuaccgccacuccaccccagugggauguugggauuuacaauaacacaauauugaaucugaccguggaaaucaacgacuuacaggagcgaagcaagaaucucucccagauugccgaucggcugcaaaacuacaucgacaaucuuaacaauacacuggucgauuuggaguggcucaaccguguggaaacuuaucugaaauggccgugguacauuuggcuagcuaucgcacuggcccuuauagcguucguuaccauccucauuacgaucuuucuguguacaggaugcuguggcgguugcuucggguguugcggcggauguuucggcuuguuuucaaagaaaaagagauauaccgacgaucagccuacuccaaguuucaaguuuaaagaguggugaggacuagucccuguucccagagcccacuuuuuuuucuuuuuuugaaauaaaauagccugucuuucagaucucaaaggcucuuuucagagccaccaaaaaaaaaaaaaaaaaaaaaaaaaaaaaaaaaaaaaaaaaaaaaaaaaaaaaaaaaaaaaaaaaaaaaaaaaaaaaaaaaaaaaaaaaaaaaaaaaaaaa

SEQ ID NO: 15120 - RNA, 3755 nt, Artificial Sequence
  PDCoV/Swine/Thailand/S5011/2015__AMN91621.1 spike protein mRNA human (1-1160)(E855P_V856P)
aggagagucccgcagucggcguccagcggcucugcuuguucgugugugugucguugcaggccuuauucaagcuuaccaugcagagagcccugcucaucaugacccuucugugcuuggcuagggcaaaguucgccgacgauuuacuggaccuacucacauuucccggcgcgcaccgguuccugcauaaaccuacucgcaacgauagcauucuuuacucccgagcuaauaacaauuuugacguggggguccugccaggauauccgacgaagaacguuaauuuguucucuccccucaccaacucaacacugccuauaaauggucugcaccguaguuaccaaccacucauguuaaacugucugacuaaaaucaccaaucagacacuuagcauguauuugcagcccuccgagauucagaccuacucuugcggcggggccauggugaaguaucaaacucaugaugcaguaagaaucauucuggaccuaaucgccacagauaggauaucgguggaagucgugggacaggcuggcgagaacuacguuuuuguguguucagaccaguucaauuauaccacggcacuccacaacagcaccuuuuucagucuuaauucccagcuguacugcuuuacuaacaauacauaccuggguaucuugccuccagaucucacugacuucaccgucuaucggacagggcaauuuuacgccaacggauaucuguuaggcacccugcccauuacggugaacuacguacgccucuauagaggccagcuuucugcuaauagcgcccauuucgcgcuggcaaacuugacugauacacuaaucacccugacuaauacaaccauuucccagaucacguacugugacaaaucaguuguggauaguauagccugccagaggagcucucaccaagucgaagacggguuuuauuccgacccuaagucagcugugcgggcccgccagcgaaccauugugacacucccaaagcugccggagcuugaagucguucagcugaacaucagcgcacacauggauuucggagaggcuagauuggacagugugacuauuaaugguaacaccucuuacuguguaacaaaacccuacuucaggcucgagacuaauuuucugugccggggcuguaccaugaacuuacguacagauaccugcuccuucgaccugagcgccgugaauaacgggaugucguuuucucaauucugucuauccacugaaucaggagcgugcgagaugaagaucaucgucacguauguguggaauuaccuccugcgccagagacuuuauguuacagccguggaaggccagacccauacugguaccacaaguguccacgcaaccgauacuagcuccgugauuacagacguaugcacggauuacaccauauaugggguuucuggaacuggcaucauuaaaccuagcgacuugcugcuccauaacggcaucgcuuuuacaucaccaaccggggagcuguacgccuucaagaauauaacaacuggaaaaacccuucaggugcugcccugugagacgccuagucaauugauugucaucaacaauaccguggucggugcuaucacauccagcaacucuacugaaaacaauagguuuaccacaacuauugugaccccaacguucuuuuauucaacaaacgccaccacucucaauugcacaaagcccguucugaguuacggcccgaucagcguguguuccgauggggcaauugccggaaccucuacuuuacagaacacccggccuucgauaguaagccuguacgacggcgagaucgaaauucccuccgcuuucucacuaaguguccagacagaguaucuccaggugcaagcggaacagguuaucguggauugcccacaguacgucuguaaugguaacucucgaugccugcagcuuuuggcacaauauacgagcgccuguuccaauaucgagguggcucugcacucaagcgcccagcucgacucucgcgagauuauauccauguuuaagaccaguacucagagccugcaguuagcaaacaucacaaauuucaaaggggacuacaacuuuucuuccauucugaccucaagaguaggcggaaggagugccaucgaagaucuuuuguucaauaaggugguuacaagcggccucgggacugucgaccaagauuauaaaucgugcucccggaacauggcuauugccgaccugguguguucucaguacuauaauggaaucauggugcuaccuggugucguugaugcagagaagauggcgauguacaccggcagccugacgggggcuaugguguucggaggccucacagccgcagccgcuauacccuuugccaccgcagugcaggcucgccugaacuacguagcccuucaaacuaaugucuugcaggaaaaccagaaaauccuggcggagucauucaaccaggccguggguaauauuaguuuagcucucuccucuguuaacgacgcaauccaacagaccagcgaagcccugaauacaguggcuauugccaucaagaaaauacagacugucgugaaccagcaaggggaggcacuuucccaccugaccgcgcaguugucaaauaacuuucaggccauuagcacaaguauccaggauauuuauaauagacucgagccacccgaagcuaaccaacagguugacaggcugaucaauggccgucuagccgcacugaacgcuuacgugacgcagcuccugaaucaaaugucucagauacggcagucccgacuuuuggcccagcaaaagaucaacgagugcguaaagagccagucgccuagauauggauucuguggcaaugggacccauaucuuuucacugacucagacagcaccaaacggaauuuucuuuaugcacgccgucuuagugccgaauaaauucaccagggugaacgcuucugcggguauuugcgucgauaacacucgcggcuacagucuccagccccaacugauccuuuaucaguuuaauaacuccuggcggguuacaccuagaaauauguacgaaccaaggcugccccgccaggccgacuucauacagcuaaccgauugcagcgugacguuuuauaacacuaccgcagcuaaucucccuaacauuaucccagacguaaucgaugugaaucaaacagucucugacauuaucgacaaccugcccaccgccacuccgccucagugggauguggggauuuacaauaacacaauauugaaucugaccguugagaucaacgacuuacaggaacgaagcaagaaucucucccagauugccgaucggcugcaaaacuacaucgacaaucuuaacaauacacugguggauuuggaguggcucaaccgugucgagacuuaucugaaauggccaugguacauuuggcuagcuaucgcacuggcccuuauagcguucgugaccauccucauuacgaucuuucuguguacaggaugcuguggcgguugcuucggguguugcggcggauguuucggcuuguuuucaaagaaaaagagauauaccgacgaucagcccacuccuaguuucaaguuuaaagaauggugaggacuagucccuguucccagagcccacuuuuuuuucuuuuuuugaaauaaaauagccugucuuucagaucucaaaggcucuuuucagagccaccaaaaaaaaaaaaaaaaaaaaaaaaaaaaaaaaaaaaaaaaaaaaaaaaaaaaaaaaaaaaaaaaaaaaaaaaaaaaaaaaaaaaaaaaaaaaaaaaaaaaa

SEQ ID NO: 15121 - RNA, 3554 nt, Artificial Sequence
  PDCoV/Swine/Thailand/S5011/2015__AMN91621.1 spike protein mRNA human (variant)
aggagagucccgcagucggcguccagcggcucugcuuguucgugugugugucguugcaggccuuauucaagcuuaccaugcagagagcccugcucaucaugacccuucugugcuuggcuagggcaaaguucgccgacgauuuacuggaccuacucacauuucccggcgcgcaccgguuccugcauaaaccuacucgcaacgauagcauucuuuacucccgagcuaauaacaauuuugacguggggguccugccaggauauccgacgaagaacguuaauuuguucucuccccucaccaacucaacacugccuauaaauggucugcaccguaguuaccaaccacucauguuaaacugucugacuaaaaucaccaaucagacacuuagcauguauuugcagcccuccgagauucagaccuacucuugcggcggggccauggugaaguaucaaacucaugaugcaguaagaaucauucuggaccuaaucgccacagauaggauaucgguggaagucgugggacaggcuggcgagaacuacguuuuuguguguucagaccaguucaauuauaccacggcacuccacaacagcaccuuuuucagucuuaauucccagcuguacugcuuuacuaacaauacauaccuggguaucuugccuccagaucucacugacuucaccgucuaucggacagggcaauuuuacgccaacggauaucuguuaggcacccugcccauuacggugaacuacguacgccucuauagaggccagcuuucugcuaauagcgcccauuucgcgcuggcaaacuugacugauacacuaaucacccugacuaauacaaccauuucccagaucacguacugugacaaaucaguuguggauaguauagccugccagaggagcucucaccaagucgaagacggguuuuauuccgacccuaagucagcugugcgggcccgccagcgaaccauugugacacucccaaagcugccggagcuugaagucguucagcugaacaucagcgcacacauggauuucggagaggcuagauuggacagugugacuauuaaugguaacaccucuuacuguguaacaaaacccuacuucaggcucgagacuaauuuucugugccggggcuguaccaugaacuuacguacagauaccugcuccuucgaccugagcgccgugaauaacgggaugucguuuucucaauucugucuauccacugaaucaggagcgugcgagaugaagaucaucgucacguauguguggaauuaccuccugcgccagagacuuuauguuacagccguggaaggccagacccauacugguaccacaaguguccacgcaaccgauacuagcuccgugauuacagacguaugcacggauuacaccauauaugggguuucuggaacuggcaucauuaaaccuagcgacuugcugcuccauaacggcaucgcuuuuacaucaccaaccggggagcuguacgccuucaagaauauaacaacuggaaaaacccuucaggugcugcccugugagacgccuagucaauugauugucaucaacaauaccguggucggugcuaucacauccagcaacucuacugaaaacaauagguuuaccacaacuauugugaccccaacguucuuuuauucaacaaacgccaccacucucaauugcacaaagcccguucugaguuacggcccgaucagcguguguuccgauggggcaauugccggaaccucuacuuuacagaacacccggccuucgauaguaagccuguacgacggcgagaucgaaauucccuccgcuuucucacuaaguguccagacagaguaucuccaggugcaagcggaacagguuaucguggauugcccacaguacgucuguaaugguaacucucgaugccugcagcuuuuggcacaauauacgagcgccuguuccaauaucgagguggcucugcacucaagcgcccagcucgacucucgcgagauuauauccauguuuaagaccaguacucagagccugcaguuagcaaacaucacaaauuucaaaggggacuacaacuuuucuuccauucugaccucaagaguaggcggaaggagugccaucgaagaucuuuuguucaauaaggugguuacaagcggccucgggacugucgaccaagauuauaaaucgugcucccggaacauggcuauugccgaccugguguguucucaguacuauaauggaaucauggugcuaccuggugucguugaugcagagaagauggcgauguacaccggcagccugacgggggcuaugguguucggaggccucacagccgcagccgcuauacccuuugccaccgcagugcaggcucgccugaacuacguagcccuucaaacuaaugucuugcaggaaaaccagaaaauccuggcggagucauucaaccaggccguggguaauauuaguuuagcucucuccucuguuaacgacgcaauccaacagaccagcgaagcccugaauacaguggcuauugccaucaagaaaauacagacugucgugaaccagcaaggggaggcacuuucccaccugaccgcgcaguugucaaauaacuuucaggccauuagcacaaguauccaggauauuuauaauagacucgagccacccgaagcuaaccaacagguugacaggcugaucaauggccgucuagccgcacugaacgcuuacgugacgcagcuccugaaucaaaugucucagauacggcagucccgacuuuuggcccagcaaaagaucaacgagugcguaaagagccagucgccuagauauggauucuguggcaaugggacccauaucuuuucacugacucagacagcaccaaacggaauuuucuuuaugcacgccgucuuagugccgaauaaauucaccagggugaacgcuucugcggguauuugcgucgauaacacucgcggcuacagucuccagccccaacugauccuuuaucaguuuaauaacuccuggcggguuacaccuagaaauauguacgaaccaaggcugccccgccaggccgacuucauacagcuaaccgauugcagcgugacguuuuauaacacuaccgcagcuaaucucccuaacauuaucccagacguaaucgaugugaaucaaacagucucugacauuaucgacaaccugcccaccgccacuccgccucagugggauguggggauuuacaauaacacaauauugaaucugaccguugagaucaacgacuuacaggaacgaagcaagaaucucucccagauugccgaucggcugcaaaacuacaucgacaaucuuaacaauacacugguggauuuggaguggcucaaccgugucgagacuugaggacuagucccuguucccagagcccacuuuuuuuucuuuuuuugaaauaaaauagccugucuuucagaucucaaaggcucuuuucagagccaccaaaaaaaaaaaaaaaaaaaaaaaaaaaaaaaaaaaaaaaaaaaaaaaaaaaaaaaaaaaaaaaaaaaaaaaaaaaaaaaaaaaaaaaaaaaaaaaaaaaaa

SEQ ID NO: 15122 - RNA, 3635 nt, Artificial Sequence
  PDCoV/Swine/Thailand/S5011/2015__AMN91621.1 spike protein mRNA human (variant)
aggagagucccgcagucggcguccagcggcucugcuuguucgugugugugucguugcaggccuuauucaagcuuaccaugcagagagcccugcucaucaugacccuucugugcuuggcuagggcaaaguucgccgacgauuuacuggaccuacucacauuucccggcgcgcaccgguuccugcauaaaccuacucgcaacgauagcauucuuuacucccgagcuaauaacaauuuugacguggggguccugccaggauauccgacgaagaacguuaauuuguucucuccccucaccaacucaacacugccuauaaauggucugcaccguaguuaccaaccacucauguuaaacugucugacuaaaaucaccaaucagacacuuagcauguauuugcagcccuccgagauucagaccuacucuugcggcggggccauggugaaguaucaaacucaugaugcaguaagaaucauucuggaccuaaucgccacagauaggauaucgguggaagucgugggacaggcuggcgagaacuacguuuuuguguguucagaccaguucaauuauaccacggcacuccacaacagcaccuuuuucagucuuaauucccagcuguacugcuuuacuaacaauacauaccuggguaucuugccuccagaucucacugacuucaccgucuaucggacagggcaauuuuacgccaacggauaucuguuaggcacccugcccauuacggugaacuacguacgccucuauagaggccagcuuucugcuaauagcgcccauuucgcgcuggcaaacuugacugauacacuaaucacccugacuaauacaaccauuucccagaucacguacugugacaaaucaguuguggauaguauagccugccagaggagcucucaccaagucgaagacggguuuuauuccgacccuaagucagcugugcgggcccgccagcgaaccauugugacacucccaaagcugccggagcuugaagucguucagcugaacaucagcgcacacauggauuucggagaggcuagauuggacagugugacuauuaaugguaacaccucuuacuguguaacaaaacccuacuucaggcucgagacuaauuuucugugccggggcuguaccaugaacuuacguacagauaccugcuccuucgaccugagcgccgugaauaacgggaugucguuuucucaauucugucuauccacugaaucaggagcgugcgagaugaagaucaucgucacguauguguggaauuaccuccugcgccagagacuuuauguuacagccguggaaggccagacccauacugguaccacaaguguccacgcaaccgauacuagcuccgugauuacagacguaugcacggauuacaccauauaugggguuucuggaacuggcaucauuaaaccuagcgacuugcugcuccauaacggcaucgcuuuuacaucaccaaccggggagcuguacgccuucaagaauauaacaacuggaaaaacccuucaggugcugcccugugagacgccuagucaauugauugucaucaacaauaccguggucggugcuaucacauccagcaacucuacugaaaacaauagguuuaccacaacuauugugaccccaacguucuuuuauucaacaaacgccaccacucucaauugcacaaagcccguucugaguuacggcccgaucagcguguguuccgauggggcaauugccggaaccucuacuuuacagaacacccggccuucgauaguaagccuguacgacggcgagaucgaaauucccuccgcuuucucacuaaguguccagacagaguaucuccaggugcaagcggaacagguuaucguggauugcccacaguacgucuguaaugguaacucucgaugccugcagcuuuuggcacaauauacgagcgccuguuccaauaucgagguggcucugcacucaagcgcccagcucgacucucgcgagauuauauccauguuuaagaccaguacucagagccugcaguuagcaaacaucacaaauuucaaaggggacuacaacuuuucuuccauucugaccucaagaguaggcggaaggagugccaucgaagaucuuuuguucaauaaggugguuacaagcggccucgggacugucgaccaagauuauaaaucgugcucccggaacauggcuauugccgaccugguguguucucaguacuauaauggaaucauggugcuaccuggugucguugaugcagagaagauggcgauguacaccggcagccugacgggggcuaugguguucggaggccucacagccgcagccgcuauacccuuugccaccgcagugcaggcucgccugaacuacguagcccuucaaacuaaugucuugcaggaaaaccagaaaauccuggcggagucauucaaccaggccguggguaauauuaguuuagcucucuccucuguuaacgacgcaauccaacagaccagcgaagcccugaauacaguggcuauugccaucaagaaaauacagacugucgugaaccagcaaggggaggcacuuucccaccugaccgcgcaguugucaaauaacuuucaggccauuagcacaaguauccaggauauuuauaauagacucgagccacccgaagcuaaccaacagguugacaggcugaucaauggccgucuagccgcacugaacgcuuacgugacgcagcuccugaaucaaaugucucagauacggcagucccgacuuuuggcccagcaaaagaucaacgagugcguaaagagccagucgccuagauauggauucuguggcaaugggacccauaucuuuucacugacucagacagcaccaaacggaauuuucuuuaugcacgccgucuuagugccgaauaaauucaccagggugaacgcuucugcggguauuugcgucgauaacacucgcggcuacagucuccagccccaacugauccuuuaucaguuuaauaacuccuggcggguuacaccuagaaauauguacgaaccaaggcugccccgccaggccgacuucauacagcuaaccgauugcagcgugacguuuuauaacacuaccgcagcuaaucucccuaacauuaucccagacguaaucgaugugaaucaaacagucucugacauuaucgacaaccugcccaccgccacuccgccucagugggauguggggauuuacaauaacacaauauugaaucugaccguugagaucaacgacuuacaggaacgaagcaagaaucucucccagauugccgaucggcugcaaaacuacaucgacaaucuuaacaauacacugguggauuuggaguggcucaaccgugucgagacuggaggcuauauuccagaagcucccagagacggucaggcauacgugaggaaagauggggaguggguucugcuaucaaccuucugaggacuagucccuguucccagagcccacuuuuuuuucuuuuuuugaaauaaaauagccugucuuucagaucucaaaggcucuuuucagagccaccaaaaaaaaaaaaaaaaaaaaaaaaaaaaaaaaaaaaaaaaaaaaaaaaaaaaaaaaaaaaaaaaaaaaaaaaaaaaaaaaaaaaaaaaaaaaaaaaaaaaa

SEQ ID NO: 15123 - RNA, 4433 nt, Artificial Sequence
  PEDV/NPL-PEDv/2013/P10__AHZ94887.1 spike protein mRNA human (1-1386)
aggagagucccgcagucggcguccagcggcucugcuuguucgugugugugucguugcaggccuuauucaagcuuaccaugaaaagccugaccuacuucuggcucuuucuucccgugcuguccacauugucuuuaccucaggacgucacuagaugcucagccaacacgaauuucaggcgguuuuucaguaaauuuaacguucaagcuccagcagugguagugcugggcggguaucuaccgaucggagagaaucagggugucaacagcaccugguacugugccggccagcaccccacagcguccggggugcauggaauuuucguuucucacauacgcggcggucauggguuugaaaucggaauuucgcaggagccuuucgauccaucaggcuaucaacucuaccugcacaaggcuacuaauggcaacaccaaugccacagcacgacuucguaucugccaguuucccagcauuaaaacccuggggccuacugccaacaaugacgugacaaccggaagaaacuguuuguucaauaaggcuaucccagcacauaugagugaacacuccgucguggguauaacgugggauaacgacaggguaacuguguuuucugauaaaaucuauuacuucuauuuuaagaaugacuggagccggguugccaccaagugcuacaacuccggcgggugugcuaugcaguacgucuaugagcccacauacuauaugcucaaugugacuucagccggagaagauggcauuaguuaccagccuugcaccgcgaacuguaucgguuaugcagccaacguguucgcuacagagccaaaugggcacauuccggagggauucagcuuuaacaauugguuccugcugucuaacgacuccacccucguccauggcaaaguugugucaaaucaacccuuacugguaaacugccuuuuggccaucccuaagauauacggccuggggcaguuuuucagcuuuaaucagacgauugauggaguguguaacggugcagcuguccagcgcgccccagaagcgcuaagauucaauaucaacgacauuagugugauccucgccgagggcucuaucguucugcacacugcacuugggacaaauuuuuccuucgugugcagcaacucgucuaauccccaucuggcuaccuuugccauuccuuugggagcuacucaagucccauauuacuguuucuuuaaaguggauacauacaacuccaccguauauaaguuccucgccguucugcccccgacggugagggaaauagucaucaccaaauacggcgacguguaugucaaugguuuuggguacuuacaccugggccuccuugaugcagugacaauuaacuucacuggacacggcaccgacgacgauguuucaggguucuggacaaucgccaguacuaacuuuguggacgcucugauagagguacagggaaccgcgauucagcggaucuuguauugcgaugacccugucagccaacuaaagugcucccagguggcauucgaucuggacgaugguuuuuacacaaucucuagccgcaaucuccugucacaugagcagcccauuaguuucguuacccuuccauccuuuaacgaccacagcuucgugaauaucacugucucugccucauuuggcgggcauaguggagcuaaccugauugccagcgauacgacaauaaauggcuucuccucuuuuuguguggacacccgacaguucacuaucucguuguuuuauaacguaaccaauagcuacgguuacguguccaagucacaagauaguaacugcccuuucacacuccagucuguuaaugacuaucugagcuuuuccaaauucugugucucaaccagcuuacuggcaucugccugcacuauugaccuauucggguaccccgaauuuggcuccggagugaaguucacaagucucuauuuucaguucacgaaaggcgagcugaucaccgggacuccaaagccccuugaaggagugacagaugucagcuuuaugaccuuggacguuuguacaaaauacacuaucuaugguuucaagggcgaggggauuauaacccugacgaacucuuccuuucucgcuggaguguacuauaccucagauaguggccagcugcuugccuucaaaaaugugacaagcggugcaguauacucggucacuccuugcuccuuuucugaacaagcggcuuacguggacgaugacaucguuggggugauuagcucacugaguuccucuaccuucaacagcacaagagaguugccaggcuuuuucuaucacuccaaugauggaucaaacuguacugagccgguccucguguacagcaauaucggcguuugcaagagugggucuauuggauaugugcccucccagagcggccagguaaagaucgccccuaccgucacggguaacauaucgaucccaacaaacuucucaaugucuauuaggaccgaauaccugcaguuauauaauacucccgugaguguggacugugcaacauacgucugcaacggaaauucccgguguaaacaacugcuaacccaguauacugccgcuugcaagaccaucgagagcgcccuccagcugucugcacgucuugaaagcguugaggugaacuccauguugacaauuucagaugaagcucugcagcucgccacgaucaguagcuuuaauggggacggcuacaacuucaccaauguacugggugugucugucuacgauccugcgucccgcagagugguucaaaagaggucauuuauagaggacuuacuguucaacaagguggucacuaauggccuugggacaguggaugaggacuauaaacggugcaguaacggacgaagcguugccgacuuggugugugcucaguacuauuccggcgucaugguacucccaggggugguugaugcagaaaagcugcauauguacucugccucgcuaauuggaggcauggugcuggguggguuuaccagcgcugccgcacuccccuucucauaugcgguccaggcccgccugaauuaccuugcuuugcaaacagacgugcugcagagaaaccagcaguuacucgccgaguccuuuaauagugcaaucggaaacauuacuucugcuuucgaaagcguaaaggaggccaucucccaaaccucaaaaggccugaauacgguggcacacgcccuuacaaagguccaggaaguugugaacucucagggugcugcgcugacccaguugacugugcaacuccagcacaacuuucaggccauaagcaguuccaucgaugacauuuauagcaggcuggauauccuaucugcagacgcucaggucgaucggcugauuaccggccgccucucagcccugaaugccuucguggcucaaacacuuacuaaauacaccgagguucaggcauccagaaaguuggcccagcaaaaaguaaacgagugcgugaagagucagagccagagguacggguuuuguggaggcgacggggaacauaucuucucgcugguccaggcggcuccgcaaggauuacucuuucugcacacagugcuuguuccuucugauuucguggacgucauagccauugcaggccugugcgugaaugaugagaucgcccuaacgcuccgugaaccaggucugguauuguucacccaugagcugcagaaccacacugcuacagaguauuuugucuccagccggcgaauguucgaacccagaaagccuaccgugucagacuuuguucagaucgagaguuguguggucacuuacgugaauuuaacaagggaucagcuccccgacguuauuccagacuauaucgaugugaacaaaacccuguacgaaauucuugcaucucugccuaaucgcacggggcccuccuugccacucgacgucuucaacgccacuuaucugaaucuaaccggagagauagcggaucuggaacaacggagcgagucacuuagaaacacaaccgaggaacuccagagucugaucuacaauauuaacaauacuuugguggaccuggagugguuaaacaggguagaaacauauaucaaguggccgugguggguguggcucauuaucuuuauaguucugaucuucgucgugagccuucugguguuuugcuguauuuccaccggcugcugugguugcuguggcugcugcugugcuugcuucucuggguguugccgcggaccucgauugcagcccuacgaggucuuugaaaaaguacacgugcagugaggacuagucccuguucccagagcccacuuuuuuuucuuuuuuugaaauaaaauagccugucuuucagaucucaaaggcucuuuucagagccaccaaaaaaaaaaaaaaaaaaaaaaaaaaaaaaaaaaaaaaaaaaaaaaaaaaaaaaaaaaaaaaaaaaaaaaaaaaaaaaaaaaaaaaaaaaaaaaaaaaaaa

SEQ ID NO: 15124 - RNA, 4433 nt, Artificial Sequence
  PEDV/NPL-PEDv/2013/P10__AHZ94887.1 spike protein mRNA human (1-1386)(I1076P_L1077P)
aggagagucccgcagucggcguccagcggcucugcuuguucgugugugugucguugcaggccuuauucaagcuuaccaugaagucucugaccuacuucuggcucuuucuucccgugcuguccacauugucuuuaccucaggacgucacuagaugcucagccaacacgaauuucaggcgguuuuucaguaaauuuaacguucaagcuccagcagugguagugcugggcggguaucuaccgaucggagagaaucagggugucaacagcaccugguacugugccggccagcaccccacagcguccggggugcauggaauuuucguuucucacauacgcggcggucauggguuugaaaucggaauuucgcaggagccuuucgauccaucaggcuaucaacucuaccugcacaaggcuacuaauggcaacaccaaugccacagcacgacuucguaucugccaguuucccagcauuaaaacccuggggccuacugccaacaaugacgugacaaccggaagaaacuguuuguucaauaaggcuaucccagcacauaugagugaacacuccgucguggguauaacgugggauaacgacaggguaacuguuuuuagcgauaaaaucuauuacuucuauuuuaagaaugacuggagccggguggccaccaagugcuacaacuccggcgggugugcuaugcaguacgucuaugagcccacauacuauaugcucaaugugacuucagccggagaagauggcauuaguuaccagccuugcaccgcgaacuguaucgguuaugcagccaacguguucgcuacagagccaaaugggcacauuccggagggauucagcuuuaacaauugguuccugcugucuaacgacuccacccucguccauggcaaaguugugucaaaucaacccuuacugguaaacugccuuuuggccaucccuaagauauacggccuggggcaguuuuucagcuuuaaucagacgauugauggaguguguaacggugcagcuguccagcgcgccccagaagcgcuaagauucaauaucaacgacauuagugugauccucgccgagggcucuaucguucugcacacugcacuugggacaaauuuuuccuucgugugcagcaacucgucuaauccccaucuggcuaccuuugccauuccuuugggagcuacucaagucccauauuacuguuucuuuaaaguggauacauacaacuccaccguauauaaguuccucgccguucugcccccgacggugagggaaauagucaucaccaaauacggcgacguguaugucaaugguuuuggguacuuacaccugggccuccuugaugcagugacaauuaacuucacuggacacggcaccgacgacgauguuucaggguucuggacaaucgccaguacuaacuuuguggacgcucugauagagguacagggaaccgcgauucagcggaucuuguauugcgaugacccugucagccaacuaaagugcucccagguggcauucgaucuggacgaugguuuuuacacaaucucuagccgcaaucuccugucacaugagcagcccauuaguuucguuacccuuccauccuuuaacgaccacagcuucgugaauaucacugucucugccucauuuggcgggcauaguggagcuaaccugauugccagcgauacgacaauaaauggcuucuccucuuuuuguguggacacccgacaguucacuaucucguuguuuuauaacguaaccaauagcuacgguuacguguccaagucacaagauaguaacugcccuuucacacuccagucuguuaaugacuaucugagcuuuuccaaauucugugucucaaccagcuuacuggcaucugccugcacuauugaccuauucggguaccccgaauuuggcuccggagugaaguucacaagucucuauuuucaguucacgaaaggcgagcugaucaccgggacuccaaagccccuugaaggagugacagaugucagcuuuaugaccuuggacguuuguacaaaauacacuaucuaugguuucaagggcgaggggauuauaacccugacgaacucuuccuuucucgcuggaguguacuauaccucagauaguggccagcugcuugccuucaaaaaugugacaagcggugcaguauacucggucacuccuugcuccuuuucugaacaagcggcuuacguggacgaugacaucguuggggugauuagcucacugaguuccucuaccuucaacagcacaagagaguugccaggcuuuuucuaucacuccaaugauggaucaaacuguacugagccgguccucguguacagcaauaucggcguuugcaagagugggucuauuggauaugugcccucccagagcggccagguaaagaucgccccuaccgucacggguaacauaucgaucccaacaaacuucucaaugucuauuaggaccgaauaccugcaguuauauaauacucccgugaguguggacugugcaacauacgucugcaacggaaauucccgguguaaacaacugcuaacccaguauacugccgcuugcaagaccaucgagagcgcccuccagcugucugcacgucuugaaagcguugaggugaacuccauguugacaauuucagaugaagcucugcagcucgccacgaucaguagcuuuaauggggacggcuacaacuucaccaauguacugggugugucugucuacgauccugcgucccgcagagugguucaaaagaggucauuuauagaggacuuacuguucaacaagguggucacuaauggccuugggacaguggaugaggacuauaaacggugcaguaacggacgaagcguugccgacuuggugugugcucaguacuauuccggcgucaugguacucccaggggugguugaugcagaaaagcugcauauguacucugccucgcuaauuggaggcauggugcuggguggguuuaccagcgcugccgcacuccccuucucauaugcgguccaggcccgccugaauuaccuugcuuugcaaacagacgugcugcagagaaaccagcaguuacucgccgaguccuuuaauagugcaaucggaaacauuacuucugcuuucgaaagcguaaaggaggccaucucccaaaccucaaaaggccugaauacgguggcacacgcccuuacaaagguccaggaaguugugaacucucagggugcugcgcugacccaguugacugugcaacuccagcacaacuuucaggccauaagcaguuccaucgaugacauuuauagcaggcuggauccgccuucugcagacgcucaggucgaucggcuaaucaccggccgccugucagcccucaaugccuucguggcucaaacacugacuaaauacaccgagguucaggcauccagaaaacuugcccagcaaaaaguaaacgagugcgugaagagucagagccagagguacggguuuuguggaggcgacggggaacauauuuucucguugguccaggcggcuccacaaggacuguuauuucuccacacagugcugguucccucugauuucguggacgucaucgccauagcaggccuuugcgugaaugaugagauugcccugacgcuacgugaaccuggucucguacuguucacccaugaguugcagaaccacacugcuacagaguauuuugucuccagccggcgaauguucgaacccagaaagccaaccgugucagacuuuguucagaucgagaguuguguggucacuuacgugaaucugacaagggaucaguuaccugacguuauccccgacuauauugaugugaacaaaacccucuacgaaauccuggcaucucuuccaaaucgcacggggccgucccugccuuuggacgucuucaacgccacuuaucucaaucugaccggagagauugcggaucuagaacaacggagcgagucacugagaaacacaaccgaggaacuucagagucucauauacaauaucaacaauacucugguggacuuggaguggcugaacaggguagaaacauauauuaaguggcccuggugggugugguuaaucauuuuuaucguucucauauucgucgugagccugcuuguguuuugcuguaucuccaccggcugcugugguugcuguggcugcugcugugcuugcuucucuggguguugccgcggaccacgacugcagcccuacgaggucuuugaaaaaguacacgugcagugaggacuagucccuguucccagagcccacuuuuuuuucuuuuuuugaaauaaaauagccugucuuucagaucucaaaggcucuuuucagagccaccaaaaaaaaaaaaaaaaaaaaaaaaaaaaaaaaaaaaaaaaaaaaaaaaaaaaaaaaaaaaaaaaaaaaaaaaaaaaaaaaaaaaaaaaaaaaaaaaaaaaa

SEQ ID NO: 15125 - RNA, 4241 nt, Artificial Sequence
  PEDV/NPL-PEDv/2013/P10__AHZ94887.1 spike protein mRNA human (variant)
aggagagucccgcagucggcguccagcggcucugcuuguucgugugugugucguugcaggccuuauucaagcuuaccaugaagucucugaccuacuucuggcucuuucuucccgugcuguccacauugucuuuaccucaggacgucacuagaugcucagccaacacgaauuucaggcgguuuuucaguaaauuuaacguucaagcuccagcagugguagugcugggcggguaucuaccgaucggagagaaucagggugucaacagcaccugguacugugccggccagcaccccacagcguccggggugcauggaauuuucguuucucacauacgcggcggucauggguuugaaaucggaauuucgcaggagccuuucgauccaucaggcuaucaacucuaccugcacaaggcuacuaauggcaacaccaaugccacagcacgacuucguaucugccaguuucccagcauuaaaacccuggggccuacugccaacaaugacgugacaaccggaagaaacuguuuguucaauaaggcuaucccagcacauaugagugaacacuccgucguggguauaacgugggauaacgacaggguaacuguuuuuagcgauaaaaucuauuacuucuauuuuaagaaugacuggagccggguggccaccaagugcuacaacuccggcgggugugcuaugcaguacgucuaugagcccacauacuauaugcucaaugugacuucagccggagaagauggcauuaguuaccagccuugcaccgcgaacuguaucgguuaugcagccaacguguucgcuacagagccaaaugggcacauuccggagggauucagcuuuaacaauugguuccugcugucuaacgacuccacccucguccauggcaaaguugugucaaaucaacccuuacugguaaacugccuuuuggccaucccuaagauauacggccuggggcaguuuuucagcuuuaaucagacgauugauggaguguguaacggugcagcuguccagcgcgccccagaagcgcuaagauucaauaucaacgacauuagugugauccucgccgagggcucuaucguucugcacacugcacuugggacaaauuuuuccuucgugugcagcaacucgucuaauccccaucuggcuaccuuugccauuccuuugggagcuacucaagucccauauuacuguuucuuuaaaguggauacauacaacuccaccguauauaaguuccucgccguucugcccccgacggugagggaaauagucaucaccaaauacggcgacguguaugucaaugguuuuggguacuuacaccugggccuccuugaugcagugacaauuaacuucacuggacacggcaccgacgacgauguuucaggguucuggacaaucgccaguacuaacuuuguggacgcucugauagagguacagggaaccgcgauucagcggaucuuguauugcgaugacccugucagccaacuaaagugcucccagguggcauucgaucuggacgaugguuuuuacacaaucucuagccgcaaucuccugucacaugagcagcccauuaguuucguuacccuuccauccuuuaacgaccacagcuucgugaauaucacugucucugccucauuuggcgggcauaguggagcuaaccugauugccagcgauacgacaauaaauggcuucuccucuuuuuguguggacacccgacaguucacuaucucguuguuuuauaacguaaccaauagcuacgguuacguguccaagucacaagauaguaacugcccuuucacacuccagucuguuaaugacuaucugagcuuuuccaaauucugugucucaaccagcuuacuggcaucugccugcacuauugaccuauucggguaccccgaauuuggcuccggagugaaguucacaagucucuauuuucaguucacgaaaggcgagcugaucaccgggacuccaaagccccuugaaggagugacagaugucagcuuuaugaccuuggacguuuguacaaaauacacuaucuaugguuucaagggcgaggggauuauaacccugacgaacucuuccuuucucgcuggaguguacuauaccucagauaguggccagcugcuugccuucaaaaaugugacaagcggugcaguauacucggucacuccuugcuccuuuucugaacaagcggcuuacguggacgaugacaucguuggggugauuagcucacugaguuccucuaccuucaacagcacaagagaguugccaggcuuuuucuaucacuccaaugauggaucaaacuguacugagccgguccucguguacagcaauaucggcguuugcaagagugggucuauuggauaugugcccucccagagcggccagguaaagaucgccccuaccgucacggguaacauaucgaucccaacaaacuucucaaugucuauuaggaccgaauaccugcaguuauauaauacucccgugaguguggacugugcaacauacgucugcaacggaaauucccgguguaaacaacugcuaacccaguauacugccgcuugcaagaccaucgagagcgcccuccagcugucugcacgucuugaaagcguugaggugaacuccauguugacaauuucagaugaagcucugcagcucgccacgaucaguagcuuuaauggggacggcuacaacuucaccaauguacugggugugucugucuacgauccugcgucccgcagagugguucaaaagaggucauuuauagaggacuuacuguucaacaagguggucacuaauggccuugggacaguggaugaggacuauaaacggugcaguaacggacgaagcguugccgacuuggugugugcucaguacuauuccggcgucaugguacucccaggggugguugaugcagaaaagcugcauauguacucugccucgcuaauuggaggcauggugcuggguggguuuaccagcgcugccgcacuccccuucucauaugcgguccaggcccgccugaauuaccuugcuuugcaaacagacgugcugcagagaaaccagcaguuacucgccgaguccuuuaauagugcaaucggaaacauuacuucugcuuucgaaagcguaaaggaggccaucucccaaaccucaaaaggccugaauacgguggcacacgcccuuacaaagguccaggaaguugugaacucucagggugcugcgcugacccaguugacugugcaacuccagcacaacuuucaggccauaagcaguuccaucgaugacauuuauagcaggcuggauccgccuucugcagacgcucaggucgaucggcuaaucaccggccgccugucagcccucaaugccuucguggcucaaacacugacuaaauacaccgagguucaggcauccagaaaacuugcccagcaaaaaguaaacgagugcgugaagagucagagccagagguacggguuuuguggaggcgacggggaacauauuuucucguugguccaggcggcuccacaaggacuguuauuucuccacacagugcugguucccucugauuucguggacgucaucgccauagcaggccuuugcgugaaugaugagauugcccugacgcuacgugaaccuggucucguacuguucacccaugaguugcagaaccacacugcuacagaguauuuugucuccagccggcgaauguucgaacccagaaagccaaccgugucagacuuuguucagaucgagaguuguguggucacuuacgugaaucugacaagggaucaguuaccugacguuauccccgacuauauugaugugaacaaaacccucuacgaaauccuggcaucucuuccaaaucgcacggggccgucccugccuuuggacgucuucaacgccacuuaucucaaucugaccggagagauugcggaucuagaacaacggagcgagucacugagaaacacaaccgaggaacuucagagucucauauacaauaucaacaauacucugguggacuuggaguggcugaacaggguagaaacaugaggacuagucccuguucccagagcccacuuuuuuuucuuuuuuugaaauaaaauagccugucuuucagaucucaaaggcucuuuucagagccaccaaaaaaaaaaaaaaaaaaaaaaaaaaaaaaaaaaaaaaaaaaaaaaaaaaaaaaaaaaaaaaaaaaaaaaaaaaaaaaaaaaaaaaaaaaaaaaaaaaaaa

SEQ ID NO: 15126 - RNA, 4322 nt, Artificial Sequence
  PEDV/NPL-PEDv/2013/P10__AHZ94887.1 spike protein mRNA human (variant)
aggagagucccgcagucggcguccagcggcucugcuuguucgugugugugucguugcaggccuuauucaagcuuaccaugaagucucugaccuacuucuggcucuuucuucccgugcuguccacauugucuuuaccucaggacgucacuagaugcucagccaacacgaauuucaggcgguuuuucaguaaauuuaacguucaagcuccagcagugguagugcugggcggguaucuaccgaucggagagaaucagggugucaacagcaccugguacugugccggccagcaccccacagcguccggggugcauggaauuuucguuucucacauacgcggcggucauggguuugaaaucggaauuucgcaggagccuuucgauccaucaggcuaucaacucuaccugcacaaggcuacuaauggcaacaccaaugccacagcacgacuucguaucugccaguuucccagcauuaaaacccuggggccuacugccaacaaugacgugacaaccggaagaaacuguuuguucaauaaggcuaucccagcacauaugagugaacacuccgucguggguauaacgugggauaacgacaggguaacuguuuuuagcgauaaaaucuauuacuucuauuuuaagaaugacuggagccggguggccaccaagugcuacaacuccggcgggugugcuaugcaguacgucuaugagcccacauacuauaugcucaaugugacuucagccggagaagauggcauuaguuaccagccuugcaccgcgaacuguaucgguuaugcagccaacguguucgcuacagagccaaaugggcacauuccggagggauucagcuuuaacaauugguuccugcugucuaacgacuccacccucguccauggcaaaguugugucaaaucaacccuuacugguaaacugccuuuuggccaucccuaagauauacggccuggggcaguuuuucagcuuuaaucagacgauugauggaguguguaacggugcagcuguccagcgcgccccagaagcgcuaagauucaauaucaacgacauuagugugauccucgccgagggcucuaucguucugcacacugcacuugggacaaauuuuuccuucgugugcagcaacucgucuaauccccaucuggcuaccuuugccauuccuuugggagcuacucaagucccauauuacuguuucuuuaaaguggauacauacaacuccaccguauauaaguuccucgccguucugcccccgacggugagggaaauagucaucaccaaauacggcgacguguaugucaaugguuuuggguacuuacaccugggccuccuugaugcagugacaauuaacuucacuggacacggcaccgacgacgauguuucaggguucuggacaaucgccaguacuaacuuuguggacgcucugauagagguacagggaaccgcgauucagcggaucuuguauugcgaugacccugucagccaacuaaagugcucccagguggcauucgaucuggacgaugguuuuuacacaaucucuagccgcaaucuccugucacaugagcagcccauuaguuucguuacccuuccauccuuuaacgaccacagcuucgugaauaucacugucucugccucauuuggcgggcauaguggagcuaaccugauugccagcgauacgacaauaaauggcuucuccucuuuuuguguggacacccgacaguucacuaucucguuguuuuauaacguaaccaauagcuacgguuacguguccaagucacaagauaguaacugcccuuucacacuccagucuguuaaugacuaucugagcuuuuccaaauucugugucucaaccagcuuacuggcaucugccugcacuauugaccuauucggguaccccgaauuuggcuccggagugaaguucacaagucucuauuuucaguucacgaaaggcgagcugaucaccgggacuccaaagccccuugaaggagugacagaugucagcuuuaugaccuuggacguuuguacaaaauacacuaucuaugguuucaagggcgaggggauuauaacccugacgaacucuuccuuucucgcuggaguguacuauaccucagauaguggccagcugcuugccuucaaaaaugugacaagcggugcaguauacucggucacuccuugcuccuuuucugaacaagcggcuuacguggacgaugacaucguuggggugauuagcucacugaguuccucuaccuucaacagcacaagagaguugccaggcuuuuucuaucacuccaaugauggaucaaacuguacugagccgguccucguguacagcaauaucggcguuugcaagagugggucuauuggauaugugcccucccagagcggccagguaaagaucgccccuaccgucacggguaacauaucgaucccaacaaacuucucaaugucuauuaggaccgaauaccugcaguuauauaauacucccgugaguguggacugugcaacauacgucugcaacggaaauucccgguguaaacaacugcuaacccaguauacugccgcuugcaagaccaucgagagcgcccuccagcugucugcacgucuugaaagcguugaggugaacuccauguugacaauuucagaugaagcucugcagcucgccacgaucaguagcuuuaauggggacggcuacaacuucaccaauguacugggugugucugucuacgauccugcgucccgcagagugguucaaaagaggucauuuauagaggacuuacuguucaacaagguggucacuaauggccuugggacaguggaugaggacuauaaacggugcaguaacggacgaagcguugccgacuuggugugugcucaguacuauuccggcgucaugguacucccaggggugguugaugcagaaaagcugcauauguacucugccucgcuaauuggaggcauggugcuggguggguuuaccagcgcugccgcacuccccuucucauaugcgguccaggcccgccugaauuaccuugcuuugcaaacagacgugcugcagagaaaccagcaguuacucgccgaguccuuuaauagugcaaucggaaacauuacuucugcuuucgaaagcguaaaggaggccaucucccaaaccucaaaaggccugaauacgguggcacacgcccuuacaaagguccaggaaguugugaacucucagggugcugcgcugacccaguugacugugcaacuccagcacaacuuucaggccauaagcaguuccaucgaugacauuuauagcaggcuggauccgccuucugcagacgcucaggucgaucggcuaaucaccggccgccugucagcccucaaugccuucguggcucaaacacugacuaaauacaccgagguucaggcauccagaaaacuugcccagcaaaaaguaaacgagugcgugaagagucagagccagagguacggguuuuguggaggcgacggggaacauauuuucucguugguccaggcggcuccacaaggacuguuauuucuccacacagugcugguucccucugauuucguggacgucaucgccauagcaggccuuugcgugaaugaugagauugcccugacgcuacgugaaccuggucucguacuguucacccaugaguugcagaaccacacugcuacagaguauuuugucuccagccggcgaauguucgaacccagaaagccaaccgugucagacuuuguucagaucgagaguuguguggucacuuacgugaaucugacaagggaucaguuaccugacguuauccccgacuauauugaugugaacaaaacccucuacgaaauccuggcaucucuuccaaaucgcacggggccgucccugccuuuggacgucuucaacgccacuuaucucaaucugaccggagagauugcggaucuagaacaacggagcgagucacugagaaacacaaccgaggaacuucagagucucauauacaauaucaacaauacucugguggacuuggaguggcugaacaggguagaaacaggcgguuauauucccgaggcuccacgcgauggccaggccuacgugcgaaaggacggggaauggguuuuacucagcaccuuuugaggacuagucccuguucccagagcccacuuuuuuuucuuuuuuugaaauaaaauagccugucuuucagaucucaaaggcucuuuucagagccaccaaaaaaaaaaaaaaaaaaaaaaaaaaaaaaaaaaaaaaaaaaaaaaaaaaaaaaaaaaaaaaaaaaaaaaaaaaaaaaaaaaaaaaaaaaaaaaaaaaaaa

SEQ ID NO: 15127 - RNA, 4358 nt, Artificial Sequence
  MHV/S__BAK18575.1 spike protein mRNA human (1-1361)
aggagagucccgcagucggcguccagcggcucugcuuguucgugugugugucguugcaggccuuauucaagcuuaccaugcuuagcguguucauccucuuucuucccuccugccugggcuacauuggggacuucagauguauaaacuuggucaauaccgauacaucuaacgccucagcuccuaguguuagcacugaggugguagacguguccaagggaaucgguacguauuacgucuuagauaggguguaucugaaugcaacccuacuccugacaggcuacuauccaguugacgggucuaacuaccggaaucuugcccugacuggaaccaacacauugucgcucaauugguauaaaccgcccuuucugucagaauuuaacgauggcauuuuugcgaaggugaaaaaucugaaggcuagccucccuaaagacaguaccuccuacuucccaacuaucgucauugguucuaacuuugugacaaccagcuacacgguaguuuuagagcccuauaaugggaucauaauggccuccaucugccaguacacuauuugucugcuuccuuauaccgauugcaagccaaacacaggaggcaauaaguugaucggcuucuggcacauugaccugaaaucacccguguguauccuaaagcgcaacuuuacuuucaaugucaacgcagauuggcucuacuuucauuucuaucaacaagggggaaccuuuuacgccuauuacgcugacgcagguagugccacaaccuuccuguucagcucuuacauaggcgaugugcuuacgcaguauuuugugcugccuuucgucugcacuccaacaaccacugggguuuucuccccgcaguacugggugacacccuugguaaaacgacaguaucucuucaacuuuaaucagaagggaaccauuacgucagcuguggacugugccagcaguuacaccucugaaaucaaaugcaagacacaguccaugaacccuaauacuggcgucuaugaucugagcgguuacaccgugcagccaguuggguuaguguaucguagagucaggaaccugcccgacugucggauugaggacuggcucgcggcaaagacagugccuucgccacuuaauugggaacgcaaaacuuuccaaaacugcaauuuuaaccugucuuccuugcuaagacugguacaggccggaucacucaguuguagcaauaucgaugcugccaagguuuacggcaugugcuucggcuccaugucuaucgacaaauuugcaauucccaacagcaggcggguggaucugcagcuuggaaauucaggguuccugcagaguuuuaacuacaagauagacacccgcgcuacauccugccaauuguauuacagccucgcccagucuaaugucaccgugaacaaucacaacccgucaaguuggaaccgaagauaugguuucaaugaugucgcgacuuuuggcagggggaaacaugacguggccuacgcagaggcuuguuucacgguuggagccagcuauugcccuugugcuaaccccuccaucgugucuccaugcacaaccggcaagccuaaauucgccaauugucccacugguaccacaaaccgggagugcaauguacuggcauuagggucgaaccuguuuaagugugauugcaccuguaauccaagcccccuaacuacauacgaccuccguugccugcagggccgcuccaugcuuggagucggcgaucacugugaaggguugggagugcuggaggacaagugcgguggcucaaacacgugcaauuguagugccgaugcuuucguugggugggcgaaagacucuugccucagcaacggaagaugucauaucuuuuccaaucugaugcuuaacggcauuaauucagguaccacuugcagcacagaccugcaauugccuaacaccgaaguggucacagggauaugugugaaguaugaucucuacggcauuacuggacagggcguauucaaagaggugaaggcagacuacuauaauucuuggcagaaccuguuauacgauguuaacgggaaucugaacggauuuagggacaucgucaccaauaaaacguaucuaacccgguccugcuacaguggucgagugagcgccgcuuaucaccaggaugccccagagccggcacuccuguaccgcaaccuuaagugugacuauguguucaauaacaauaucuuuagagaagagacacccuugaacuacuucgauucuuaccugggcugcgucguuaaugccgacaacuccacugaacaagcuguggaugccugugaccucaggauggggucaggacugugcgugaauuauaguaccgcacaccgggcgcgcacaagcguaucgacuggcuacaaguuaaccacguuugagccuuucacagucuccauugugaacgauucuguugaaagcgugggugggcuguaugagaugcagaucccaaccaauuuuacuauugcuucacaucaggaguucauacagacaagagcccccaaagucaccaucgacugugcagccuuugugugcggcgauuacacuaccugcaggcaacagcuuguugaauauggaaguuucugugacaacauuaaugcuaucuugggcgaggugaacaaccucaucgacacaaugcagcugcagguagccuccgcacuaauucaaggggucacgcugucuagccgucucgcugauggaauauccggccagaucgacgauauuaauuucucaccucugcuugguugcuuggggagccaguguagugaaggaaccauggccgcgcagggccggucuacuguggaggaccuguuauuugauaaggugaaacucuccgacgucgguuucguugaagccuacaacaauugcacaggcgggcaagaggugcgagaucugcuuuguguacagagcuuuaacggaaucaaggugcugccacccgucuugucggagaaucaggugucaggcuauaccgcuggggcaacagccucuaguauguucccgccuugguccgcugccgcaggaguuccauuuagccucucugugcaauacagaauuaacggccugggugucacuaugaaugugcuaagcgaaaaccagaaaaugaucgcguccgccuucaauaacgcuauaggggccauccaggagggauuugacgcaaccaauucagcucuggccaagauucagaguguugugaacgcaaaugccgaagcucucaacaaucugcuuaaccaauugagcaauagguucggcgcgaucucugccucccugcaggagauuuuaucacgccucgaugcacuggaagcucaggcccagaucgaccggcuuauaaacgguagacugacggcccuaaacgcuuacgucaguaagcaacucagcgauaugacacugauuaaaguauccgcagcccaggcgaucgagaaggugaaugagugcguuaaaucucagucgcccaggauuaacuuuuguggcaaugggaaccacaucuugagccuggugcagaaugcuccuuauggauuauacuuccuccauuuuucauauguccccaccuccuucacuaccgccaacgugaguccaggccugugcauaucuggggaccgcggacuugcaccuaaggccggcuacuucguacaagaugacggugaauggaaauuuacagggagcaauuauuacuaucccgagccaaucacugacaagaacuccguggucaugucaucuugugcuguuaauuacaccaaggcaccggaaguguuccugaacacaagcauuaguaauuugccugauuuuaaagaggagcucgacaagugguucaaaaaccagacguccguggcccccgaucugagccuagacuuugaaaagcugaaugucaccuuccuugaucucucugacgagaugaaccgaauccaggaagcgauuaaaaagcugaaugagucauacaucaacuugaaagaaauaggaacuuaugagauguacgugaaguggccaugguauguuuggcuguuaauuggccucgcugguguagccgugugcguccugcuguuuuucaucuguugcugcacaggcuguggguccugcuguuuuaagaaaugcggaaacuguugcgaugaguacggcgggcaccaagacaguaucgugauucacaauaucagcucgcaugaagauugaggacuagucccuguucccagagcccacuuuuuuuucuuuuuuugaaauaaaauagccugucuuucagaucucaaaggcucuuuucagagccaccaaaaaaaaaaaaaaaaaaaaaaaaaaaaaaaaaaaaaaaaaaaaaaaaaaaaaaaaaaaaaaaaaaaaaaaaaaaaaaaaaaaaaaaaaaaaaaaaaaaaa

SEQ ID NO: 15128 - RNA, 4358 nt, Artificial Sequence
  MHV/S__BAK18575.1 spike protein mRNA human (1-1361)(A1073P_L1074P)
aggagagucccgcagucggcguccagcggcucugcuuguucgugugugugucguugcaggccuuauucaagcuuaccaugcugagcguguucauccucuuucuucccuccugccugggcuacauuggggacuucagauguauaaacuuggucaauaccgauacaucuaacgccucagcuccuaguguuagcacugaggugguagacguguccaagggaaucgguacguauuacgucuuagauaggguguaucugaaugcaacccuacuccugacaggcuacuauccaguugacgggucuaacuaccggaaucuugcccugacuggaaccaacacauugucgcucaauugguauaaaccgcccuuucugucagaauuuaacgauggcauuuuugcgaaggugaaaaaucugaaggcuagccucccuaaagacaguaccuccuacuucccaacuaucgucauugguucuaacuuugugacaaccagcuacacgguaguuuuagagcccuauaaugggaucauaauggccuccaucugccaguacacuauuugucugcuuccuuauaccgauugcaagccaaacacaggaggcaauaaguugaucggcuucuggcacauugaccugaaaucacccguguguauccuaaagcgcaacuuuacuuucaaugucaacgcagauuggcucuacuuucauuucuaucaacaagggggaaccuuuuacgccuauuacgcugacgcagguagugccacaaccuuccuguucagcucuuacauaggcgaugugcuuacgcaguauuuugugcugccuuucgucugcacuccaacaaccacugggguuuucuccccgcaguacugggugacacccuugguaaaacgacaguaucucuucaacuuuaaucagaagggaaccauuacgucagcuguggacugugccagcaguuacaccucugaaaucaaaugcaagacacaguccaugaacccuaauacuggcgucuaugaucugagcgguuacaccgugcagccaguuggguuaguguaucguagagucaggaaccugcccgacugucggauugaggacuggcucgcggcaaagacagugccuucgccacuuaauugggaacgcaaaacuuuccaaaacugcaauuuuaaccugucuuccuugcuaagacugguacaggccggaucacucaguuguagcaauaucgaugcugccaagguuuacggcaugugcuucggcuccaugucuaucgacaaauuugcaauucccaacagcaggcggguggaucugcagcuuggaaauucaggguuccugcagaguuuuaacuacaagauagacacccgcgcuacauccugccaauuguauuacagccucgcccagucuaaugucaccgugaacaaucacaacccgucaaguuggaaccgaagauaugguuucaaugaugucgcgacuuuuggcagggggaaacaugacguggccuacgcagaggcuuguuucacgguuggagccagcuauugcccuugugcuaaccccuccaucgugucuccaugcacaaccggcaagccuaaauucgccaauugucccacugguaccacaaaccgggagugcaauguacuggcauuagggucgaaccuguuuaagugugauugcaccuguaauccaagcccccuaacuacauacgaccuccguugccugcagggccgcuccaugcuuggagucggcgaucacugugaaggguugggagugcuggaggacaagugcgguggcucaaacacgugcaauuguagugccgaugcuuucguugggugggcgaaagacucuugccucagcaacggaagaugucauaucuuuuccaaucugaugcuuaacggcauuaauucagguaccacuugcagcacagaccugcaauugccuaacaccgaaguggucacagggauaugugugaaguaugaucucuacggcauuacuggacagggcguauucaaagaggugaaggcagacuacuauaauucuuggcagaaccuguuauacgauguuaacgggaaucugaacggauuuagggacaucgucaccaauaaaacguaucuaacccgguccugcuacaguggucgagugagcgccgcuuaucaccaggaugccccagagccggcacuccuguaccgcaaccuuaagugugacuauguguucaauaacaauaucuuuagagaagagacacccuugaacuacuucgauucuuaccugggcugcgucguuaaugccgacaacuccacugaacaagcuguggaugccugugaccucaggauggggucaggacugugcgugaauuauaguaccgcacaccgggcgcgcacaagcguaucgacuggcuacaaguuaaccacguuugagccuuucacagucuccauugugaacgauucuguugaaagcgugggugggcuguaugagaugcagaucccaaccaauuuuacuauugcuucacaucaggaguucauacagacaagagcccccaaagucaccaucgacugugcagccuuugugugcggcgauuacacuaccugcaggcaacagcuuguugaauauggaaguuucugugacaacauuaaugcuaucuugggcgaggugaacaaccucaucgacacaaugcagcugcagguagccuccgcacuaauucaaggggucacgcugucuagccgucucgcugauggaauauccggccagaucgacgauauuaauuucucaccucugcuugguugcuuggggagccaguguagugaaggaaccauggccgcgcagggccggucuacuguggaggaccuguuauuugauaaggugaaacucuccgacgucgguuucguugaagccuacaacaauugcacaggcgggcaagaggugcgagaucugcuuuguguacagagcuuuaacggaaucaaggugcugccacccgucuugucggagaaucaggugucaggcuauaccgcuggggcaacagccucuaguauguucccgccuugguccgcugccgcaggaguuccauuuagccucucugugcaauacagaauuaacggccugggugucacuaugaaugugcuaagcgaaaaccagaaaaugaucgcguccgccuucaauaacgcuauaggggccauccaggagggauuugacgcaaccaauucagcucuggccaagauucagaguguugugaacgcaaaugccgaagcucucaacaaucugcuuaaccaauugagcaauagguucggcgcgaucucugccucccugcaggagauuuuaucacgccucgaucccccugaagcacaggcucagaucgaccggcugauaaacgguagacuuacggcccugaacgccuacgucaguaagcaacuaagcgauaugacacucauuaaaguauccgcugcacaggccaucgagaaggugaaugagugcguuaaaucucagucgcccaggauuaacuuuuguggcaaugggaaccacauccugagcuuggugcagaaugcgccauauggacuguacuucuuacauuuuucauaugucccuaccuccuucacuaccgcuaacgugagucccggccucugcauaucuggggaccgcggacuggccccaaaggcaggcuacuucguacaagaugacggugaauggaaauuuacagggagcaauuauuacuauccggagccuaucacugacaagaacuccguggucaugucaucuugugccguuaauuacaccaaggcucccgaaguguuccuuaacacaagcauuaguaaucugccagauuuuaaagaggaguuggacaagugguucaaaaaccagacguccguggcacccgaucucagccuggacuuugaaaagcuaaaugucaccuuccuggaucuuucugacgagaugaaccgaauccaggaagccauuaaaaagcucaaugagucauacaucaaccugaaagaaauaggaacuuaugagauguacgugaaguggccuugguauguuugguugcugauuggcuuagcggguguagcugugugcguccuccuguuuuucaucuguugcugcacaggcuguggguccugcuguuuuaagaaaugcggaaacuguugcgaugaguacggcgggcaccaagacaguaucgugauucacaauaucagcucgcaugaagauugaggacuagucccuguucccagagcccacuuuuuuuucuuuuuuugaaauaaaauagccugucuuucagaucucaaaggcucuuuucagagccaccaaaaaaaaaaaaaaaaaaaaaaaaaaaaaaaaaaaaaaaaaaaaaaaaaaaaaaaaaaaaaaaaaaaaaaaaaaaaaaaaaaaaaaaaaaaaaaaaaaaaa

SEQ ID NO: 15129 - RNA, 4166 nt, Artificial Sequence
  MHV/S__BAK18575.1 spike protein mRNA human (variant)
aggagagucccgcagucggcguccagcggcucugcuuguucgugugugugucguugcaggccuuauucaagcuuaccaugcugagcguguucauccucuuucuucccuccugccugggcuacauuggggacuucagauguauaaacuuggucaauaccgauacaucuaacgccucagcuccuaguguuagcacugaggugguagacguguccaagggaaucgguacguauuacgucuuagauaggguguaucugaaugcaacccuacuccugacaggcuacuauccaguugacgggucuaacuaccggaaucuugcccugacuggaaccaacacauugucgcucaauugguauaaaccgcccuuucugucagaauuuaacgauggcauuuuugcgaaggugaaaaaucugaaggcuagccucccuaaagacaguaccuccuacuucccaacuaucgucauugguucuaacuuugugacaaccagcuacacgguaguuuuagagcccuauaaugggaucauaauggccuccaucugccaguacacuauuugucugcuuccuuauaccgauugcaagccaaacacaggaggcaauaaguugaucggcuucuggcacauugaccugaaaucacccguguguauccuaaagcgcaacuuuacuuucaaugucaacgcagauuggcucuacuuucauuucuaucaacaagggggaaccuuuuacgccuauuacgcugacgcagguagugccacaaccuuccuguucagcucuuacauaggcgaugugcuuacgcaguauuuugugcugccuuucgucugcacuccaacaaccacugggguuuucuccccgcaguacugggugacacccuugguaaaacgacaguaucucuucaacuuuaaucagaagggaaccauuacgucagcuguggacugugccagcaguuacaccucugaaaucaaaugcaagacacaguccaugaacccuaauacuggcgucuaugaucugagcgguuacaccgugcagccaguuggguuaguguaucguagagucaggaaccugcccgacugucggauugaggacuggcucgcggcaaagacagugccuucgccacuuaauugggaacgcaaaacuuuccaaaacugcaauuuuaaccugucuuccuugcuaagacugguacaggccggaucacucaguuguagcaauaucgaugcugccaagguuuacggcaugugcuucggcuccaugucuaucgacaaauuugcaauucccaacagcaggcggguggaucugcagcuuggaaauucaggguuccugcagaguuuuaacuacaagauagacacccgcgcuacauccugccaauuguauuacagccucgcccagucuaaugucaccgugaacaaucacaacccgucaaguuggaaccgaagauaugguuucaaugaugucgcgacuuuuggcagggggaaacaugacguggccuacgcagaggcuuguuucacgguuggagccagcuauugcccuugugcuaaccccuccaucgugucuccaugcacaaccggcaagccuaaauucgccaauugucccacugguaccacaaaccgggagugcaauguacuggcauuagggucgaaccuguuuaagugugauugcaccuguaauccaagcccccuaacuacauacgaccuccguugccugcagggccgcuccaugcuuggagucggcgaucacugugaaggguugggagugcuggaggacaagugcgguggcucaaacacgugcaauuguagugccgaugcuuucguugggugggcgaaagacucuugccucagcaacggaagaugucauaucuuuuccaaucugaugcuuaacggcauuaauucagguaccacuugcagcacagaccugcaauugccuaacaccgaaguggucacagggauaugugugaaguaugaucucuacggcauuacuggacagggcguauucaaagaggugaaggcagacuacuauaauucuuggcagaaccuguuauacgauguuaacgggaaucugaacggauuuagggacaucgucaccaauaaaacguaucuaacccgguccugcuacaguggucgagugagcgccgcuuaucaccaggaugccccagagccggcacuccuguaccgcaaccuuaagugugacuauguguucaauaacaauaucuuuagagaagagacacccuugaacuacuucgauucuuaccugggcugcgucguuaaugccgacaacuccacugaacaagcuguggaugccugugaccucaggauggggucaggacugugcgugaauuauaguaccgcacaccgggcgcgcacaagcguaucgacuggcuacaaguuaaccacguuugagccuuucacagucuccauugugaacgauucuguugaaagcgugggugggcuguaugagaugcagaucccaaccaauuuuacuauugcuucacaucaggaguucauacagacaagagcccccaaagucaccaucgacugugcagccuuugugugcggcgauuacacuaccugcaggcaacagcuuguugaauauggaaguuucugugacaacauuaaugcuaucuugggcgaggugaacaaccucaucgacacaaugcagcugcagguagccuccgcacuaauucaaggggucacgcugucuagccgucucgcugauggaauauccggccagaucgacgauauuaauuucucaccucugcuugguugcuuggggagccaguguagugaaggaaccauggccgcgcagggccggucuacuguggaggaccuguuauuugauaaggugaaacucuccgacgucgguuucguugaagccuacaacaauugcacaggcgggcaagaggugcgagaucugcuuuguguacagagcuuuaacggaaucaaggugcugccacccgucuugucggagaaucaggugucaggcuauaccgcuggggcaacagccucuaguauguucccgccuugguccgcugccgcaggaguuccauuuagccucucugugcaauacagaauuaacggccugggugucacuaugaaugugcuaagcgaaaaccagaaaaugaucgcguccgccuucaauaacgcuauaggggccauccaggagggauuugacgcaaccaauucagcucuggccaagauucagaguguugugaacgcaaaugccgaagcucucaacaaucugcuuaaccaauugagcaauagguucggcgcgaucucugccucccugcaggagauuuuaucacgccucgaucccccugaagcacaggcucagaucgaccggcugauaaacgguagacuuacggcccugaacgccuacgucaguaagcaacuaagcgauaugacacucauuaaaguauccgcugcacaggccaucgagaaggugaaugagugcguuaaaucucagucgcccaggauuaacuuuuguggcaaugggaaccacauccugagcuuggugcagaaugcgccauauggacuguacuucuuacauuuuucauaugucccuaccuccuucacuaccgcuaacgugagucccggccucugcauaucuggggaccgcggacuggccccaaaggcaggcuacuucguacaagaugacggugaauggaaauuuacagggagcaauuauuacuauccggagccuaucacugacaagaacuccguggucaugucaucuugugccguuaauuacaccaaggcucccgaaguguuccuuaacacaagcauuaguaaucugccagauuuuaaagaggaguuggacaagugguucaaaaaccagacguccguggcacccgaucucagccuggacuuugaaaagcuaaaugucaccuuccuggaucuuucugacgagaugaaccgaauccaggaagccauuaaaaagcucaaugagucauacaucaaccugaaagaaauaggaacuuaugagaugugaggacuagucccuguucccagagcccacuuuuuuuucuuuuuuugaaauaaaauagccugucuuucagaucucaaaggcucuuuucagagccaccaaaaaaaaaaaaaaaaaaaaaaaaaaaaaaaaaaaaaaaaaaaaaaaaaaaaaaaaaaaaaaaaaaaaaaaaaaaaaaaaaaaaaaaaaaaaaaaaaaaaa

SEQ ID NO: 15130 - RNA, 4247 nt, Artificial Sequence
  MHV/S__BAK18575.1 spike protein mRNA human (variant)
aggagagucccgcagucggcguccagcggcucugcuuguucgugugugugucguugcaggccuuauucaagcuuaccaugcugagcguguucauccucuuucuucccuccugccugggcuacauuggggacuucagauguauaaacuuggucaauaccgauacaucuaacgccucagcuccuaguguuagcacugaggugguagacguguccaagggaaucgguacguauuacgucuuagauaggguguaucugaaugcaacccuacuccugacaggcuacuauccaguugacgggucuaacuaccggaaucuugcccugacuggaaccaacacauugucgcucaauugguauaaaccgcccuuucugucagaauuuaacgauggcauuuuugcgaaggugaaaaaucugaaggcuagccucccuaaagacaguaccuccuacuucccaacuaucgucauugguucuaacuuugugacaaccagcuacacgguaguuuuagagcccuauaaugggaucauaauggccuccaucugccaguacacuauuugucugcuuccuuauaccgauugcaagccaaacacaggaggcaauaaguugaucggcuucuggcacauugaccugaaaucacccguguguauccuaaagcgcaacuuuacuuucaaugucaacgcagauuggcucuacuuucauuucuaucaacaagggggaaccuuuuacgccuauuacgcugacgcagguagugccacaaccuuccuguucagcucuuacauaggcgaugugcuuacgcaguauuuugugcugccuuucgucugcacuccaacaaccacugggguuuucuccccgcaguacugggugacacccuugguaaaacgacaauaucucuucaacuuuaaucagaagggaaccauuacgucagcuguggacugugccagcaguuacaccucugaaaucaaaugcaagacacaguccaugaacccuaauacuggcgucuaugaucugagcgguuacaccgugcagccaguuggguuaguguaucguagagucaggaaccugcccgacugucggauugaggacuggcucgcggcaaagacagugccuucgccacuuaauugggaacgcaaaacuuuccaaaacugcaauuuuaaccugucuuccuugcuaagacugguacaggccggaucacucaguuguagcaauaucgaugcugccaagguuuacggcaugugcuucggcuccaugucuaucgacaaauuugcaauucccaacagcaggcggguggaucugcagcuuggaaauucaggguuccugcagaguuuuaacuacaagauagacacccgcgcuacauccugccaauuguauuacagccucgcccagucuaaugucaccgugaacaaucacaacccgucaaguuggaaccgaagauaugguuucaaugaugucgcgacuuuuggcagggggaaacaugacguggccuacgcagaggcuuguuucacgguuggagccagcuauugcccuugugcuaaccccuccaucgugucuccaugcacaaccggcaagccuaaauucgccaauugucccacugguaccacaaaccgggagugcaauguacuggcauuagggucgaaccuguuuaagugugauugcaccuguaauccaagcccccuaacuacauacgaccuccguugccugcagggccgcuccaugcuuggagucggcgaucacugugaaggguugggagugcuggaggacaagugcgguggcucaaacacgugcaauuguagugccgaugcuuucguugggugggcgaaagacucuugccucagcaacggaagaugucauaucuuuuccaaucugaugcuuaacggcauuaauucagguaccacuugcagcacagaccugcaauugccuaacaccgaaguggucacagggauaugugugaaguaugaucucuacggcauuacuggacagggcguauucaaagaggugaaggcagacuacuauaauucuuggcagaaccuguuauacgauguuaacgggaaucugaacggauuuagggacaucgucaccaauaaaacguaucuaacccgguccugcuacaguggucgagugagcgccgcuuaucaccaggaugccccagagccggcacuccuguaccgcaaccuuaagugugacuauguguucaauaacaauaucuuuagagaagagacacccuugaacuacuucgauucuuaccugggcugcgucguuaaugccgacaacuccacugaacaagcuguggaugccugugaccucaggauggggucaggacugugcgugaauuauaguaccgcacaccgggcgcgcacaagcguaucgacuggcuacaaguuaaccacguuugagccuuucacagucuccauugugaacgauucuguugaaagcgugggugggcuguaugagaugcagaucccaaccaauuuuacuauugcuucacaucaggaguucauacagacaagagcccccaaagucaccaucgacugugcagccuuugugugcggcgauuacacuaccugcaggcaacagcuuguugaauauggaaguuucugugacaacauuaaugcuaucuugggcgaggugaacaaccucaucgacacaaugcagcugcagguagccuccgcacuaauucaaggggucacgcugucuagccgucucgcugauggaauauccggccagaucgacgauauuaauuucucaccucugcuugguugcuuggggagccaguguagugaaggaaccauggccgcgcagggccggucuacuguggaggaccuguuauuugauaaggugaaacucuccgacgucgguuucguugaagccuacaacaauugcacaggcgggcaagaggugcgagaucugcuuuguguacagagcuuuaacggaaucaaggugcugccacccgucuugucggagaaucaggugucaggcuauaccgcuggggcaacagccucuaguauguucccgccuugguccgcugccgcaggaguuccauuuagccucucugugcaauacagaauuaacggccugggugucacuaugaaugugcuaagcgaaaaccagaaaaugaucgcguccgccuucaauaacgcuauaggggccauccaggagggauuugacgcaaccaauucagcucuggccaagauucagaguguugugaacgcaaaugccgaagcucucaacaaucugcuuaaccaauugagcaauagguucggcgcgaucucugccucccugcaggagauuuuaucacgccucgaucccccugaagcacaggcucagaucgaccggcugauaaacgguagacuuacggcccugaacgccuacgucaguaagcaacuaagcgauaugacacucauuaaaguauccgcugcacaggccaucgagaaggugaaugagugcguuaaaucucagucgcccaggauuaacuuuuguggcaaugggaaccacauccugagcuuggugcagaaugcgccauauggacuguacuucuuacauuuuucauaugucccuaccuccuucacuaccgcuaacgugagucccggccucugcauaucuggggaccgcggacuggccccaaaggcaggcuacuucguacaagaugacggugaauggaaauuuacagggagcaauuauuacuauccggagccuaucacugacaagaacuccguggucaugucaucuugugccguuaauuacaccaaggcucccgaaguguuccuuaacacaagcauuaguaaucugccagauuuuaaagaggaguuggacaagugguucaaaaaccagacguccguggcacccgaucucagccuggacuuugaaaagcuaaaugucaccuuccuggaucuuucugacgagaugaaccgaauccaggaagccauuaaaaagcucaaugagucauacaucaaccugaaagaaauaggaacuuaugagaugggcgguuacauuccugaggcgccacgggauggccaggcuuaugugcguaaggacggggaauggguuuugcuguccacauuuugaggacuagucccuguucccagagcccacuuuuuuuucuuuuuuugaaauaaaauagccugucuuucagaucucaaaggcucuuuucagagccaccaaaaaaaaaaaaaaaaaaaaaaaaaaaaaaaaaaaaaaaaaaaaaaaaaaaaaaaaaaaaaaaaaaaaaaaaaaaaaaaaaaaaaaaaaaaaaaaaaaaaa

SEQ ID NO: 15131 - RNA, 3985 nt, Artificial Sequence
  SARS-CoV__P59594.1 spike protein mRNA gc (1-1255)
aggagaaagcuuaccauguucaucuuccugcuguuccugacccugaccagcggcuccgaccucgaccgcugcacgaccuucgacgacgugcaggcccccaacuacacccagcacaccagcuccaugcgcggggucuacuacccggacgagaucuuccggagcgacacgcuguaccugacccaggaccucuuccugcccuucuacuccaacgugaccggcuuccacaccaucaaccacacguucgggaaccccgugauccccuucaaggacggcaucuacuucgccgcgaccgagaaguccaacgucgugcggggguggguguucggcagcaccaugaacaacaagagccaguccgucaucaucaucaacaacagcaccaacguggugauccgcgccugcaacuucgagcugugcgacaacccguucuucgccgucuccaagcccaugggcacgcagacccacaccaugaucuucgacaacgccuucaacugcaccuucgaguacaucagcgacgccuucucccucgacgugagcgagaaguccgggaacuucaagcaccuccgggaguucguguucaagaacaaggacggcuuccuguacgucuacaagggguaccagcccaucgacguggugcgcgaccuccccagcggcuucaacacgcugaagccgaucuucaagcugccccucgggaucaacaucaccaacuuccgggcgauccugaccgccuucucccccgcccaggacaucuggggcaccagcgccgcggccuacuucgucggcuaccugaagcccacgaccuucaugcucaaguacgacgagaacgggaccaucaccgacgccguggacugcucccagaacccgcuggccgagcugaagugcagcgucaagagcuucgagaucgacaagggcaucuaccagacguccaacuuccgcguggugcccagcggggacgugguccgguuccccaacaucaccaaccucugccccuucggcgagguguucaacgccaccaaguucccguccguguacgcgugggagcgcaagaagaucagcaacugcgucgccgacuacuccgugcuguacaacagcaccuucuucuccacguucaagugcuacggcgucagcgccaccaagcugaacgaccucugcuucuccaacguguacgccgacagcuucguggucaagggggacgacgugcggcagaucgcccccggccagaccggggugaucgcggacuacaacuacaagcugcccgacgacuucaugggcugcguccuggccuggaacacccgcaacaucgacgccacguccaccgggaacuacaacuacaaguaccgguaccuccgccacggcaagcugcggcccuucgagcgcgacaucagcaacgugccguucucccccgacggcaagcccugcacgcccccggcccugaacugcuacuggccccucaacgacuacggguucuacaccaccaccggcaucggguaccagcccuaccggguggucgugcugagcuucgagcugcucaacgcccccgcgaccgugugcggcccgaagcuguccaccgaccugaucaagaaccagugcgucaacuucaacuucaacgggcucaccggcacgggcgugcugacccccagcuccaagcgcuuccagcccuuccagcaguucgggcgggacgugagcgacuucaccgacuccguccgcgacccgaagaccagcgagauccuggacaucagccccugcuccuucggcggggugagcgugaucacgcccggcaccaacgccuccagcgaggucgccgugcucuaccaggacgugaacugcaccgacgucuccaccgccauccacgccgaccagcugacgcccgcguggcggaucuacagcaccgggaacaacguguuccagacccaggccggcugccugaucggcgccgagcacguggacaccuccuacgagugcgacaucccgaucggggccggcaucugcgcgagcuaccacacggucucccuccugcgcagcaccucccagaaguccaucguggccuacaccaugagccugggggccgacagcuccaucgccuacagcaacaacaccaucgccauccccacgaacuucuccaucagcaucaccaccgaggugaugcccgucagcauggcgaagaccuccguggacugcaacauguacaucugcggcgacagcacggagugcgccaaccuccugcugcaguacggcuccuucugcacccagcugaaccgcgcccucagcgggaucgccgccgagcaggaccggaacacccgcgagguguucgcgcaggucaagcagauguacaagacccccacgcugaaguacuucggcggguucaacuucucccagauccugccggacccccucaagcccaccaagcggagcuucaucgaggaccugcuguucaacaaggugacccucgccgacgccggcuucaugaagcaguacggggagugccugggcgacaucaacgcccgcgaccugaucugcgcccagaaguucaacggccucaccgugcugcccccgcugcucacggacgacaugaucgcggccuacaccgccgcccuggucuccgggaccgcgaccgccggcuggacguucggggccggcgccgcccugcagauccccuucgcgaugcagauggccuaccgguucaacgggaucggcgugacccagaacgugcucuacgagaaccagaagcagaucgccaaccaguucaacaaggccaucagccagauccaggagucccugaccaccacgagcaccgcccugggcaagcuccaggacgucgugaaccagaacgcgcaggcccugaacacccuggugaagcagcucuccagcaacuucggggccaucuccagcguccugaacgacauccugucccgccucgacaagguggaggccgaggugcagaucgaccggcugaucaccggccgccugcagagccuccagaccuacgucacgcagcagcugauccgggccgcggagauccgcgccuccgccaaccuggccgcgaccaagaugagcgagugcgugcucgggcaguccaagcggguggacuucugcggcaagggguaccaccugaugagcuucccccaggccgcgccccacggcgucguguuccugcacgugaccuacgucccgagccaggagcgcaacuucaccacggcccccgccaucugccacgagggcaaggccuacuucccccgggaggggguguucguguucaacggcaccuccugguucaucacccagcgcaacuucuucagcccccagaucaucaccacggacaacaccuucgucuccgggaacugcgacguggucaucggcaucaucaacaacaccguguacgacccgcuccagcccgagcuggacagcuucaaggaggagcuggacaaguacuucaagaaccacaccucccccgacguggaccucggggacaucagcggcaucaacgccuccgucgugaacauccagaaggagaucgaccggcugaacgagguggccaagaaccugaacgagagccucaucgaccugcaggagcugggcaaguacgagcaguacaucaaguggcccugguacgucuggcucggguucaucgccggccugaucgccaucgugauggugacgauccugcucugcugcaugaccuccugcugcagcugccugaagggggcgugcuccugcggcagcugcugcaaguucgacgaggacgacuccgagccgguccugaagggcgugaagcuccacuacaccugaggacuaguuauaagacugacuagcccgaugggccucccaacgggcccuccuccccuccuugcaccgagauuaauaaaaaaaaaaaaaaaaaaaaaaaaaaaaaaaaaaaaaaaaaaaaaaaaaaaaaaaaaaaaaaaaugcaucccccccccccccccccccccccccccccccaaaggcucuuuucagagccaccagaauu

SEQ ID NO: 15132 - RNA, 3985 nt, Artificial Sequence
  SARS-CoV__P59594.1 spike protein mRNA gc (1-1255)(K968P_V969P)
aggagaaagcuuaccauguucaucuuccugcuguuccugacccugaccagcggcuccgaccucgaccgcugcacgaccuucgacgacgugcaggcccccaacuacacccagcacaccagcuccaugcgcggggucuacuacccggacgagaucuuccggagcgacacgcuguaccugacccaggaccucuuccugcccuucuacuccaacgugaccggcuuccacaccaucaaccacacguucgggaaccccgugauccccuucaaggacggcaucuacuucgccgcgaccgagaaguccaacgucgugcggggguggguguucggcagcaccaugaacaacaagagccaguccgucaucaucaucaacaacagcaccaacguggugauccgcgccugcaacuucgagcugugcgacaacccguucuucgccgucuccaagcccaugggcacgcagacccacaccaugaucuucgacaacgccuucaacugcaccuucgaguacaucagcgacgccuucucccucgacgugagcgagaaguccgggaacuucaagcaccuccgggaguucguguucaagaacaaggacggcuuccuguacgucuacaagggguaccagcccaucgacguggugcgcgaccuccccagcggcuucaacacgcugaagccgaucuucaagcugccccucgggaucaacaucaccaacuuccgggcgauccugaccgccuucucccccgcccaggacaucuggggcaccagcgccgcggccuacuucgucggcuaccugaagcccacgaccuucaugcucaaguacgacgagaacgggaccaucaccgacgccguggacugcucccagaacccgcuggccgagcugaagugcagcgucaagagcuucgagaucgacaagggcaucuaccagacguccaacuuccgcguggugcccagcggggacgugguccgguuccccaacaucaccaaccucugccccuucggcgagguguucaacgccaccaaguucccguccguguacgcgugggagcgcaagaagaucagcaacugcgucgccgacuacuccgugcuguacaacagcaccuucuucuccacguucaagugcuacggcgucagcgccaccaagcugaacgaccucugcuucuccaacguguacgccgacagcuucguggucaagggggacgacgugcggcagaucgcccccggccagaccggggugaucgcggacuacaacuacaagcugcccgacgacuucaugggcugcguccuggccuggaacacccgcaacaucgacgccacguccaccgggaacuacaacuacaaguaccgguaccuccgccacggcaagcugcggcccuucgagcgcgacaucagcaacgugccguucucccccgacggcaagcccugcacgcccccggcccugaacugcuacuggccccucaacgacuacggguucuacaccaccaccggcaucggguaccagcccuaccggguggucgugcugagcuucgagcugcucaacgcccccgcgaccgugugcggcccgaagcuguccaccgaccugaucaagaaccagugcgucaacuucaacuucaacgggcucaccggcacgggcgugcugacccccagcuccaagcgcuuccagcccuuccagcaguucgggcgggacgugagcgacuucaccgacuccguccgcgacccgaagaccagcgagauccuggacaucagccccugcuccuucggcggggugagcgugaucacgcccggcaccaacgccuccagcgaggucgccgugcucuaccaggacgugaacugcaccgacgucuccaccgccauccacgccgaccagcugacgcccgcguggcggaucuacagcaccgggaacaacguguuccagacccaggccggcugccugaucggcgccgagcacguggacaccuccuacgagugcgacaucccgaucggggccggcaucugcgcgagcuaccacacggucucccuccugcgcagcaccucccagaaguccaucguggccuacaccaugagccugggggccgacagcuccaucgccuacagcaacaacaccaucgccauccccacgaacuucuccaucagcaucaccaccgaggugaugcccgucagcauggcgaagaccuccguggacugcaacauguacaucugcggcgacagcacggagugcgccaaccuccugcugcaguacggcuccuucugcacccagcugaaccgcgcccucagcgggaucgccgccgagcaggaccggaacacccgcgagguguucgcgcaggucaagcagauguacaagacccccacgcugaaguacuucggcggguucaacuucucccagauccugccggacccccucaagcccaccaagcggagcuucaucgaggaccugcuguucaacaaggugacccucgccgacgccggcuucaugaagcaguacggggagugccugggcgacaucaacgcccgcgaccugaucugcgcccagaaguucaacggccucaccgugcugcccccgcugcucacggacgacaugaucgcggccuacaccgccgcccuggucuccgggaccgcgaccgccggcuggacguucggggccggcgccgcccugcagauccccuucgcgaugcagauggccuaccgguucaacgggaucggcgugacccagaacgugcucuacgagaaccagaagcagaucgccaaccaguucaacaaggccaucagccagauccaggagucccugaccaccacgagcaccgcccugggcaagcuccaggacgucgugaaccagaacgcgcaggcccugaacacccuggugaagcagcucuccagcaacuucggggccaucuccagcguccugaacgacauccugucccgccucgacccgcccgaggccgaggugcagaucgaccggcugaucaccggccgccugcagagccuccagaccuacgugacgcagcagcugauccgggccgcggagauccgcgccuccgccaaccuggccgcgaccaagaugagcgagugcguccucgggcaguccaagcggguggacuucugcggcaagggguaccaccugaugagcuucccccaggccgcgccccacggcguggucuuccugcacgugaccuacgugcccagccaggagcgcaacuucaccacggcccccgccaucugccacgagggcaaggccuacuucccgcgggagggggucuucguguucaacggcaccuccugguucaucacccagcgcaacuucuucagcccccagaucaucaccacggacaacaccuucguguccgggaacugcgacgucgugaucggcaucaucaacaacaccgucuacgacccccuccagcccgagcuggacagcuucaaggaggagcuggacaaguacuucaagaaccacaccuccccggacguggaccucggggacaucagcggcaucaacgccuccguggucaacauccagaaggagaucgaccggcugaacgagguggccaagaaccugaacgagagccucaucgaccugcaggagcugggcaaguacgagcaguacaucaaguggcccugguacguguggcucggguucaucgccggccugaucgccaucgucauggugacgauccugcucugcugcaugaccuccugcugcagcugccugaagggggcgugcuccugcggcagcugcugcaaguucgacgaggacgacuccgagcccgugcugaagggcgucaagcuccacuacaccugaggacuaguuauaagacugacuagcccgaugggccucccaacgggcccuccuccccuccuugcaccgagauuaauaaaaaaaaaaaaaaaaaaaaaaaaaaaaaaaaaaaaaaaaaaaaaaaaaaaaaaaaaaaaaaaaugcaucccccccccccccccccccccccccccccccaaaggcucuuuucagagccaccagaauu

SEQ ID NO: 15133 - RNA, 1798 nt, Artificial Sequence
  SARS-CoV__P59594.1 spike protein mRNA gc (1-17_747-1255)
aggagaaagcuuaccauguucaucuuccugcuguuccugacccugaccagcggcuccgaccucgaccgcgcccugagcgggaucgccgcggagcaggaccggaacacgcgcgagguguucgcccaggucaagcagauguacaagacccccacccugaaguacuucggcggguucaacuucucccagauccucccggacccccugaagcccaccaagcggagcuucaucgaggaccuccucuucaacaaggugacgcuggccgacgccggcuucaugaagcaguacggggagugccugggcgacaucaacgcccgcgaccucaucugcgcgcagaaguucaacggccugaccgugcugcccccgcuccugaccgacgacaugaucgccgccuacaccgccgcgcuggucuccgggacggccaccgccggcuggaccuucggggccggcgccgcgcuccagauccccuucgccaugcagauggccuaccgguucaacgggaucggcgugacccagaacgugcuguacgagaaccagaagcagaucgccaaccaguucaacaaggccaucagccagauccaggagucccugacgaccaccagcaccgcgcucggcaagcugcaggacgucgugaaccagaacgcccaggcccugaacacgcucgugaagcagcuguccagcaacuucggggccaucuccagcguccugaacgacauccucucccgccuggacaagguggaggccgaggugcagaucgaccggcugaucaccggccgccuccagagccugcagaccuacgucacccagcagcugauccgggcggccgagauccgcgccuccgccaaccucgccgcgacgaagaugagcgagugcgugcuggggcaguccaagcggguggacuucugcggcaagggcuaccaccugaugagcuucccccaggccgcgccccacggggucguguuccuccacgugaccuacgucccgucccaggagcgcaacuucaccaccgcccccgccaucugccacgagggcaaggccuacuucccccgggaggggguguucguguucaacggcacgagcugguucaucacccagcgcaacuucuucagcccccagaucaucaccaccgacaacacguucgucuccgggaacugcgacguggugaucggcaucaucaacaacaccgucuacgacccgcugcagcccgagcuggacagcuucaaggaggagcucgacaaguacuucaagaaccacaccucccccgacguggaccugggcgacaucagcgggaucaacgccuccgucgugaacauccagaaggagaucgaccggcugaacgagguggccaagaaccucaacgagagccugaucgaccugcaggagcucggcaaguacgagcaguacaucaaguggcccugguacgucuggcugggguucaucgccggccugaucgcgaucgugauggugaccauccugcucugcugcaugacguccugcugcagcugccugaagggggccugcuccugcggcagcugcugcaaguucgacgaggacgacuccgagccgguccugaagggcgugaagcuccacuacaccugaggacuaguuauaagacugacuagcccgaugggccucccaacgggcccuccuccccuccuugcaccgagauuaauaaaaaaaaaaaaaaaaaaaaaaaaaaaaaaaaaaaaaaaaaaaaaaaaaaaaaaaaaaaaaaaaugcaucccccccccccccccccccccccccccccccaaaggcucuuuucagagccaccagaauu

SEQ ID NO: 15134 - RNA, 3985 nt, Artificial Sequence
  SARS-CoV/Tor2__NP_828851.1 spike protein mRNA gc (1-1255)
aggagaaagcuuaccauguucaucuuccugcuguuccugacccugaccagcggcuccgaccucgaccgcugcacgaccuucgacgacgugcaggcccccaacuacacccagcacaccagcuccaugcgcggggucuacuacccggacgagaucuuccggagcgacacgcuguaccugacccaggaccucuuccugcccuucuacuccaacgugaccggcuuccacaccaucaaccacacguucgggaaccccgugauccccuucaaggacggcaucuacuucgccgcgaccgagaaguccaacgucgugcggggguggguguucggcuccaccaugaacaacaagagccaguccgucaucaucaucaacaacagcaccaacguggugauccgcgccugcaacuucgagcugugcgacaacccguucuucgccgucuccaagcccaugggcacgcagacccacaccaugaucuucgacaacgccuucaacugcaccuucgaguacaucagcgacgccuucucccucgacgugagcgagaaguccgggaacuucaagcaccuccgggaguucguguucaagaacaaggacggcuuccuguacgucuacaagggguaccagcccaucgacguggugcgcgaccuccccagcggcuucaacacgcugaagccgaucuucaagcugccccucgggaucaacaucaccaacuuccgggcgauccugaccgccuucucccccgcccaggacaucuggggcaccagcgccgcggccuacuucgucggcuaccugaagcccacgaccuucaugcucaaguacgacgagaacgggaccaucaccgacgccguggacugcucccagaacccgcuggccgagcugaagugcagcgucaagagcuucgagaucgacaagggcaucuaccagacguccaacuuccgcguggugcccagcggggacgugguccgguuccccaacaucaccaaccucugccccuucggcgagguguucaacgccaccaaguucccguccguguacgcgugggagcgcaagaagaucagcaacugcgucgccgacuacuccgugcuguacaacagcaccuucuucuccacguucaagugcuacggcgucagcgccaccaagcugaacgaccucugcuucuccaacguguacgccgacagcuucguggucaagggggacgacgugcggcagaucgcccccggccagaccggggugaucgcggacuacaacuacaagcugcccgacgacuucaugggcugcguccuggccuggaacacccgcaacaucgacgccacguccaccgggaacuacaacuacaaguaccgguaccuccgccacggcaagcugcggcccuucgagcgcgacaucagcaacgugccguucucccccgacggcaagcccugcacgcccccggcccugaacugcuacuggccccucaacgacuacggguucuacaccaccaccggcaucggguaccagcccuaccggguggucgugcugagcuucgagcugcucaacgcccccgcgaccgugugcggcccgaagcuguccaccgaccugaucaagaaccagugcgucaacuucaacuucaacgggcucaccggcacgggcgugcugacccccagcuccaagcgcuuccagcccuuccagcaguucgggcgggacgugagcgacuucaccgacuccguccgcgacccgaagaccagcgagauccuggacaucagccccugcgccuucggcgggguguccgugaucacgcccggcaccaacgccagcuccgaggucgccgugcucuaccaggacgugaacugcaccgacgucagcaccgccauccacgcggaccagcugacgcccgccuggcggaucuacuccaccgggaacaacguguuccagacccaggccggcugccugaucggcgccgagcacguggacaccagcuacgagugcgacaucccgaucggggcgggcaucugcgccuccuaccacacggucagccuccugcgcuccaccagccagaaguccaucguggccuacaccaugagccugggggccgacuccagcaucgccuacuccaacaacaccaucgcgauccccacgaacuucagcaucuccaucaccaccgaggugaugcccgucagcauggccaagaccagcguggacugcaacauguacaucugcggcgacuccacggagugcgccaaccuccugcugcaguacggcagcuucugcacccagcugaaccgcgcccucuccgggaucgccgcggagcaggaccggaacacccgcgagguguucgcccaggucaagcagauguacaagacccccacgcugaaguacuucggcggguucaacuucagccagauccugccggacccccucaagcccaccaagcgguccuucaucgaggaccugcuguucaacaaggugacccucgccgacgccggcuucaugaagcaguacggggagugccugggcgacaucaacgcccgcgaccugaucugcgcgcagaaguucaacggccucaccgugcugcccccgcugcucacggacgacaugaucgccgccuacaccgccgcgcuggucagcgggaccgccaccgccggcuggacguucggggccggcgccgcgcugcagauccccuucgccaugcagauggccuaccgguucaacgggaucggcgugacccagaacgugcucuacgagaaccagaagcagaucgccaaccaguucaacaaggccaucucccagauccaggagagccugaccaccacguccaccgcgcugggcaagcuccaggacgucgugaaccagaacgcccaggcccugaacacccuggugaagcagcucagcuccaacuucggggccaucagcuccguccugaacgacauccugagccgccucgacaagguggaggccgaggugcagaucgaccggcugaucaccggccgccugcagucccuccagaccuacgucacgcagcagcugauccgggcggccgagauccgcgccagcgccaaccuggcggccaccaagauguccgagugcgugcucgggcagagcaagcggguggacuucugcggcaagggguaccaccugauguccuucccccaggccgcgccccacggcgucguguuccugcacgugaccuacgucccgagccaggagcgcaacuucaccacggcccccgccaucugccacgagggcaaggccuacuucccccgggaggggguguucguguucaacggcaccagcugguucaucacccagcgcaacuucuucagcccccagaucaucaccacggacaacaccuucgucagcgggaacugcgacguggucaucggcaucaucaacaacaccguguacgacccgcuccagcccgagcuggacuccuucaaggaggagcuggacaaguacuucaagaaccacaccagccccgacguggaccucggggacaucuccggcaucaacgccagcgucgugaacauccagaaggagaucgaccggcugaacgagguggccaagaaccugaacgagucccucaucgaccugcaggagcugggcaaguacgagcaguacaucaaguggcccugguacgucuggcucggguucaucgccggccugaucgcgaucgugauggugacgauccugcucugcugcaugaccagcugcugcuccugccugaagggggccugcagcugcggcuccugcugcaaguucgacgaggacgacagcgagccgguccugaagggcgugaagcuccacuacaccugaggacuaguuauaagacugacuagcccgaugggccucccaacgggcccuccuccccuccuugcaccgagauuaauaaaaaaaaaaaaaaaaaaaaaaaaaaaaaaaaaaaaaaaaaaaaaaaaaaaaaaaaaaaaaaaaugcaucccccccccccccccccccccccccccccccaaaggcucuuuucagagccaccagaauu

SEQ ID NO: 15135 - RNA, 3985 nt, Artificial Sequence
  SARS-CoV/Tor2__NP_828851.1 spike protein mRNA gc (1-1255)(K968P_V969P)
aggagaaagcuuaccauguucaucuuccugcuguuccugacccugaccagcggcuccgaccucgaccgcugcacgaccuucgacgacgugcaggcccccaacuacacccagcacaccagcuccaugcgcggggucuacuacccggacgagaucuuccggagcgacacgcuguaccugacccaggaccucuuccugcccuucuacuccaacgugaccggcuuccacaccaucaaccacacguucgggaaccccgugauccccuucaaggacggcaucuacuucgccgcgaccgagaaguccaacgucgugcggggguggguguucggcuccaccaugaacaacaagagccaguccgucaucaucaucaacaacagcaccaacguggugauccgcgccugcaacuucgagcugugcgacaacccguucuucgccgucuccaagcccaugggcacgcagacccacaccaugaucuucgacaacgccuucaacugcaccuucgaguacaucagcgacgccuucucccucgacgugagcgagaaguccgggaacuucaagcaccuccgggaguucguguucaagaacaaggacggcuuccuguacgucuacaagggguaccagcccaucgacguggugcgcgaccuccccagcggcuucaacacgcugaagccgaucuucaagcugccccucgggaucaacaucaccaacuuccgggcgauccugaccgccuucucccccgcccaggacaucuggggcaccagcgccgcggccuacuucgucggcuaccugaagcccacgaccuucaugcucaaguacgacgagaacgggaccaucaccgacgccguggacugcucccagaacccgcuggccgagcugaagugcagcgucaagagcuucgagaucgacaagggcaucuaccagacguccaacuuccgcguggugcccagcggggacgugguccgguuccccaacaucaccaaccucugccccuucggcgagguguucaacgccaccaaguucccguccguguacgcgugggagcgcaagaagaucagcaacugcgucgccgacuacuccgugcuguacaacagcaccuucuucuccacguucaagugcuacggcgucagcgccaccaagcugaacgaccucugcuucuccaacguguacgccgacagcuucguggucaagggggacgacgugcggcagaucgcccccggccagaccggggugaucgcggacuacaacuacaagcugcccgacgacuucaugggcugcguccuggccuggaacacccgcaacaucgacgccacguccaccgggaacuacaacuacaaguaccgguaccuccgccacggcaagcugcggcccuucgagcgcgacaucagcaacgugccguucucccccgacggcaagcccugcacgcccccggcccugaacugcuacuggccccucaacgacuacggguucuacaccaccaccggcaucggguaccagcccuaccggguggucgugcugagcuucgagcugcucaacgcccccgcgaccgugugcggcccgaagcuguccaccgaccugaucaagaaccagugcgucaacuucaacuucaacgggcucaccggcacgggcgugcugacccccagcuccaagcgcuuccagcccuuccagcaguucgggcgggacgugagcgacuucaccgacuccguccgcgacccgaagaccagcgagauccuggacaucagccccugcgccuucggcgggguguccgugaucacgcccggcaccaacgccagcuccgaggucgccgugcucuaccaggacgugaacugcaccgacgucagcaccgccauccacgcggaccagcugacgcccgccuggcggaucuacuccaccgggaacaacguguuccagacccaggccggcugccugaucggcgccgagcacguggacaccagcuacgagugcgacaucccgaucggggcgggcaucugcgccuccuaccacacggucagccuccugcgcuccaccagccagaaguccaucguggccuacaccaugagccugggggccgacuccagcaucgccuacuccaacaacaccaucgcgauccccacgaacuucagcaucuccaucaccaccgaggugaugcccgucagcauggccaagaccagcguggacugcaacauguacaucugcggcgacuccacggagugcgccaaccuccugcugcaguacggcagcuucugcacccagcugaaccgcgcccucuccgggaucgccgcggagcaggaccggaacacccgcgagguguucgcccaggucaagcagauguacaagacccccacgcugaaguacuucggcggguucaacuucagccagauccugccggacccccucaagcccaccaagcgguccuucaucgaggaccugcuguucaacaaggugacccucgccgacgccggcuucaugaagcaguacggggagugccugggcgacaucaacgcccgcgaccugaucugcgcgcagaaguucaacggccucaccgugcugcccccgcugcucacggacgacaugaucgccgccuacaccgccgcgcuggucagcgggaccgccaccgccggcuggacguucggggccggcgccgcgcugcagauccccuucgccaugcagauggccuaccgguucaacgggaucggcgugacccagaacgugcucuacgagaaccagaagcagaucgccaaccaguucaacaaggccaucucccagauccaggagagccugaccaccacguccaccgcgcugggcaagcuccaggacgucgugaaccagaacgcccaggcccugaacacccuggugaagcagcucagcuccaacuucggggccaucagcuccguccugaacgacauccugagccgccucgacccgcccgaggccgaggugcagaucgaccggcugaucaccggccgccugcagucccuccagaccuacgugacgcagcagcugauccgggcggccgagauccgcgccagcgccaaccuggcggccaccaagauguccgagugcguccucgggcagagcaagcggguggacuucugcggcaagggguaccaccugauguccuucccccaggccgcgccccacggcguggucuuccugcacgugaccuacgugcccagccaggagcgcaacuucaccacggcccccgccaucugccacgagggcaaggccuacuucccgcgggagggggucuucguguucaacggcaccagcugguucaucacccagcgcaacuucuucagcccccagaucaucaccacggacaacaccuucgugagcgggaacugcgacgucgugaucggcaucaucaacaacaccgucuacgacccccuccagcccgagcuggacuccuucaaggaggagcuggacaaguacuucaagaaccacaccagcccggacguggaccucggggacaucuccggcaucaacgccagcguggucaacauccagaaggagaucgaccggcugaacgagguggccaagaaccugaacgagucccucaucgaccugcaggagcugggcaaguacgagcaguacaucaaguggcccugguacguguggcucggguucaucgccggccugaucgcgaucgucauggugacgauccugcucugcugcaugaccagcugcugcuccugccugaagggggccugcagcugcggcuccugcugcaaguucgacgaggacgacagcgagcccgugcugaagggcgucaagcuccacuacaccugaggacuaguuauaagacugacuagcccgaugggccucccaacgggcccuccuccccuccuugcaccgagauuaauaaaaaaaaaaaaaaaaaaaaaaaaaaaaaaaaaaaaaaaaaaaaaaaaaaaaaaaaaaaaaaaaugcaucccccccccccccccccccccccccccccccaaaggcucuuuucagagccaccagaauu

SEQ ID NO: 15136 - RNA, 3790 nt, Artificial Sequence
  SARS-CoV/Tor2__NP_828851.1 spike protein mRNA gc (variant)
aggagaaagcuuaccauguucaucuuccugcuguuccugacccugaccagcggcuccgaccucgaccgcugcacgaccuucgacgacgugcaggcccccaacuacacccagcacaccagcuccaugcgcggggucuacuacccggacgagaucuuccggagcgacacgcuguaccugacccaggaccucuuccugcccuucuacuccaacgugaccggcuuccacaccaucaaccacacguucgggaaccccgugauccccuucaaggacggcaucuacuucgccgcgaccgagaaguccaacgucgugcggggguggguguucggcuccaccaugaacaacaagagccaguccgucaucaucaucaacaacagcaccaacguggugauccgcgccugcaacuucgagcugugcgacaacccguucuucgccgucuccaagcccaugggcacgcagacccacaccaugaucuucgacaacgccuucaacugcaccuucgaguacaucagcgacgccuucucccucgacgugagcgagaaguccgggaacuucaagcaccuccgggaguucguguucaagaacaaggacggcuuccuguacgucuacaagggguaccagcccaucgacguggugcgcgaccuccccagcggcuucaacacgcugaagccgaucuucaagcugccccucgggaucaacaucaccaacuuccgggcgauccugaccgccuucucccccgcccaggacaucuggggcaccagcgccgcggccuacuucgucggcuaccugaagcccacgaccuucaugcucaaguacgacgagaacgggaccaucaccgacgccguggacugcucccagaacccgcuggccgagcugaagugcagcgucaagagcuucgagaucgacaagggcaucuaccagacguccaacuuccgcguggugcccagcggggacgugguccgguuccccaacaucaccaaccucugccccuucggcgagguguucaacgccaccaaguucccguccguguacgcgugggagcgcaagaagaucagcaacugcgucgccgacuacuccgugcuguacaacagcaccuucuucuccacguucaagugcuacggcgucagcgccaccaagcugaacgaccucugcuucuccaacguguacgccgacagcuucguggucaagggggacgacgugcggcagaucgcccccggccagaccggggugaucgcggacuacaacuacaagcugcccgacgacuucaugggcugcguccuggccuggaacacccgcaacaucgacgccacguccaccgggaacuacaacuacaaguaccgguaccuccgccacggcaagcugcggcccuucgagcgcgacaucagcaacgugccguucucccccgacggcaagcccugcacgcccccggcccugaacugcuacuggccccucaacgacuacggguucuacaccaccaccggcaucggguaccagcccuaccggguggucgugcugagcuucgagcugcucaacgcccccgcgaccgugugcggcccgaagcuguccaccgaccugaucaagaaccagugcgucaacuucaacuucaacgggcucaccggcacgggcgugcugacccccagcuccaagcgcuuccagcccuuccagcaguucgggcgggacgugagcgacuucaccgacuccguccgcgacccgaagaccagcgagauccuggacaucagccccugcgccuucggcgggguguccgugaucacgcccggcaccaacgccagcuccgaggucgccgugcucuaccaggacgugaacugcaccgacgucagcaccgccauccacgcggaccagcugacgcccgccuggcggaucuacuccaccgggaacaacguguuccagacccaggccggcugccugaucggcgccgagcacguggacaccagcuacgagugcgacaucccgaucggggcgggcaucugcgccuccuaccacacggucagccuccugcgcuccaccagccagaaguccaucguggccuacaccaugagccugggggccgacuccagcaucgccuacuccaacaacaccaucgcgauccccacgaacuucagcaucuccaucaccaccgaggugaugcccgucagcauggccaagaccagcguggacugcaacauguacaucugcggcgacuccacggagugcgccaaccuccugcugcaguacggcagcuucugcacccagcugaaccgcgcccucuccgggaucgccgcggagcaggaccggaacacccgcgagguguucgcccaggucaagcagauguacaagacccccacgcugaaguacuucggcggguucaacuucagccagauccugccggacccccucaagcccaccaagcgguccuucaucgaggaccugcuguucaacaaggugacccucgccgacgccggcuucaugaagcaguacggggagugccugggcgacaucaacgcccgcgaccugaucugcgcgcagaaguucaacggccucaccgugcugcccccgcugcucacggacgacaugaucgccgccuacaccgccgcgcuggucagcgggaccgccaccgccggcuggacguucggggccggcgccgcgcugcagauccccuucgccaugcagauggccuaccgguucaacgggaucggcgugacccagaacgugcucuacgagaaccagaagcagaucgccaaccaguucaacaaggccaucucccagauccaggagagccugaccaccacguccaccgcgcugggcaagcuccaggacgucgugaaccagaacgcccaggcccugaacacccuggugaagcagcucagcuccaacuucggggccaucagcuccguccugaacgacauccugagccgccucgacccgcccgaggccgaggugcagaucgaccggcugaucaccggccgccugcagucccuccagaccuacgugacgcagcagcugauccgggcggccgagauccgcgccagcgccaaccuggcggccaccaagauguccgagugcguccucgggcagagcaagcggguggacuucugcggcaagggguaccaccugauguccuucccccaggccgcgccccacggcguggucuuccugcacgugaccuacgugcccagccaggagcgcaacuucaccacggcccccgccaucugccacgagggcaaggccuacuucccgcgggagggggucuucguguucaacggcaccagcugguucaucacccagcgcaacuucuucagcccccagaucaucaccacggacaacaccuucgugagcgggaacugcgacgucgugaucggcaucaucaacaacaccgucuacgacccccuccagcccgagcuggacuccuucaaggaggagcuggacaaguacuucaagaaccacaccagcccggacguggaccucggggacaucuccggcaucaacgccagcguggucaacauccagaaggagaucgaccggcugaacgagguggccaagaaccugaacgagucccucaucgaccugcaggagcugggcaaguacgagcagugaggacuaguuauaagacugacuagcccgaugggccucccaacgggcccuccuccccuccuugcaccgagauuaauaaaaaaaaaaaaaaaaaaaaaaaaaaaaaaaaaaaaaaaaaaaaaaaaaaaaaaaaaaaaaaaaugcaucccccccccccccccccccccccccccccccaaaggcucuuuucagagccaccagaauu

SEQ ID NO: 15137 - RNA, 3871 nt, Artificial Sequence
  SARS-CoV/Tor2__NP_828851.1 spike protein mRNA gc (variant)
aggagaaagcuuaccauguucaucuuccugcuguuccugacccugaccagcggcuccgaccucgaccgcugcacgaccuucgacgacgugcaggcccccaacuacacccagcacaccagcuccaugcgcggggucuacuacccggacgagaucuuccggagcgacacgcuguaccugacccaggaccucuuccugcccuucuacuccaacgugaccggcuuccacaccaucaaccacacguucgggaaccccgugauccccuucaaggacggcaucuacuucgccgcgaccgagaaguccaacgucgugcggggguggguguucggcuccaccaugaacaacaagagccaguccgucaucaucaucaacaacagcaccaacguggugauccgcgccugcaacuucgagcugugcgacaacccguucuucgccgucuccaagcccaugggcacgcagacccacaccaugaucuucgacaacgccuucaacugcaccuucgaguacaucagcgacgccuucucccucgacgugagcgagaaguccgggaacuucaagcaccuccgggaguucguguucaagaacaaggacggcuuccuguacgucuacaagggguaccagcccaucgacguggugcgcgaccuccccagcggcuucaacacgcugaagccgaucuucaagcugccccucgggaucaacaucaccaacuuccgggcgauccugaccgccuucucccccgcccaggacaucuggggcaccagcgccgcggccuacuucgucggcuaccugaagcccacgaccuucaugcucaaguacgacgagaacgggaccaucaccgacgccguggacugcucccagaacccgcuggccgagcugaagugcagcgucaagagcuucgagaucgacaagggcaucuaccagacguccaacuuccgcguggugcccagcggggacgugguccgguuccccaacaucaccaaccucugccccuucggcgagguguucaacgccaccaaguucccguccguguacgcgugggagcgcaagaagaucagcaacugcgucgccgacuacuccgugcuguacaacagcaccuucuucuccacguucaagugcuacggcgucagcgccaccaagcugaacgaccucugcuucuccaacguguacgccgacagcuucguggucaagggggacgacgugcggcagaucgcccccggccagaccggggugaucgcggacuacaacuacaagcugcccgacgacuucaugggcugcguccuggccuggaacacccgcaacaucgacgccacguccaccgggaacuacaacuacaaguaccgguaccuccgccacggcaagcugcggcccuucgagcgcgacaucagcaacgugccguucucccccgacggcaagcccugcacgcccccggcccugaacugcuacuggccccucaacgacuacggguucuacaccaccaccggcaucggguaccagcccuaccggguggucgugcugagcuucgagcugcucaacgcccccgcgaccgugugcggcccgaagcuguccaccgaccugaucaagaaccagugcgucaacuucaacuucaacgggcucaccggcacgggcgugcugacccccagcuccaagcgcuuccagcccuuccagcaguucgggcgggacgugagcgacuucaccgacuccguccgcgacccgaagaccagcgagauccuggacaucagccccugcgccuucggcgggguguccgugaucacgcccggcaccaacgccagcuccgaggucgccgugcucuaccaggacgugaacugcaccgacgucagcaccgccauccacgcggaccagcugacgcccgccuggcggaucuacuccaccgggaacaacguguuccagacccaggccggcugccugaucggcgccgagcacguggacaccagcuacgagugcgacaucccgaucggggcgggcaucugcgccuccuaccacacggucagccuccugcgcuccaccagccagaaguccaucguggccuacaccaugagccugggggccgacuccagcaucgccuacuccaacaacaccaucgcgauccccacgaacuucagcaucuccaucaccaccgaggugaugcccgucagcauggccaagaccagcguggacugcaacauguacaucugcggcgacuccacggagugcgccaaccuccugcugcaguacggcagcuucugcacccagcugaaccgcgcccucuccgggaucgccgcggagcaggaccggaacacccgcgagguguucgcccaggucaagcagauguacaagacccccacgcugaaguacuucggcggguucaacuucagccagauccugccggacccccucaagcccaccaagcgguccuucaucgaggaccugcuguucaacaaggugacccucgccgacgccggcuucaugaagcaguacggggagugccugggcgacaucaacgcccgcgaccugaucugcgcgcagaaguucaacggccucaccgugcugcccccgcugcucacggacgacaugaucgccgccuacaccgccgcgcuggucagcgggaccgccaccgccggcuggacguucggggccggcgccgcgcugcagauccccuucgccaugcagauggccuaccgguucaacgggaucggcgugacccagaacgugcucuacgagaaccagaagcagaucgccaaccaguucaacaaggccaucucccagauccaggagagccugaccaccacguccaccgcgcugggcaagcuccaggacgucgugaaccagaacgcccaggcccugaacacccuggugaagcagcucagcuccaacuucggggccaucagcuccguccugaacgacauccugagccgccucgacccgcccgaggccgaggugcagaucgaccggcugaucaccggccgccugcagucccuccagaccuacgugacgcagcagcugauccgggcggccgagauccgcgccagcgccaaccuggcggccaccaagauguccgagugcguccucgggcagagcaagcggguggacuucugcggcaagggguaccaccugauguccuucccccaggccgcgccccacggcguggucuuccugcacgugaccuacgugcccagccaggagcgcaacuucaccacggcccccgccaucugccacgagggcaaggccuacuucccgcgggagggggucuucguguucaacggcaccagcugguucaucacccagcgcaacuucuucagcccccagaucaucaccacggacaacaccuucgugagcgggaacugcgacgucgugaucggcaucaucaacaacaccgucuacgacccccuccagcccgagcuggacuccuucaaggaggagcuggacaaguacuucaagaaccacaccagcccggacguggaccucggggacaucuccggcaucaacgccagcguggucaacauccagaaggagaucgaccggcugaacgagguggccaagaaccugaacgagucccucaucgaccugcaggagcugggcaaguacgagcagggcggguacauccccgaggcgccccgcgacgggcaggccuacgugcggaaggacggcgaguggguccuccugagcacguucugaggacuaguuauaagacugacuagcccgaugggccucccaacgggcccuccuccccuccuugcaccgagauuaauaaaaaaaaaaaaaaaaaaaaaaaaaaaaaaaaaaaaaaaaaaaaaaaaaaaaaaaaaaaaaaaaugcaucccccccccccccccccccccccccccccccaaaggcucuuuucagagccaccagaauu

SEQ ID NO: 15138 - RNA, 4279 nt, Artificial Sequence
  HCoV/OC43__P36334.1 spike protein mRNA gc (1-1353)
aggagaaagcuuaccauguuccugauccuccugaucagccugcccaccgccuucgccgugaucggcgaccucaagugcaccuccgacaacaucaacgacaaggacacggggccgccgcccaucagcaccgacaccgucgacgugaccaacggccuggggacguacuacgugcuggaccgcgucuaccucaacaccacccuguuccugaacggcuacuaccccaccuccgggagcacguaccggaacauggcgcucaagggcuccgugcugcugagccgccucugguucaagccgcccuuccuguccgacuucaucaacggcaucuucgccaaggugaagaacaccaaggucaucaaggaccgggugauguacagcgaguuccccgccaucaccaucggguccaccuucgugaacacgagcuacuccgucguggugcagccccgcaccaucaacagcacccaggacggcgacaacaagcugcaggggcuccuggaggucuccgugugccaguacaacaugugcgaguacccccagaccaucugccaccccaaccugggcaaccaccggaaggagcucuggcaccuggacacggggguggucagcugccuguacaagcgcaacuucaccuacgacgugaacgccgacuaccucuacuuccacuucuaccaggagggcggcaccuucuacgccuacuucaccgacacggggguggucaccaaguuccuguucaacguguaccugggcauggcgcucucccacuacuacgugaugccccugaccugcaacagcaagcugacccucgaguacugggucacgccccugaccucccggcaguaccugcucgccuucaaccaggacgggaucaucuucaacgccgaggacugcaugagcgacuucauguccgagaucaagugcaagacccagagcaucgccccgcccaccggcguguacgagcugaacggcuacacggugcagcccaucgcggacgucuaccgccggaagcccaaccugccgaacugcaacaucgaggccuggcucaacgacaagagcgugcccagcccccugaacugggagcgcaagaccuucuccaacugcaacuucaacauguccagccugauguccuucauccaggccgacagcuucacgugcaacaacaucgacgccgccaagaucuacgggaugugcuucuccagcaucaccaucgacaaguucgcgauccccaacggccggaaggucgaccuccagcuggggaaccugggcuaccuccaguccuucaacuaccgcaucgacaccaccgccaccagcugccagcuguacuacaaccugccggccgccaacguguccgugagccgguucaaccccuccaccuggaacaagcgcuucggguucaucgaggacagcgucuucaagccccggcccgccggcgugcucacgaaccacgacguggucuacgcgcagcacugcuucaaggccccgaagaacuucugccccugcaagcugaacggcuccugcguggggagcggccccgggaagaacaacggcaucgggaccugccccgccggcaccaacuaccugaccugcgacaaccucugcaccccggaccccaucacguucaccggcaccuacaagugcccccagaccaagucccugguggggaucggcgagcacugcagcgggcuggccgucaaguccgacuacugcggcgggaacagcugcacgugccgcccgcaggccuuccugggcuggagcgcggacuccugccuccagggcgacaagugcaacaucuucgccaacuucauccugcacgacgugaacagcgggcugaccugcuccaccgaccuccagaaggccaacaccgacaucauccugggcgugugcgucaacuacgaccuguacgggauccucggccagggcaucuucguggaggugaacgccacguacuacaacagcuggcagaaccugcuguacgacuccaacgggaaccucuacggcuuccgggacuacaucaucaaccgcaccuucaugauccggagcugcuacuccgggcgcgucagcgccgcguuccacgccaacuccagcgagcccgcccugcuguuccggaacaucaagugcaacuacguguucaacaacucccucacccgccagcugcagcccaucaacuacuucgacagcuaccugggcugcguggucaacgccuacaacuccaccgcgaucagcgugcagacgugcgaccucaccgugggguccggcuacugcgucgacuacagcaagaaccgccggucccgcggcgccaucaccaccggguaccgguucacgaacuucgagcccuucaccgugaacagcgugaacgacagccuggagccggucggcgggcuguacgagauccagauccccuccgaguucaccaucggcaacaugguggaguucauccagaccagcucccccaaggugacgaucgacugcgccgccuucgucugcggggacuacgccgcgugcaagagccagcucguggaguacggcuccuucugcgacaacaucaacgccauccugaccgaggugaacgagcugcucgacaccacccagcugcaggucgccaacagccugaugaacggcgugacgcucuccaccaagcugaaggacggggugaacuucaacgucgacgacaucaacuucagccccgugcugggcugccucggguccgagugcagcaaggccuccagccgcuccgccaucgaggaccugcuguucgacaaggugaagcucagcgacgucggcuucguggaggcguacaacaacugcaccgggggcgccgagauccgggaccugaucugcgugcaguccuacaagggcaucaagguccugccgccccuccugagcgagaaccagaucuccggguacacccuggccgccacgagcgccucccucuucccgcccuggaccgcggccgccggcgugcccuucuaccugaacgugcaguaccgcaucaacgggcugggcgucaccauggacgugcucagccagaaccagaagcugaucgccaacgcguucaacaacgcccuguacgccauccaggagggguucgacgccaccaacagcgcccucgugaagauccaggcggucgugaacgccaacgccgaggcccugaacaaccugcuccagcagcuguccaaccgguucggcgccaucagcgcgucccugcaggagauccucagccgccuggacgcccuggaggccgaggcccagaucgaccggcucaucaacggccgccugacggcccugaacgcguacgugucccagcagcucagcgacuccacccuggucaaguucagcgccgcccaggccauggagaaggugaacgagugcgugaagucccagagcucccggaucaacuucugcgggaacggcaaccacaucaucagccugguccagaacgcgcccuacgggcucuacuucauccacuucuccuacgugcccaccaaguacgucaccgcccgcgugagccccggccugugcaucgccggcgaccgggggaucgccccgaaguccggcuacuucgugaacgucaacaacacguggauguacaccgggagcggcuacuacuaccccgagcccaucaccgagaacaacgugguggucauguccacgugcgccgugaacuacaccaaggcgcccuacgugaugcugaacaccagcaucccgaaccuccccgacuucaaggaggagcuggaccagugguucaagaaccagaccuccgucgcccccgaccugagccucgacuacaucaacgugaccuuccuggaccuccagguggagaugaaccgccugcaggaggccaucaagguccugaaccagagcuacaucaaccugaaggacaucgggaccuacgaguacuacgugaaguggcccugguacguguggcuccugaucugccuggccggcgucgccaugcucgugcugcuguucuucaucugcugcugcacgggcugcgggaccuccugcuucaagaagugcggcgggugcugcgacgacuacaccggcuaccaggagcucgugaucaagaccagccacgacgacugaggacuaguuauaagacugacuagcccgaugggccucccaacgggcccuccuccccuccuugcaccgagauuaauaaaaaaaaaaaaaaaaaaaaaaaaaaaaaaaaaaaaaaaaaaaaaaaaaaaaaaaaaaaaaaaaugcaucccccccccccccccccccccccccccccccaaaggcucuuuucagagccaccagaauu

SEQ ID NO: 15139 - RNA, 4279 nt, Artificial Sequence
  HCoV/OC43__P36334.1 spike protein mRNA gc (1-1353)(A1070P_L1071P)
aggagaaagcuuaccauguuccugauccuccugaucagccugcccaccgccuucgccgugaucggcgaccucaagugcaccuccgacaacaucaacgacaaggacacggggccgccgcccaucagcaccgacaccgucgacgugaccaacggccuggggacguacuacgugcuggaccgcgucuaccucaacaccacccuguuccugaacggcuacuaccccaccuccgggagcacguaccggaacauggcgcucaagggcuccgugcugcugagccgccucugguucaagccgcccuuccuguccgacuucaucaacggcaucuucgccaaggugaagaacaccaaggucaucaaggaccgggugauguacagcgaguuccccgccaucaccaucggguccaccuucgugaacacgagcuacuccgucguggugcagccccgcaccaucaacagcacccaggacggcgacaacaagcugcaggggcuccuggaggucuccgugugccaguacaacaugugcgaguacccccagaccaucugccaccccaaccugggcaaccaccggaaggagcucuggcaccuggacacggggguggucagcugccuguacaagcgcaacuucaccuacgacgugaacgccgacuaccucuacuuccacuucuaccaggagggcggcaccuucuacgccuacuucaccgacacggggguggucaccaaguuccuguucaacguguaccugggcauggcgcucucccacuacuacgugaugccccugaccugcaacagcaagcugacccucgaguacugggucacgccccugaccucccggcaguaccugcucgccuucaaccaggacgggaucaucuucaacgccgaggacugcaugagcgacuucauguccgagaucaagugcaagacccagagcaucgccccgcccaccggcguguacgagcugaacggcuacacggugcagcccaucgcggacgucuaccgccggaagcccaaccugccgaacugcaacaucgaggccuggcucaacgacaagagcgugcccagcccccugaacugggagcgcaagaccuucuccaacugcaacuucaacauguccagccugauguccuucauccaggccgacagcuucacgugcaacaacaucgacgccgccaagaucuacgggaugugcuucuccagcaucaccaucgacaaguucgcgauccccaacggccggaaggucgaccuccagcuggggaaccugggcuaccuccaguccuucaacuaccgcaucgacaccaccgccaccagcugccagcuguacuacaaccugccggccgccaacguguccgugagccgguucaaccccuccaccuggaacaagcgcuucggguucaucgaggacagcgucuucaagccccggcccgccggcgugcucacgaaccacgacguggucuacgcgcagcacugcuucaaggccccgaagaacuucugccccugcaagcugaacggcuccugcguggggagcggccccgggaagaacaacggcaucgggaccugccccgccggcaccaacuaccugaccugcgacaaccucugcaccccggaccccaucacguucaccggcaccuacaagugcccccagaccaagucccugguggggaucggcgagcacugcagcgggcuggccgucaaguccgacuacugcggcgggaacagcugcacgugccgcccgcaggccuuccugggcuggagcgcggacuccugccuccagggcgacaagugcaacaucuucgccaacuucauccugcacgacgugaacagcgggcugaccugcuccaccgaccuccagaaggccaacaccgacaucauccugggcgugugcgucaacuacgaccuguacgggauccucggccagggcaucuucguggaggugaacgccacguacuacaacagcuggcagaaccugcuguacgacuccaacgggaaccucuacggcuuccgggacuacaucaucaaccgcaccuucaugauccggagcugcuacuccgggcgcgucagcgccgcguuccacgccaacuccagcgagcccgcccugcuguuccggaacaucaagugcaacuacguguucaacaacucccucacccgccagcugcagcccaucaacuacuucgacagcuaccugggcugcguggucaacgccuacaacuccaccgcgaucagcgugcagacgugcgaccucaccgugggguccggcuacugcgucgacuacagcaagaaccgccggucccgcggcgccaucaccaccggguaccgguucacgaacuucgagcccuucaccgugaacagcgugaacgacagccuggagccggucggcgggcuguacgagauccagauccccuccgaguucaccaucggcaacaugguggaguucauccagaccagcucccccaaggugacgaucgacugcgccgccuucgucugcggggacuacgccgcgugcaagagccagcucguggaguacggcuccuucugcgacaacaucaacgccauccugaccgaggugaacgagcugcucgacaccacccagcugcaggucgccaacagccugaugaacggcgugacgcucuccaccaagcugaaggacggggugaacuucaacgucgacgacaucaacuucagccccgugcugggcugccucggguccgagugcagcaaggccuccagccgcuccgccaucgaggaccugcuguucgacaaggugaagcucagcgacgucggcuucguggaggcguacaacaacugcaccgggggcgccgagauccgggaccugaucugcgugcaguccuacaagggcaucaagguccugccgccccuccugagcgagaaccagaucuccggguacacccuggccgccacgagcgccucccucuucccgcccuggaccgcggccgccggcgugcccuucuaccugaacgugcaguaccgcaucaacgggcugggcgucaccauggacgugcucagccagaaccagaagcugaucgccaacgcguucaacaacgcccuguacgccauccaggagggguucgacgccaccaacagcgcccucgugaagauccaggcggucgugaacgccaacgccgaggcccugaacaaccugcuccagcagcuguccaaccgguucggcgccaucagcgcgucccugcaggagauccucagccgccuggacccgcccgaggccgaggcccagaucgaccggcugaucaacggccgccucacggcccugaacgccuacgugucccagcagcugagcgacuccacccucgucaaguucagcgcggcccaggccauggagaaggugaacgagugcgugaagucccagagcucccggaucaacuucugcgggaacggcaaccacaucaucagccugguccagaacgcccccuacgggcuguacuucauccacuucuccuacgugcccaccaaguacgucaccgcgcgcgugagccccggccucugcaucgccggcgaccgggggaucgcccccaaguccggcuacuucgugaacgucaacaacacguggauguacaccgggagcggcuacuacuaccccgagccgaucaccgagaacaacgugguggucauguccacgugcgccgugaacuacaccaaggcccccuacgugaugcugaacaccagcauccccaaccugcccgacuucaaggaggagcucgaccagugguucaagaaccagaccuccgucgcgccggaccugagccuggacuacaucaacgugaccuuccucgaccuccagguggagaugaaccgccugcaggaggccaucaagguccugaaccagagcuacaucaaccugaaggacaucgggaccuacgaguacuacgugaaguggcccugguacguguggcugcucaucugccuggccggcgucgccaugcuggugcuccuguucuucaucugcugcugcacgggcugcgggaccuccugcuucaagaagugcggcgggugcugcgacgacuacaccggcuaccaggagcuggugaucaagaccagccacgacgacugaggacuaguuauaagacugacuagcccgaugggccucccaacgggcccuccuccccuccuugcaccgagauuaauaaaaaaaaaaaaaaaaaaaaaaaaaaaaaaaaaaaaaaaaaaaaaaaaaaaaaaaaaaaaaaaaugcaucccccccccccccccccccccccccccccccaaaggcucuuuucagagccaccagaauu

SEQ ID NO: 15140 - RNA, 4306 nt, Artificial Sequence
  HCoV/OC43/1783A_10__AIL49484.1 spike protein mRNA gc (1-1362)
aggagaaagcuuaccauguuccugauccuccugaucagccugcccaccgccuucgccgugaucggcgaccucaagugcccgcuggacucccgcaccgggagccugaacaacaucgacacgggcccgcccuccaucagcaccgcgaccgucgacgugaccaacgggcucggcacguacuacgugcuggaccgggucuaccugaacaccacccucuuccugaacggguacuaccccaccuccggcagcacguaccgcaacauggcccugaagggcaccgacaagcucuccacccugugguucaagccgcccuuccugagcgacuucaucaacgggaucuucgccaaggugaagaacaccaagguguucaaggacggcgucauguacuccgaguuccccgccaucacgaucgggagcaccuucgugaacaccuccuacagcguggucgugcagccccggaccaucaacuccacgcaggacggcgugaacaagcuccaggggcugcuggaggucagcgugugccaguacaacaugugcgaguacccccacaccaucugccaccccaagcucggcaaccacuucaaggagcuguggcacauggacaccggcguggucuccugccuguacaagcgcaacuucaccuacgacgugaacgccacguaccucuacuuccacuucuaccaggagggcggcaccuucuacgcguacuucaccgacaccgggguggucacgaaguuccuguucaacguguaccugggcauggcccucagccacuacuacgugaugccccugaccugcaucucccggcgcgacaucggcuucacccuggaguacugggucacgccccucaccagccggcaguaccugcuggccuucaaccaggacgggaucaucuucaacgccguggacugcauguccgacuucaugagcgagaucaagugcaagacccagagcaucgcgccgcccaccggcguguacgagcucaacggguacaccguccagcccaucgccgacguguaccgccggaagcccgaccugccgaacugcaacaucgaggccuggcugaacgacaaguccguccccagcccccucaacugggagcgcaagacguucuccaacugcaacuucaacaugagcucccugaugagcuucauccaggccgacuccuucacgugcaacaacaucgacgccgcgaagaucuacggcaugugcuucagcuccaucaccaucgacaaguucgccauccccaacgggcggaagguggaccugcagcucggcaaccugggcuaccugcagagcuucaacuaccgcaucgacaccaccgccaccuccugccagcucuacuacaaccugccggccgccaacgugagcgucucccgguucaaccccagcaccuggaacaagcgcuucggguucaucgagaacuccguguucaagccccagcccgcgggcgugcugaccaaccacgacgucguguacgcccagcacugcuucaaggccccgaagaacuucugccccugcaagcucaacagcucccugugcguggggagcggccccgggaagaacaacggcaucgggaccugccccgccgggacgaacuaccugaccugccacaaccucugcaacccggaccccaucaccuucaccggccccuacaagugcccgcagacgaagucccuggucgggaucggcgagcacugcagcgggcuggccgucaagagcgacuacugcggcggcaaccccugcacgugccagccccaggcguuccuggggugguccgccgacagcugccuccagggcgacaagugcaacaucuucgccaaccugauccugcacgacgugaacuccgggcugaccugcagcaccgaccugcagaaggccaacaccgacaucaagcugggcgugugcgugaacuacgaccucuacggcaucuccgggcagggcaucuucguggaggucaacgccaccuacuacaacagcuggcagaaccugcuguacgacuccaacgggaaccucuacggcuuccgggacuacaucaccaaccgcaccuucaugauccggagcugcuacuccgggcgcgugagcgcggccuuccacgccaacuccagcgagcccgcccugcuguuccggaacaucaagugcaacuacguguucaacaacucccucauccgccagcugcagccgaucaacuacuucgacagcuaccugggcugcgucgugaacgcguacaacuccacggccaucagcgugcagaccugcgaccucaccgucggcuccggguacugcguggacuacagcaagaaccggcgcagccgccgggccaucaccacgggcuaccgcuucaccaacuucgagcccuucaccgugaacuccgucaacgacagccuggagcccgucgggggccuguacgagauccagauccccuccgaguucaccaucgggaacauggaggaguucauccagacgagcuccccgaaggugaccaucgacugcgccgccuucgugugcggcgacuacgcggccugcaagagccagcucguggaguacggcuccuucugcgacaacaucaacgccauccugaccgaggugaacgagcugcucgacaccacgcagcugcaggucgccaacagccugaugaacggggugacccucuccaccaagcugaaggacggcgugaacuucaacgucgacgacaucaacuucagcuccgugcuggggugccucggcagcgagugcuccaaggccagcucccggagcgcgaucgaggaccugcuguucgacaaggugaagcucuccgacgucggguucguggccgccuacaacaacugcaccggcggcgccgagauccgcgaccugaucugcgugcagagcuacaaggggaucaagguccugccgccccuccuguccgagaaccagaucagcggcuacacgcuggccgcgaccagcgccucccucuucccgcccuggaccgccgccgcgggggugcccuucuaccugaacgugcaguaccggaucaacggccugggggucaccauggacgugcucagccagaaccagaagcugaucgccaacgccuucaacaacgcccuggacgccauccaggagggcuucgacgcgacgaacuccgcccucgugaagauccaggccgucgugaacgccaacgccgaggcgcugaacaaccugcuccagcagcugagcaaccgcuucggcgccaucuccagcucccugcaggagauccucagccggcuggacgcccuggaggccgaggcccagaucgaccgccucaucaacgggcggcugaccgcgcugaacgccuacgugucccagcagcucagcgacuccacccuggucaaguucagcgccgcccaggcgauggagaaggugaacgagugcgugaagucccagagcucccgcaucaacuucugcggcaacgggaaccacaucaucagccugguccagaacgcccccuacggccucuacuucauccacuucuccuacgugcccaccaaguacgucacggccaaggugagccccggccugugcaucgccggggaccggggcaucgcccccaaguccggguacuucgugaacgucaacaacaccuggauguacaccggcagcggguacuacuaccccgagcccaucaccgagaacaacgugguggucaugagcacgugcgcggugaacuacaccaaggccccguacgugaugcugaacaccuccacccccaaccuccccgacuuccgcgaggagcuggaccagugguucaagaaccagaccagcgucgcccccgaccugucccucgacuacaucaacgugacguuccuggaccuccagguggagaugaaccggcuccaggaggccaucaagguccugaaccagagcuacaucaaccugaaggacaucggcaccuacgaguacuacgugaaguggccgugguacguguggcuccugaucggccuggccggggucgcgaugcucgugcugcuguucuucaucugcugcugcaccggcugcgggaccuccugcuucaagaagugcggcgggugcugcgacgacuacacgggcuaccaggagcucgugaucaagaccagccacgacgacugaggacuaguuauaagacugacuagcccgaugggccucccaacgggcccuccuccccuccuugcaccgagauuaauaaaaaaaaaaaaaaaaaaaaaaaaaaaaaaaaaaaaaaaaaaaaaaaaaaaaaaaaaaaaaaaaugcaucccccccccccccccccccccccccccccccaaaggcucuuuucagagccaccagaauu

SEQ ID NO: 15141 - RNA, 4306 nt, Artificial Sequence
  HCoV/OC43/1783A_10__AIL49484.1 spike protein mRNA gc (1-1362)(A1079P_L1080P)
aggagaaagcuuaccauguuccugauccuccugaucagccugcccaccgccuucgccgugaucggcgaccucaagugcccgcuggacucccgcaccgggagccugaacaacaucgacacgggcccgcccuccaucagcaccgcgaccgucgacgugaccaacgggcucggcacguacuacgugcuggaccgggucuaccugaacaccacccucuuccugaacggguacuaccccaccuccggcagcacguaccgcaacauggcccugaagggcaccgacaagcucuccacccugugguucaagccgcccuuccugagcgacuucaucaacgggaucuucgccaaggugaagaacaccaagguguucaaggacggcgucauguacuccgaguuccccgccaucacgaucgggagcaccuucgugaacaccuccuacagcguggucgugcagccccggaccaucaacuccacgcaggacggcgugaacaagcuccaggggcugcuggaggucagcgugugccaguacaacaugugcgaguacccccacaccaucugccaccccaagcucggcaaccacuucaaggagcuguggcacauggacaccggcguggucuccugccuguacaagcgcaacuucaccuacgacgugaacgccacguaccucuacuuccacuucuaccaggagggcggcaccuucuacgcguacuucaccgacaccgggguggucacgaaguuccuguucaacguguaccugggcauggcccucagccacuacuacgugaugccccugaccugcaucucccggcgcgacaucggcuucacccuggaguacugggucacgccccucaccagccggcaguaccugcuggccuucaaccaggacgggaucaucuucaacgccguggacugcauguccgacuucaugagcgagaucaagugcaagacccagagcaucgcgccgcccaccggcguguacgagcucaacggguacaccguccagcccaucgccgacguguaccgccggaagcccgaccugccgaacugcaacaucgaggccuggcugaacgacaaguccguccccagcccccucaacugggagcgcaagacguucuccaacugcaacuucaacaugagcucccugaugagcuucauccaggccgacuccuucacgugcaacaacaucgacgccgcgaagaucuacggcaugugcuucagcuccaucaccaucgacaaguucgccauccccaacgggcggaagguggaccugcagcucggcaaccugggcuaccugcagagcuucaacuaccgcaucgacaccaccgccaccuccugccagcucuacuacaaccugccggccgccaacgugagcgucucccgguucaaccccagcaccuggaacaagcgcuucggguucaucgagaacuccguguucaagccccagcccgcgggcgugcugaccaaccacgacgucguguacgcccagcacugcuucaaggccccgaagaacuucugccccugcaagcucaacagcucccugugcguggggagcggccccgggaagaacaacggcaucgggaccugccccgccgggacgaacuaccugaccugccacaaccucugcaacccggaccccaucaccuucaccggccccuacaagugcccgcagacgaagucccuggucgggaucggcgagcacugcagcgggcuggccgucaagagcgacuacugcggcggcaaccccugcacgugccagccccaggcguuccuggggugguccgccgacagcugccuccagggcgacaagugcaacaucuucgccaaccugauccugcacgacgugaacuccgggcugaccugcagcaccgaccugcagaaggccaacaccgacaucaagcugggcgugugcgugaacuacgaccucuacggcaucuccgggcagggcaucuucguggaggucaacgccaccuacuacaacagcuggcagaaccugcuguacgacuccaacgggaaccucuacggcuuccgggacuacaucaccaaccgcaccuucaugauccggagcugcuacuccgggcgcgugagcgcggccuuccacgccaacuccagcgagcccgcccugcuguuccggaacaucaagugcaacuacguguucaacaacucccucauccgccagcugcagccgaucaacuacuucgacagcuaccugggcugcgucgugaacgcguacaacuccacggccaucagcgugcagaccugcgaccucaccgucggcuccggguacugcguggacuacagcaagaaccggcgcagccgccgggccaucaccacgggcuaccgcuucaccaacuucgagcccuucaccgugaacuccgucaacgacagccuggagcccgucgggggccuguacgagauccagauccccuccgaguucaccaucgggaacauggaggaguucauccagacgagcuccccgaaggugaccaucgacugcgccgccuucgugugcggcgacuacgcggccugcaagagccagcucguggaguacggcuccuucugcgacaacaucaacgccauccugaccgaggugaacgagcugcucgacaccacgcagcugcaggucgccaacagccugaugaacggggugacccucuccaccaagcugaaggacggcgugaacuucaacgucgacgacaucaacuucagcuccgugcuggggugccucggcagcgagugcuccaaggccagcucccggagcgcgaucgaggaccugcuguucgacaaggugaagcucuccgacgucggguucguggccgccuacaacaacugcaccggcggcgccgagauccgcgaccugaucugcgugcagagcuacaaggggaucaagguccugccgccccuccuguccgagaaccagaucagcggcuacacgcuggccgcgaccagcgccucccucuucccgcccuggaccgccgccgcgggggugcccuucuaccugaacgugcaguaccggaucaacggccugggggucaccauggacgugcucagccagaaccagaagcugaucgccaacgccuucaacaacgcccuggacgccauccaggagggcuucgacgcgacgaacuccgcccucgugaagauccaggccgucgugaacgccaacgccgaggcgcugaacaaccugcuccagcagcugagcaaccgcuucggcgccaucuccagcucccugcaggagauccucagccggcuggacccgcccgaggccgaggcccagaucgaccgccugaucaacgggcggcucaccgcccugaacgcguacgugucccagcagcugagcgacuccacccucgucaaguucagcgccgcccaggccauggagaaggugaacgagugcgugaagucccagagcucccgcaucaacuucugcggcaacgggaaccacaucaucagccugguccagaacgcgcccuacggccuguacuucauccacuucuccuacgugcccaccaaguacgucacggccaaggugagccccggccucugcaucgccggggaccggggcaucgcccccaaguccggguacuucgugaacgucaacaacaccuggauguacaccggcagcggguacuacuaccccgagcccaucaccgagaacaacgugguggucauguccacgugcgccgugaacuacaccaaggcgcccuacgugaugcugaacaccagcacccccaaccugccggacuuccgcgaggagcucgaccagugguucaagaaccagaccagcgucgcccccgaccugucccuggacuacaucaacgugacguuccucgaccuccagguggagaugaaccggcugcaggaggccaucaagguccucaaccagagcuacaucaaccugaaggacaucggcaccuacgaguacuacgugaaguggcccugguacguguggcugcucaucggccuggccggggucgccaugcuggugcuccuguucuucaucugcugcugcaccggcugcgggaccuccugcuucaagaagugcggcgggugcugcgacgacuacacgggcuaccaggagcuggugaucaagaccagccacgacgacugaggacuaguuauaagacugacuagcccgaugggccucccaacgggcccuccuccccuccuugcaccgagauuaauaaaaaaaaaaaaaaaaaaaaaaaaaaaaaaaaaaaaaaaaaaaaaaaaaaaaaaaaaaaaaaaaugcaucccccccccccccccccccccccccccccccaaaggcucuuuucagagccaccagaauu

SEQ ID NO: 15142 - RNA, 4081 nt, Artificial Sequence
  HCoV/OC43/1783A_10__AIL49484.1 spike protein mRNA gc (variant)
aggagaaagcuuaccauguuccugauccuccugaucagccugcccaccgccuucgccgugaucggcgaccucaagugcccgcuggacucccgcaccgggagccugaacaacaucgacacgggcccgcccuccaucagcaccgcgaccgucgacgugaccaacgggcucggcacguacuacgugcuggaccgggucuaccugaacaccacccucuuccugaacggguacuaccccaccuccggcagcacguaccgcaacauggcccugaagggcaccgacaagcucuccacccugugguucaagccgcccuuccugagcgacuucaucaacgggaucuucgccaaggugaagaacaccaagguguucaaggacggcgucauguacuccgaguuccccgccaucacgaucgggagcaccuucgugaacaccuccuacagcguggucgugcagccccggaccaucaacuccacgcaggacggcgugaacaagcuccaggggcugcuggaggucagcgugugccaguacaacaugugcgaguacccccacaccaucugccaccccaagcucggcaaccacuucaaggagcuguggcacauggacaccggcguggucuccugccuguacaagcgcaacuucaccuacgacgugaacgccacguaccucuacuuccacuucuaccaggagggcggcaccuucuacgcguacuucaccgacaccgggguggucacgaaguuccuguucaacguguaccugggcauggcccucagccacuacuacgugaugccccugaccugcaucucccggcgcgacaucggcuucacccuggaguacugggucacgccccucaccagccggcaguaccugcuggccuucaaccaggacgggaucaucuucaacgccguggacugcauguccgacuucaugagcgagaucaagugcaagacccagagcaucgcgccgcccaccggcguguacgagcucaacggguacaccguccagcccaucgccgacguguaccgccggaagcccgaccugccgaacugcaacaucgaggccuggcugaacgacaaguccguccccagcccccucaacugggagcgcaagacguucuccaacugcaacuucaacaugagcucccugaugagcuucauccaggccgacuccuucacgugcaacaacaucgacgccgcgaagaucuacggcaugugcuucagcuccaucaccaucgacaaguucgccauccccaacgggcggaagguggaccugcagcucggcaaccugggcuaccugcagagcuucaacuaccgcaucgacaccaccgccaccuccugccagcucuacuacaaccugccggccgccaacgugagcgucucccgguucaaccccagcaccuggaacaagcgcuucggguucaucgagaacuccguguucaagccccagcccgcgggcgugcugaccaaccacgacgucguguacgcccagcacugcuucaaggccccgaagaacuucugccccugcaagcucaacagcucccugugcguggggagcggccccgggaagaacaacggcaucgggaccugccccgccgggacgaacuaccugaccugccacaaccucugcaacccggaccccaucaccuucaccggccccuacaagugcccgcagacgaagucccuggucgggaucggcgagcacugcagcgggcuggccgucaagagcgacuacugcggcggcaaccccugcacgugccagccccaggcguuccuggggugguccgccgacagcugccuccagggcgacaagugcaacaucuucgccaaccugauccugcacgacgugaacuccgggcugaccugcagcaccgaccugcagaaggccaacaccgacaucaagcugggcgugugcgugaacuacgaccucuacggcaucuccgggcagggcaucuucguggaggucaacgccaccuacuacaacagcuggcagaaccugcuguacgacuccaacgggaaccucuacggcuuccgggacuacaucaccaaccgcaccuucaugauccggagcugcuacuccgggcgcgugagcgcggccuuccacgccaacuccagcgagcccgcccugcuguuccggaacaucaagugcaacuacguguucaacaacucccucauccgccagcugcagccgaucaacuacuucgacagcuaccugggcugcgucgugaacgcguacaacuccacggccaucagcgugcagaccugcgaccucaccgucggcuccggguacugcguggacuacagcaagaacggcgggagcggcuccgccaucaccacgggguaccgguucaccaacuucgagcccuucaccgugaacagcgucaacgacucccuggagcccgugggcggccuguacgagauccagauccccagcgaguucaccaucgggaacauggaggaguucauccagacguccagcccgaaggugaccaucgacugcgccgccuucgucugcggcgacuacgcggccugcaagucccagcucguggaguacgggagcuucugcgacaacaucaacgccauccugaccgaggugaacgagcugcucgacaccacgcagcugcaggucgccaacucccugaugaacggcgugacccucagcaccaagcugaaggacggggugaacuucaacgucgacgacaucaacuucuccagcgugcugggcugccucggcuccgagugcagcaaggccuccagccgcuccgcgaucgaggaccugcuguucgacaaggugaagcucagcgacgucggguucguggccgccuacaacaacugcaccggcggggccgagauccgcgaccugaucugcgugcaguccuacaagggcaucaagguccugccgccccuccugagcgagaaccagaucagcggguacacgcuggccgcgaccuccgccagccucuucccgcccuggaccgccgccgcgggcgugcccuucuaccugaacgugcaguaccggaucaacggccugggggucaccauggacgugcucucccagaaccagaagcugaucgccaacgccuucaacaacgcccuggacgccauccaggagggcuucgacgcgacgaacagcgcccucgugaagauccaggccgucgugaacgccaacgccgaggcgcugaacaaccugcuccagcagcuguccaaccgcuucggggccaucagcuccagccugcaggagauccucucccggcuggacccgcccgaggccgaggcccagaucgaccgccugaucaacggccggcucaccgcccugaacgcguacgugagccagcagcuguccgacagcacccucgucaaguucuccgccgcccaggccauggagaaggugaacgagugcgucaagagccaguccagccgcaucaacuucugcggcaacgggaaccacaucaucucccuggugcagaacgcgcccuacggccuguacuucauccacuucagcuacgugcccaccaaguacgucacggccaaggugucccccgggcucugcaucgccggcgaccgggggaucgcccccaagagcggcuacuucgugaacgucaacaacaccuggauguacaccggcagcggguacuacuaccccgagcccaucaccgagaacaacgugguggucaugagcacgugcgccgugaacuacaccaaggcgcccuacgugaugcugaacaccuccacccccaaccugccggacuuccgcgaggagcucgaccagugguucaagaaccagaccuccgucgcccccgaccugagccuggacuacaucaacgugacguuccucgaccuccagguggagaugaaccggcugcaggaggccaucaagguccucaacugaggacuaguuauaagacugacuagcccgaugggccucccaacgggcccuccuccccuccuugcaccgagauuaauaaaaaaaaaaaaaaaaaaaaaaaaaaaaaaaaaaaaaaaaaaaaaaaaaaaaaaaaaaaaaaaaugcaucccccccccccccccccccccccccccccccaaaggcucuuuucagagccaccagaauu

SEQ ID NO: 15143 - RNA, 4162 nt, Artificial Sequence
  HCoV/OC43/1783A_10__AIL49484.1 spike protein mRNA gc (variant)
aggagaaagcuuaccauguuccugauccuccugaucagccugcccaccgccuucgccgugaucggcgaccucaagugcccgcuggacucccgcaccgggagccugaacaacaucgacacgggcccgcccuccaucagcaccgcgaccgucgacgugaccaacgggcucggcacguacuacgugcuggaccgggucuaccugaacaccacccucuuccugaacggguacuaccccaccuccggcagcacguaccgcaacauggcccugaagggcaccgacaagcucuccacccugugguucaagccgcccuuccugagcgacuucaucaacgggaucuucgccaaggugaagaacaccaagguguucaaggacggcgucauguacuccgaguuccccgccaucacgaucgggagcaccuucgugaacaccuccuacagcguggucgugcagccccggaccaucaacuccacgcaggacggcgugaacaagcuccaggggcugcuggaggucagcgugugccaguacaacaugugcgaguacccccacaccaucugccaccccaagcucggcaaccacuucaaggagcuguggcacauggacaccggcguggucuccugccuguacaagcgcaacuucaccuacgacgugaacgccacguaccucuacuuccacuucuaccaggagggcggcaccuucuacgcguacuucaccgacaccgggguggucacgaaguuccuguucaacguguaccugggcauggcccucagccacuacuacgugaugccccugaccugcaucucccggcgcgacaucggcuucacccuggaguacugggucacgccccucaccagccggcaguaccugcuggccuucaaccaggacgggaucaucuucaacgccguggacugcauguccgacuucaugagcgagaucaagugcaagacccagagcaucgcgccgcccaccggcguguacgagcucaacggguacaccguccagcccaucgccgacguguaccgccggaagcccgaccugccgaacugcaacaucgaggccuggcugaacgacaaguccguccccagcccccucaacugggagcgcaagacguucuccaacugcaacuucaacaugagcucccugaugagcuucauccaggccgacuccuucacgugcaacaacaucgacgccgcgaagaucuacggcaugugcuucagcuccaucaccaucgacaaguucgccauccccaacgggcggaagguggaccugcagcucggcaaccugggcuaccugcagagcuucaacuaccgcaucgacaccaccgccaccuccugccagcucuacuacaaccugccggccgccaacgugagcgucucccgguucaaccccagcaccuggaacaagcgcuucggguucaucgagaacuccguguucaagccccagcccgcgggcgugcugaccaaccacgacgucguguacgcccagcacugcuucaaggccccgaagaacuucugccccugcaagcucaacagcucccugugcguggggagcggccccgggaagaacaacggcaucgggaccugccccgccgggacgaacuaccugaccugccacaaccucugcaacccggaccccaucaccuucaccggccccuacaagugcccgcagacgaagucccuggucgggaucggcgagcacugcagcgggcuggccgucaagagcgacuacugcggcggcaaccccugcacgugccagccccaggcguuccuggggugguccgccgacagcugccuccagggcgacaagugcaacaucuucgccaaccugauccugcacgacgugaacuccgggcugaccugcagcaccgaccugcagaaggccaacaccgacaucaagcugggcgugugcgugaacuacgaccucuacggcaucuccgggcagggcaucuucguggaggucaacgccaccuacuacaacagcuggcagaaccugcuguacgacuccaacgggaaccucuacggcuuccgggacuacaucaccaaccgcaccuucaugauccggagcugcuacuccgggcgcgugagcgcggccuuccacgccaacuccagcgagcccgcccugcuguuccggaacaucaagugcaacuacguguucaacaacucccucauccgccagcugcagccgaucaacuacuucgacagcuaccugggcugcgucgugaacgcguacaacuccacggccaucagcgugcagaccugcgaccucaccgucggcuccggguacugcguggacuacagcaagaacggcgggagcggcuccgccaucaccacgggguaccgguucaccaacuucgagcccuucaccgugaacagcgucaacgacucccuggagcccgugggcggccuguacgagauccagauccccagcgaguucaccaucgggaacauggaggaguucauccagacguccagcccgaaggugaccaucgacugcgccgccuucgucugcggcgacuacgcggccugcaagucccagcucguggaguacgggagcuucugcgacaacaucaacgccauccugaccgaggugaacgagcugcucgacaccacgcagcugcaggucgccaacucccugaugaacggcgugacccucagcaccaagcugaaggacggggugaacuucaacgucgacgacaucaacuucuccagcgugcugggcugccucggcuccgagugcagcaaggccuccagccgcuccgcgaucgaggaccugcuguucgacaaggugaagcucagcgacgucggguucguggccgccuacaacaacugcaccggcggggccgagauccgcgaccugaucugcgugcaguccuacaagggcaucaagguccugccgccccuccugagcgagaaccagaucagcggguacacgcuggccgcgaccuccgccagccucuucccgcccuggaccgccgccgcgggcgugcccuucuaccugaacgugcaguaccggaucaacggccugggggucaccauggacgugcucucccagaaccagaagcugaucgccaacgccuucaacaacgcccuggacgccauccaggagggcuucgacgcgacgaacagcgcccucgugaagauccaggccgucgugaacgccaacgccgaggcgcugaacaaccugcuccagcagcuguccaaccgcuucggggccaucagcuccagccugcaggagauccucucccggcuggacccgcccgaggccgaggcccagaucgaccgccugaucaacggccggcucaccgcccugaacgcguacgugagccagcagcuguccgacagcacccucgucaaguucuccgccgcccaggccauggagaaggugaacgagugcgucaagagccaguccagccgcaucaacuucugcggcaacgggaaccacaucaucucccuggugcagaacgcgcccuacggccuguacuucauccacuucagcuacgugcccaccaaguacgucacggccaaggugucccccgggcucugcaucgccggcgaccgggggaucgcccccaagagcggcuacuucgugaacgucaacaacaccuggauguacaccggcagcggguacuacuaccccgagcccaucaccgagaacaacgugguggucaugagcacgugcgccgugaacuacaccaaggcgcccuacgugaugcugaacaccuccacccccaaccugccggacuuccgcgaggagcucgaccagugguucaagaaccagaccuccgucgcccccgaccugagccuggacuacaucaacgugacguuccucgaccuccagguggagaugaaccggcugcaggaggccaucaagguccucaacggcggguacauccccgaggccccgcgcgacggccaggccuacgugcggaaggacggggagugggugcugcuguccaccuucugaggacuaguuauaagacugacuagcccgaugggccucccaacgggcccuccuccccuccuugcaccgagauuaauaaaaaaaaaaaaaaaaaaaaaaaaaaaaaaaaaaaaaaaaaaaaaaaaaaaaaaaaaaaaaaaaugcaucccccccccccccccccccccccccccccccaaaggcucuuuucagagccaccagaauu

SEQ ID NO: 15144 - RNA, 4273 nt, Artificial Sequence
  HCoV/HKU1/N5__Q0ZME7.1 spike protein mRNA gc (1-1351)
aggagaaagcuuaccauguuccugaucaucuucauccuccccaccacccuggccgugaucggcgacuucaacugcacgaacagcuucaucaacgacuacaacaagaccaucccgcgcaucuccgaggacgucguggacgugagccuggggcucggcaccuacuacguccugaaccggguguaccugaacaccacgcuccuguucaccggguacuuccccaaguccggcgccaacuuccgcgaccuggcgcucaaggggagcaucuaccuguccacccugugguacaagccgcccuuccucagcgacuucaacaacggcaucuucuccaaggugaagaacaccaagcuguacgucaacaacacgcuguacagcgaguucuccaccaucgugaucggcagcguguucgucaacaccuccuacaccaucguggugcagccccacaacgggauccucgagaucacggccugccaguacaccaugugcgaguacccccacaccgucugcaagagcaagggcuccauccggaacgagagcuggcacaucgacuccagcgagccccugugccuguucaagaagaacuucaccuacaacguguccgccgacuggcucuacuuccacuucuaccaggagcgcgggguguucuacgccuacuacgccgacgucggcaugcccacgaccuuccuguucagccuguaccucgggaccauccugucccacuacuacgugaugccgcugaccugcaacgcgaucagcagcaacacggacaacgagacccucgaguacugggugacgccccugucccggcgccaguaccugcucaacuucgacgagcacggcgucaucaccaacgccguggacugcagcuccagcuuccuguccgagauccagugcaagacccagagcuucgcccccaacaccggcguguacgaccuguccggguucaccgucaagcccguggccaccguguaccggcgcaucccgaaccuccccgacugcgacaucgacaacuggcugaacaacgucagcgugcccagcccccugaacugggagcggcgcaucuucuccaacugcaacuucaaccucuccacgcugcugcggcucguccacguggacagcuucuccugcaacaaccuggacaagagcaagaucuucggcuccugcuucaacagcaucaccguggacaaguucgcgaucccgaaccgccggcgcgacgaccugcagcucggguccagcggcuuccugcaguccagcaacuacaagaucgacaucagcuccagcuccugccagcuguacuacagccucccccuggucaacgugaccaucaacaacuucaaccccuccagcuggaaccggcgcuacggcuucggguccuucaaccugagcuccuacgacguggucuacagcgaccacugcuucuccgugaacagcgacuucugccccugcgccgacccguccguggucaacagcugcgccaaguccaagccgcccagcgccaucugccccgccggcaccaaguaccggcacugcgaccucgacacgacccuguacgugaagaacuggugccgcugcuccugccugcccgaccccaucagcaccuacagccccaacacgugcccccagaagaagguggucguggggaucggcgagcacugcccggggcugggcaucaacgaggagaagugcggcacccagcucaaccacuccagcugcuucugcucccccgacgcguuccugggguggagcuucgacuccugcaucagcaacaaccggugcaacaucuucuccaacuucaucuucaacggcaucaacagcgggacgaccugcuccaacgaccugcucuacagcaacaccgagaucuccaccggcgugugcgucaacuacgaccuguacgggaucaccggccagggcaucuucaaggaggugagcgccgccuacuacaacaacuggcagaaccugcucuacgacuccaacgggaacaucaucggcuucaaggacuuccugaccaacaagaccuacaccauccugcccugcuacagcgggcgcguguccgccgccuucuaccagaacagcuccagcccggcgcuccuguaccggaaccugaagugcuccuacguccucaacaacaucagcuucaucagccagcccuucuacuucgacuccuaccugggcugcgugcugaacgccgugaaccucacgagcuacuccgucagcuccugcgaccugcgcauggggagcggcuucugcaucgacuacgcccugcccuccagccgccggaagcgccggggcaucuccagccccuaccgcuucgugaccuucgagccguucaacguguccuucgucaacgacagcguggagaccgucgggggccucuucgagauccagauccccaccaacuucacgaucgccgggcacgaggaguucauccagaccuccagccccaaggugaccaucgacugcuccgccuucgugugcagcaacuacgcggccugccacgaccugcuguccgaguacggcaccuucugcgacaacaucaacagcauccucaacgaggugaacgaccugcuggacaucacgcagcuccaggucgccaacgcccugaugcagggcgugacccuguccagcaaccucaacaccaaccugcacagcgacguggacaacaucgacuucaagucccugcucgggugccugggcagccagugcggguccagcucccggagccugcucgaggaccugcuguucaacaaggucaagcucuccgacgugggcuucguggaggccuacaacaacugcaccgggggcagcgagauccgcgaccugcugugcguccaguccuucaacggcaucaaggugcugcccccgauccucagcgagacgcagaucuccggguacaccaccgcggccaccguggccgccauguucccgcccuggagcgcggccgccggcguccccuucucccugaacgugcaguaccggaucaacgggcucggcgugacgauggacguccugaacaagaaccagaagcugaucgccaacgccuucaacaaggcgcuccugagcauccagaacggguucaccgccaccaacuccgcccuggccaagauccagagcguggugaacgccaacgcgcaggcccucaacucccugcugcagcagcuguucaacaaguucggcgccaucagcuccagccuccaggagauccugagccgccucgacaaccuggaggcccagguccagaucgaccggcugaucaacggccgccucaccgcccugaacgcguacgugucccagcagcugagcgacaucacgcucaucaaggccggggccucccgggccaucgagaaggugaacgagugcgucaagagccagagcccccgcaucaacuucugcggcaacgggaaccacauccugucccuggugcagaacgcgcccuacggccuccuguucauccacuucuccuacaagcccaccagcuucaagaccgugcuggucucccccgggcucugccugagcggcgaccggggcaucgccccgaagcagggguacuucaucaagcagaacgacuccuggauguucaccggcagcuccuacuacuaccccgagcccaucagcgacaagaacguggucuucaugaacuccugcagcgugaacuucacgaaggcccccuucaucuaccugaacaacuccaucccgaaccucagcgacuucgaggccgagcugucccugugguucaagaaccacaccagcaucgcccccaaccucaccuucaacagccacaucaacgcgaccuuccuggaccuguacuacgagaugaacgugauccaggaguccaucaagagccucaacuccagcuucaucaaccugaaggagaucgggacguacgagauguacgucaaguggcccugguacaucuggcugcucaucgugauccuguucaucaucuuccugaugauccucuucuucaucugcugcugcaccggcugcggguccgccugcuucagcaagugccacaacugcugcgacgaguacggcggccacaacgacuucgugaucaaggccucccacgacgacugaggacuaguuauaagacugacuagcccgaugggccucccaacgggcccuccuccccuccuugcaccgagauuaauaaaaaaaaaaaaaaaaaaaaaaaaaaaaaaaaaaaaaaaaaaaaaaaaaaaaaaaaaaaaaaaaugcaucccccccccccccccccccccccccccccccaaaggcucuuuucagagccaccagaauu

SEQ ID NO: 15145 - RNA, 4273 nt, Artificial Sequence
  HCoV/HKU1/N5__Q0ZME7.1 spike protein mRNA gc (1-1351)(N1067P_L1068P)
aggagaaagcuuaccauguuccugaucaucuucauccuccccaccacccuggccgugaucggcgacuucaacugcacgaacagcuucaucaacgacuacaacaagaccaucccgcgcaucuccgaggacgucguggacgugagccuggggcucggcaccuacuacguccugaaccggguguaccugaacaccacgcuccuguucaccggguacuuccccaaguccggcgccaacuuccgcgaccuggcgcucaaggggagcaucuaccuguccacccugugguacaagccgcccuuccucagcgacuucaacaacggcaucuucuccaaggugaagaacaccaagcuguacgucaacaacacgcuguacagcgaguucuccaccaucgugaucggcagcguguucgucaacaccuccuacaccaucguggugcagccccacaacgggauccucgagaucacggccugccaguacaccaugugcgaguacccccacaccgucugcaagagcaagggcuccauccggaacgagagcuggcacaucgacuccagcgagccccugugccuguucaagaagaacuucaccuacaacguguccgccgacuggcucuacuuccacuucuaccaggagcgcgggguguucuacgccuacuacgccgacgucggcaugcccacgaccuuccuguucagccuguaccucgggaccauccugucccacuacuacgugaugccgcugaccugcaacgcgaucagcagcaacacggacaacgagacccucgaguacugggugacgccccugucccggcgccaguaccugcucaacuucgacgagcacggcgucaucaccaacgccguggacugcagcuccagcuuccuguccgagauccagugcaagacccagagcuucgcccccaacaccggcguguacgaccuguccggguucaccgucaagcccguggccaccguguaccggcgcaucccgaaccuccccgacugcgacaucgacaacuggcugaacaacgucagcgugcccagcccccugaacugggagcggcgcaucuucuccaacugcaacuucaaccucuccacgcugcugcggcucguccacguggacagcuucuccugcaacaaccuggacaagagcaagaucuucggcuccugcuucaacagcaucaccguggacaaguucgcgaucccgaaccgccggcgcgacgaccugcagcucggguccagcggcuuccugcaguccagcaacuacaagaucgacaucagcuccagcuccugccagcuguacuacagccucccccuggucaacgugaccaucaacaacuucaaccccuccagcuggaaccggcgcuacggcuucggguccuucaaccugagcuccuacgacguggucuacagcgaccacugcuucuccgugaacagcgacuucugccccugcgccgacccguccguggucaacagcugcgccaaguccaagccgcccagcgccaucugccccgccggcaccaaguaccggcacugcgaccucgacacgacccuguacgugaagaacuggugccgcugcuccugccugcccgaccccaucagcaccuacagccccaacacgugcccccagaagaagguggucguggggaucggcgagcacugcccggggcugggcaucaacgaggagaagugcggcacccagcucaaccacuccagcugcuucugcucccccgacgcguuccugggguggagcuucgacuccugcaucagcaacaaccggugcaacaucuucuccaacuucaucuucaacggcaucaacagcgggacgaccugcuccaacgaccugcucuacagcaacaccgagaucuccaccggcgugugcgucaacuacgaccuguacgggaucaccggccagggcaucuucaaggaggugagcgccgccuacuacaacaacuggcagaaccugcucuacgacuccaacgggaacaucaucggcuucaaggacuuccugaccaacaagaccuacaccauccugcccugcuacagcgggcgcguguccgccgccuucuaccagaacagcuccagcccggcgcuccuguaccggaaccugaagugcuccuacguccucaacaacaucagcuucaucagccagcccuucuacuucgacuccuaccugggcugcgugcugaacgccgugaaccucacgagcuacuccgucagcuccugcgaccugcgcauggggagcggcuucugcaucgacuacgcccugcccuccagccgccggaagcgccggggcaucuccagccccuaccgcuucgugaccuucgagccguucaacguguccuucgucaacgacagcguggagaccgucgggggccucuucgagauccagauccccaccaacuucacgaucgccgggcacgaggaguucauccagaccuccagccccaaggugaccaucgacugcuccgccuucgugugcagcaacuacgcggccugccacgaccugcuguccgaguacggcaccuucugcgacaacaucaacagcauccucaacgaggugaacgaccugcuggacaucacgcagcuccaggucgccaacgcccugaugcagggcgugacccuguccagcaaccucaacaccaaccugcacagcgacguggacaacaucgacuucaagucccugcucgggugccugggcagccagugcggguccagcucccggagccugcucgaggaccugcuguucaacaaggucaagcucuccgacgugggcuucguggaggccuacaacaacugcaccgggggcagcgagauccgcgaccugcugugcguccaguccuucaacggcaucaaggugcugcccccgauccugagcgagacgcagaucuccggguacaccaccgcggccaccguggccgccauguucccgcccuggagcgcggccgccggcguccccuucucccugaacgugcaguaccggaucaacgggcucggcgugacgauggacguccugaacaagaaccagaagcugaucgccaacgccuucaacaaggcgcuccugagcauccagaacggguucaccgccaccaacuccgcccuggccaagauccagagcguggugaacgccaacgcgcaggcccucaacucccugcugcagcagcuguucaacaaguucggcgccaucagcuccagccuccaggagauccugagccgccucgacccgcccgaggcccagguccagaucgaccggcugaucaacggccgccugaccgcccucaacgcguacgugucccagcagcugagcgacaucacgcugaucaaggccggggccucccgggccaucgagaaggugaacgagugcgucaagagccagagcccccgcaucaacuucugcggcaacgggaaccacauccucucccuggugcagaacgcgcccuacggccuccucuucauccacuucuccuacaagcccaccagcuucaagaccgugcuggucucccccgggcugugccucagcggcgaccggggcaucgcccccaagcagggguacuucaucaagcagaacgacuccuggauguucaccggcagcuccuacuacuaccccgagccgaucagcgacaagaacguggucuucaugaacuccugcagcgugaacuucacgaaggcccccuucaucuaccugaacaacuccauccccaaccugagcgacuucgaggccgagcucucccugugguucaagaaccacaccagcaucgcccccaaccugaccuucaacagccacaucaacgcgaccuuccucgaccuguacuacgagaugaacgugauccaggaguccaucaagagccugaacuccagcuucaucaaccucaaggagaucgggacguacgagauguacgucaaguggccgugguacaucuggcugcugaucgugauccucuucaucaucuuccugaugauccuguucuucaucugcugcugcaccggcugcggguccgccugcuucagcaagugccacaacugcugcgacgaguacggcggccacaacgacuucgugaucaaggccucccacgacgacugaggacuaguuauaagacugacuagcccgaugggccucccaacgggcccuccuccccuccuugcaccgagauuaauaaaaaaaaaaaaaaaaaaaaaaaaaaaaaaaaaaaaaaaaaaaaaaaaaaaaaaaaaaaaaaaaugcaucccccccccccccccccccccccccccccccaaaggcucuuuucagagccaccagaauu

SEQ ID NO: 15146 - RNA, 4048 nt, Artificial Sequence
  HCoV/HKU1/N5__Q0ZME7.1 spike protein mRNA gc (variant)
aggagaaagcuuaccauguuccugaucaucuucauccuccccaccacccuggccgugaucggcgacuucaacugcacgaacagcuucaucaacgacuacaacaagaccaucccgcgcaucuccgaggacgucguggacgugagccuggggcucggcaccuacuacguccugaaccggguguaccugaacaccacgcuccuguucaccggguacuuccccaaguccggcgccaacuuccgcgaccuggcgcucaaggggagcaucuaccuguccacccugugguacaagccgcccuuccucagcgacuucaacaacggcaucuucuccaaggugaagaacaccaagcuguacgucaacaacacgcuguacagcgaguucuccaccaucgugaucggcagcguguucgucaacaccuccuacaccaucguggugcagccccacaacgggauccucgagaucacggccugccaguacaccaugugcgaguacccccacaccgucugcaagagcaagggcuccauccggaacgagagcuggcacaucgacuccagcgagccccugugccuguucaagaagaacuucaccuacaacguguccgccgacuggcucuacuuccacuucuaccaggagcgcgggguguucuacgccuacuacgccgacgucggcaugcccacgaccuuccuguucagccuguaccucgggaccauccugucccacuacuacgugaugccgcugaccugcaacgcgaucagcagcaacacggacaacgagacccucgaguacugggugacgccccugucccggcgccaguaccugcucaacuucgacgagcacggcgucaucaccaacgccguggacugcagcuccagcuuccuguccgagauccagugcaagacccagagcuucgcccccaacaccggcguguacgaccuguccggguucaccgucaagcccguggccaccguguaccggcgcaucccgaaccuccccgacugcgacaucgacaacuggcugaacaacgucagcgugcccagcccccugaacugggagcggcgcaucuucuccaacugcaacuucaaccucuccacgcugcugcggcucguccacguggacagcuucuccugcaacaaccuggacaagagcaagaucuucggcuccugcuucaacagcaucaccguggacaaguucgcgaucccgaaccgccggcgcgacgaccugcagcucggguccagcggcuuccugcaguccagcaacuacaagaucgacaucagcuccagcuccugccagcuguacuacagccucccccuggucaacgugaccaucaacaacuucaaccccuccagcuggaaccggcgcuacggcuucggguccuucaaccugagcuccuacgacguggucuacagcgaccacugcuucuccgugaacagcgacuucugccccugcgccgacccguccguggucaacagcugcgccaaguccaagccgcccagcgccaucugccccgccggcaccaaguaccggcacugcgaccucgacacgacccuguacgugaagaacuggugccgcugcuccugccugcccgaccccaucagcaccuacagccccaacacgugcccccagaagaagguggucguggggaucggcgagcacugcccggggcugggcaucaacgaggagaagugcggcacccagcucaaccacuccagcugcuucugcucccccgacgcguuccugggguggagcuucgacuccugcaucagcaacaaccggugcaacaucuucuccaacuucaucuucaacggcaucaacagcgggacgaccugcuccaacgaccugcucuacagcaacaccgagaucuccaccggcgugugcgucaacuacgaccuguacgggaucaccggccagggcaucuucaaggaggugagcgccgccuacuacaacaacuggcagaaccugcucuacgacuccaacgggaacaucaucggcuucaaggacuuccugaccaacaagaccuacaccauccugcccugcuacagcgggcgcguguccgccgccuucuaccagaacagcuccagcccggcgcuccuguaccggaaccugaagugcuccuacguccucaacaacaucagcuucaucagccagcccuucuacuucgacuccuaccugggcugcgugcugaacgccgugaaccucacgagcuacuccgucagcuccugcgaccugcgcauggggagcggcuucugcaucgacuacgcccugcccuccagcggcggguccggcagcgggaucuccagccccuaccgcuucgugaccuucgagccguucaacguguccuucgucaacgacagcguggagaccgugggcggccucuucgagauccagauccccaccaacuucacgaucgccgggcacgaggaguucauccagaccuccagccccaaggucaccaucgacugcuccgccuucgugugcagcaacuacgcggccugccacgaccugcuguccgaguacggcaccuucugcgacaacaucaacagcauccucaacgaggugaacgaccugcuggacaucacgcagcuccaggucgccaacgcccugaugcagggggugacccugagcuccaaccucaacaccaaccugcacagcgacguggacaacaucgacuucaagucccugcucggcugccuggggagccagugcggcuccagcucccggagccugcucgaggaccugcuguucaacaaggucaagcucuccgacgugggcuucguggaggccuacaacaacugcaccgggggcagcgagauccgcgaccugcugugcguccaguccuucaacgggaucaaggugcugcccccgauccugagcgagacgcagaucuccggcuacaccaccgcggccaccguggccgccauguucccgcccuggagcgcggccgccgggguccccuucucccugaacgugcaguaccggaucaacggccucggcgugacgauggacguccugaacaagaaccagaagcugaucgccaacgccuucaacaaggcgcuccugagcauccagaacggguucaccgccaccaacuccgcccuggccaagauccagagcguggugaacgccaacgcgcaggcccucaacucccugcugcagcagcuguucaacaaguucggcgccaucagcagcucccuccaggagauccugagccgccucgacccgcccgaggcccagguccagaucgaccggcugaucaacgggcgccugaccgcccucaacgcguacgugucccagcagcugagcgacaucacgcugaucaaggccggcgccucccgggccaucgagaaggugaacgagugcgucaagagccagagcccccgcaucaacuucugcgggaacggcaaccacauccucucccuggugcagaacgcgcccuacggccuccucuucauccacuucuccuacaagcccaccagcuucaagaccgugcuggucucccccgggcugugccucagcggcgaccgggggaucgcccccaagcagggcuacuucaucaagcagaacgacuccuggauguucaccgggagcuccuacuacuaccccgagccgaucagcgacaagaacguggucuucaugaacuccugcagcgugaacuucacgaaggcccccuucaucuaccugaacaacuccauccccaaccugagcgacuucgaggccgagcucagccugugguucaagaaccacaccuccaucgcccccaaccugaccuucaacagccacaucaacgcgaccuuccucgaccuguacuacgagaugaacgugauccaggaguccaucaagagccugaacugaggacuaguuauaagacugacuagcccgaugggccucccaacgggcccuccuccccuccuugcaccgagauuaauaaaaaaaaaaaaaaaaaaaaaaaaaaaaaaaaaaaaaaaaaaaaaaaaaaaaaaaaaaaaaaaaugcaucccccccccccccccccccccccccccccccaaaggcucuuuucagagccaccagaauu

SEQ ID NO: 15147 - RNA, 4129 nt, Artificial Sequence
  HCoV/HKU1/N5__Q0ZME7.1 spike protein mRNA gc (variant)
aggagaaagcuuaccauguuccugaucaucuucauccuccccaccacccuggccgugaucggcgacuucaacugcacgaacagcuucaucaacgacuacaacaagaccaucccgcgcaucuccgaggacgucguggacgugagccuggggcucggcaccuacuacguccugaaccggguguaccugaacaccacgcuccuguucaccggguacuuccccaaguccggcgccaacuuccgcgaccuggcccucaaggggagcaucuaccuguccacccugugguacaagccgcccuuccucagcgacuucaacaacggcaucuucuccaaggugaagaacaccaagcuguacgucaacaacacgcuguacagcgaguucuccaccaucgugaucggcagcguguucgucaacaccuccuacaccaucguggugcagccccacaacgggauccucgagaucacggccugccaguacaccaugugcgaguacccccacaccgucugcaagagcaagggcuccauccggaacgagagcuggcacaucgacuccagcgagccccugugccuguucaagaagaacuucaccuacaacguguccgccgacuggcucuacuuccacuucuaccaggagcgcgggguguucuacgccuacuacgccgacgucggcaugcccacgaccuuccuguucagccuguaccucgggaccauccugucccacuacuacgugaugccgcugaccugcaacgcgaucagcagcaacacggacaacgagacccucgaguacugggugacgccccugucccggcgccaguaccugcucaacuucgacgagcacggcgucaucaccaacgccguggacugcagcuccagcuuccuguccgagauccagugcaagacccagagcuucgcccccaacaccggcguguacgaccuguccggguucaccgucaagcccguggccaccguguaccggcgcaucccgaaccuccccgacugcgacaucgacaacuggcugaacaacgucagcgugcccagcccccugaacugggagcggcgcaucuucuccaacugcaacuucaaccucuccacgcugcugcggcucguccacguggacagcuucuccugcaacaaccuggacaagagcaagaucuucggcuccugcuucaacagcaucaccguggacaaguucgcgaucccgaaccgccggcgcgacgaccugcagcucggguccagcggcuuccugcaguccagcaacuacaagaucgacaucagcuccagcuccugccagcuguacuacagccucccccuggucaacgugaccaucaacaacuucaaccccuccagcuggaaccggcgcuacggcuucggguccuucaaccugagcuccuacgacguggucuacagcgaccacugcuucuccgugaacagcgacuucugccccugcgccgacccguccguggucaacagcugcgccaaguccaagccgcccagcgccaucugccccgccggcaccaaguaccggcacugcgaccucgacacgacccuguacgugaagaacuggugccgcugcuccugccugcccgaccccaucagcaccuacagccccaacacgugcccccagaagaagguggucguggggaucggcgagcacugcccggggcugggcaucaacgaggagaagugcggcacccagcucaaccacuccagcugcuucugcucccccgacgcguuccugggguggagcuucgacuccugcaucagcaacaaccggugcaacaucuucuccaacuucaucuucaacggcaucaacagcgggacgaccugcuccaacgaccugcucuacagcaacaccgagaucuccaccggcgugugcgucaacuacgaccuguacgggaucaccggccagggcaucuucaaggaggugagcgccgccuacuacaacaacuggcagaaccugcucuacgacuccaacgggaacaucaucggcuucaaggacuuccugaccaacaagaccuacaccauccugcccugcuacagcgggcgcguguccgccgccuucuaccagaacagcuccagcccggcgcuccuguaccggaaccugaagugcuccuacguccucaacaacaucagcuucaucagccagcccuucuacuucgacuccuaccugggcugcgugcugaacgccgugaaccucacgagcuacuccgucagcuccugcgaccugcgcauggggagcggcuucugcaucgacuacgcccugcccuccagcggcggguccggcagcgggaucuccagccccuaccgcuucgugaccuucgagccguucaacguguccuucgucaacgacagcguggagaccgugggcggccucuucgagauccagauccccaccaacuucacgaucgccgggcacgaggaguucauccagaccuccagccccaaggucaccaucgacugcuccgccuucgugugcagcaacuacgcggccugccacgaccugcuguccgaguacggcaccuucugcgacaacaucaacagcauccucaacgaggugaacgaccugcuggacaucacgcagcuccaggucgccaacgcccugaugcagggggugacccugagcuccaaccucaacaccaaccugcacagcgacguggacaacaucgacuucaagucccugcucggcugccuggggagccagugcggcuccagcucccggagccugcucgaggaccugcuguucaacaaggucaagcucuccgacgugggcuucguggaggccuacaacaacugcaccgggggcagcgagauccgcgaccugcugugcguccaguccuucaacgggaucaaggugcugcccccgauccugagcgagacgcagaucuccggcuacaccaccgcggccaccguggccgccauguucccgcccuggagcgcggccgccgggguccccuucucccugaacgugcaguaccggaucaacggccucggcgugacgauggacguccugaacaagaaccagaagcugaucgccaacgccuucaacaaggcgcuccugagcauccagaacggguucaccgccaccaacuccgcccuggccaagauccagagcguggugaacgccaacgcgcaggcccucaacucccugcugcagcagcuguucaacaaguucggcgccaucagcagcucccuccaggagauccugagccgccucgacccgcccgaggcccagguccagaucgaccggcugaucaacgggcgccugaccgcccucaacgcguacgugucccagcagcugagcgacaucacgcugaucaaggccggcgccucccgggccaucgagaaggugaacgagugcgucaagagccagagcccccgcaucaacuucugcgggaacggcaaccacauccucucccuggugcagaacgcgcccuacggccuccucuucauccacuucuccuacaagcccaccagcuucaagaccgugcuggucucccccgggcugugccucagcggcgaccgggggaucgcccccaagcagggcuacuucaucaagcagaacgacuccuggauguucaccgggagcuccuacuacuaccccgagccgaucagcgacaagaacguggucuucaugaacuccugcagcgugaacuucacgaaggcccccuucaucuaccugaacaacuccauccccaaccugagcgacuucgaggccgagcucagccugugguucaagaaccacaccuccaucgcccccaaccugaccuucaacagccacaucaacgcgaccuuccucgaccuguacuacgagaugaacgugauccaggaguccaucaagagccugaacggcggcuacaucccggaggcgccccgcgacgggcaggccuacguccggaaggacggcgagugggugcuccuguccacguucugaggacuaguuauaagacugacuagcccgaugggccucccaacgggcccuccuccccuccuugcaccgagauuaauaaaaaaaaaaaaaaaaaaaaaaaaaaaaaaaaaaaaaaaaaaaaaaaaaaaaaaaaaaaaaaaaugcaucccccccccccccccccccccccccccccccaaaggcucuuuucagagccaccagaauu

SEQ ID NO: 15148 - RNA, 3733 nt, Artificial Sequence
  HCoV/229E/BN1/GER/2015__AOG74783.1 spike protein mRNA gc (1-1171)
aggagaaagcuuaccauguucgugcugcucgucgccuacgcccugcugcacaucgcgggcugccagaccaccaacgggacgaacaccagccacuccgugugcaacggcugcguggggcacagcgagaacgucuucgccguggaguccggcggguacauccccagcaacuucgccuucaacaacugguuccuccugaccaacaccuccagcguggucgacggcguggugcgcuccuuccagccgcugcuccugaacugccuguggagcgucuccggcagccaguucacgaccggguucguguacuucaacggcaccgggcggggcgccugcaagggguucuacuccaacgccagcuccgacgugauccgcuacaacaucaacuucgaggagaaccuccggcgcggcaccauccuguucaagacgagcuacggcgcggucguguucuacugcaccaacaacacccugguguccggggacgcccacauccccagcggcaccguccucgggaacuucuacugcuucgugaacacgaccaucggcaacgagaccaccuccgccuucgugggcgcccugcccaagacgguccgggaguucgugaucagccgcaccgggcacuucuacaucaacggcuaccgguacuucucccugggggacguggaggcggucaacuucaacgugaccaacgccgccaccacggugugcaccgucgcccucgccagcuacgcggacgugcuggucaacgugagccagaccgccaucgccaacaucaucuacugcaacuccgugaucaaccgccugcggugcgaccagcucagcuucgacguccccgacggcuucuacuccaccagcccgauccagcccguggagcugcccguguccaucgucagccugcccguguaccacaagcacacguucaucgugcucuacgucaacuucgagcaccgccgggggccgggcaagugcuacaacugccgccccgccgugaucaacaucacccuggccaacuucaacgagaccaagggcccccugugcguggacaccucccacuucacgacccaguucgucgacaacgugaagcucgcgcgguggagcgccuccaucaacaccgggaacugccccuucagcuucggcaaggugaacaacuucgucaaguucggguccgugugcuucagccugaaggacaucccgggcgggugcgccaugcccaucauggccaaccuggugaacuccaagagccacaacaucggcucccucuacgucagcugguccgacggcgacgugaucaccggggugcccaagcccgucgagggcgugagcuccuucaugaacgugacgcugaacaagugcaccaaguacaacaucuacgacgucagcggggugggcgugauccgcaucagcaacgacaccuuccugaacgggaucaccuacacguccaccagcggcaaccuccugggcuucaaggacgucaccaacgggaccaucuacuccaucaccccgugcaacccgcccgaccagcuggugguguaccagcaggccgucgugggcgcgaugcucagcgagaacuucacguccuacggguucagcaacguggucgagaugcccaaguucuucuacgccuccaacggcaccuacaacugcaccgacgccgugcugaccuacagcuccuucggcgugugcgccgacgggagcaucaucgccguccagccccggaacguguccuacgacagcguguccgcgaucgucacggccaaccugagcauccccuucaacuggaccaccuccguccagguggaguaccuccagaucaccagcacgcccaucgugguggacugcuccaccuacgugugcaacggcaacguccgcugcguggagcugcugaagcaguacaccagcgccugcaagaccaucgaggacgcccuccggaacagcgcgaugcuggaguccgccgacgugagcgagaugcugacguucgacaagaaggccuucacccucgccaacgucuccagcuucggggacuacaaccuguccagcgugauccccucccugccgcgcagcggcucccggguggccgggcgcagcgcgaucgaggacauccucuucuccaagcuggucaccagcggccugggcaccguggacgccgacuacaagaagugcacgaaggggcuguccaucgccgaccucgccugcgcccaguacuacaacggcaucaugguccugcccgggguggcggacgccgagcggauggccauguacaccggcagccugaucgggggcaucgcccucggcgggcugaccuccgccgcgagcauccccuucucccuggccauccagagccgccucaacuacguggcccugcagaccgacguccugcaggagaaccagcgcauccucgccgcguccuucaacaaggccaugacgaacaucguggacgccuucaccggcgugaacgacgccaucacccagaccagccaggcccugcagacggucgcgaccgcccugaacaagauccaggacguggugaaccagcaggggaacagccucaaccaccugaccucccagcugcggcagaacuuccaggccaucagcuccagcauccaggccaucuacgaccgccucgacaucauccaggccgaccagcaggucgaccggcugaucaccggccgccuggcggcccucaacguguucgugucccacacgcugaccaaguacaccgagguccgggccagccgccagcuggcccagcagaaggugaacgagugcgugaagucccagagcaagcgguacggguucugcggcaacggcacccacaucuucucccucgucaacgccgcgcccgaggggcugguguuccugcacacggugcuccugccgacccaguacaaggacgucgaggccuggagcggccugugcguggacgggaucaacggcuacgugcuccgccagcccaaccuggcccuguacaaggaggggaacuacuaccggaucaccucccgcaucauguucgagccccggaucccgaccaucgccgacuucguccagaucgagaacugcaacgugacguucgugaacaucagccgcuccgagcuccagaccaucguccccgaguacaucgacgugaacaagacccugcaggagcugagcuacaagcuccccaacuacaccgugcccgaccuggucguggagcaguacaaccagaccauccugaaccucacguccgagaucagcacccuggagaacaaguccgcggagcugaacuacaccgugcagaagcuccagacccugaucgacaacaucaacagcacgcuggucgaccucaaguggcugaaccggguggagaccuacaucaaguggccgugguggguguggcugugcaucuccgucgugcucaucuucguggucagcaugcugcugcucugcugcugcagcaccggcugcugcggcuucuucuccugcuucgccagcuccauccgcgggugcugcgagagcaccaagcugcccuacuacgacguggagaagauccacauccagugaggacuaguuauaagacugacuagcccgaugggccucccaacgggcccuccuccccuccuugcaccgagauuaauaaaaaaaaaaaaaaaaaaaaaaaaaaaaaaaaaaaaaaaaaaaaaaaaaaaaaaaaaaaaaaaaugcaucccccccccccccccccccccccccccccccaaaggcucuuuucagagccaccagaauu

SEQ ID NO: 15149 - RNA, 3733 nt, Artificial Sequence
  HCoV/229E/BN1/GER/2015__AOG74783.1 spike protein mRNA gc (1-1171)(I869P_I870P)
aggagaaagcuuaccauguucgugcugcucgucgccuacgcccugcugcacaucgcgggcugccagaccaccaacgggacgaacaccagccacuccgugugcaacggcugcguggggcacagcgagaacgucuucgccguggaguccggcggguacauccccagcaacuucgccuucaacaacugguuccuccugaccaacaccuccagcguggucgacggcguggugcgcuccuuccagccgcugcuccugaacugccuguggagcgucuccggcagccaguucacgaccggguucguguacuucaacggcaccgggcggggcgccugcaagggguucuacuccaacgccagcuccgacgugauccgcuacaacaucaacuucgaggagaaccuccggcgcggcaccauccuguucaagacgagcuacggcgcggucguguucuacugcaccaacaacacccugguguccggggacgcccacauccccagcggcaccguccucgggaacuucuacugcuucgugaacacgaccaucggcaacgagaccaccuccgccuucgugggcgcccugcccaagacgguccgggaguucgugaucagccgcaccgggcacuucuacaucaacggcuaccgguacuucucccugggggacguggaggcggucaacuucaacgugaccaacgccgccaccacggugugcaccgucgcccucgccagcuacgcggacgugcuggucaacgugagccagaccgccaucgccaacaucaucuacugcaacuccgugaucaaccgccugcggugcgaccagcucagcuucgacguccccgacggcuucuacuccaccagcccgauccagcccguggagcugcccguguccaucgucagccugcccguguaccacaagcacacguucaucgugcucuacgucaacuucgagcaccgccgggggccgggcaagugcuacaacugccgccccgccgugaucaacaucacccuggccaacuucaacgagaccaagggcccccugugcguggacaccucccacuucacgacccaguucgucgacaacgugaagcucgcgcgguggagcgccuccaucaacaccgggaacugccccuucagcuucggcaaggugaacaacuucgucaaguucggguccgugugcuucagccugaaggacaucccgggcgggugcgccaugcccaucauggccaaccuggugaacuccaagagccacaacaucggcucccucuacgucagcugguccgacggcgacgugaucaccggggugcccaagcccgucgagggcgugagcuccuucaugaacgugacgcugaacaagugcaccaaguacaacaucuacgacgucagcggggugggcgugauccgcaucagcaacgacaccuuccugaacgggaucaccuacacguccaccagcggcaaccuccugggcuucaaggacgucaccaacgggaccaucuacuccaucaccccgugcaacccgcccgaccagcuggugguguaccagcaggccgucgugggcgcgaugcucagcgagaacuucacguccuacggguucagcaacguggucgagaugcccaaguucuucuacgccuccaacggcaccuacaacugcaccgacgccgugcugaccuacagcuccuucggcgugugcgccgacgggagcaucaucgccguccagccccggaacguguccuacgacagcguguccgcgaucgucacggccaaccugagcauccccuucaacuggaccaccuccguccagguggaguaccuccagaucaccagcacgcccaucgugguggacugcuccaccuacgugugcaacggcaacguccgcugcguggagcugcugaagcaguacaccagcgccugcaagaccaucgaggacgcccuccggaacagcgcgaugcuggaguccgccgacgugagcgagaugcugacguucgacaagaaggccuucacccucgccaacgucuccagcuucggggacuacaaccuguccagcgugauccccucccugccgcgcagcggcucccggguggccgggcgcagcgcgaucgaggacauccucuucuccaagcuggucaccagcggccugggcaccguggacgccgacuacaagaagugcacgaaggggcuguccaucgccgaccucgccugcgcccaguacuacaacggcaucaugguccugcccgggguggcggacgccgagcggauggccauguacaccggcagccugaucgggggcaucgcccucggcgggcugaccuccgccgcgagcauccccuucucccuggccauccagagccgccucaacuacguggcccugcagaccgacguccugcaggagaaccagcgcauccucgccgcguccuucaacaaggccaugacgaacaucguggacgccuucaccggcgugaacgacgccaucacccagaccagccaggcccugcagacggucgcgaccgcccugaacaagauccaggacguggugaaccagcaggggaacagccucaaccaccugaccucccagcugcggcagaacuuccaggccaucagcuccagcauccaggccaucuacgaccgccucgacccgccccaggccgaccagcaggucgaccggcugaucaccggccgccuggcggcccucaacguguucgugucccacacgcugaccaaguacaccgagguccgggccagccgccagcuggcccagcagaaggugaacgagugcgugaagucccagagcaagcgguacggguucugcggcaacggcacccacaucuucucccucgucaacgccgcgcccgaggggcugguguuccugcacacggugcuccugcccacccaguacaaggacgucgaggccuggagcggccugugcguggacgggaucaacggcuacgugcuccgccagccgaaccuggcccuguacaaggaggggaacuacuaccggaucaccucccgcaucauguucgagccccggauccccaccaucgccgacuucguccagaucgagaacugcaacgugacguucgugaacaucagccgcuccgagcuccagaccaucguccccgaguacaucgacgugaacaagacccugcaggagcugagcuacaagcucccgaacuacaccgugcccgaccuggucguggagcaguacaaccagaccauccugaaccucacguccgagaucagcacccuggagaacaaguccgcggagcugaacuacaccgugcagaagcuccagacccugaucgacaacaucaacagcacgcuggucgaccucaaguggcugaaccggguggagaccuacaucaaguggcccugguggguguggcugugcaucuccgucgugcucaucuucguggucagcaugcugcugcucugcugcugcagcaccggcugcugcggcuucuucuccugcuucgccagcuccauccgcgggugcugcgagagcaccaagcugcccuacuacgacguggagaagauccacauccagugaggacuaguuauaagacugacuagcccgaugggccucccaacgggcccuccuccccuccuugcaccgagauuaauaaaaaaaaaaaaaaaaaaaaaaaaaaaaaaaaaaaaaaaaaaaaaaaaaaaaaaaaaaaaaaaaugcaucccccccccccccccccccccccccccccccaaaggcucuuuucagagccaccagaauu

SEQ ID NO: 15150 - RNA, 3544 nt, Artificial Sequence
  HCoV/229E/BN1/GER/2015__AOG74783.1 spike protein mRNA gc (variant)
aggagaaagcuuaccauguucgugcugcucgucgccuacgcccugcugcacaucgcgggcugccagaccaccaacgggacgaacaccagccacuccgugugcaacggcugcguggggcacagcgagaacgucuucgccguggaguccggcggguacauccccagcaacuucgccuucaacaacugguuccuccugaccaacaccuccagcguggucgacggcguggugcgcuccuuccagccgcugcuccugaacugccuguggagcgucuccggcagccaguucacgaccggguucguguacuucaacggcaccgggcggggcgccugcaagggguucuacuccaacgccagcuccgacgugauccgcuacaacaucaacuucgaggagaaccuccggcgcggcaccauccuguucaagacgagcuacggcgcggucguguucuacugcaccaacaacacccugguguccggggacgcccacauccccagcggcaccguccucgggaacuucuacugcuucgugaacacgaccaucggcaacgagaccaccuccgccuucgugggcgcccugcccaagacgguccgggaguucgugaucagccgcaccgggcacuucuacaucaacggcuaccgguacuucucccugggggacguggaggcggucaacuucaacgugaccaacgccgccaccacggugugcaccgucgcccucgccagcuacgcggacgugcuggucaacgugagccagaccgccaucgccaacaucaucuacugcaacuccgugaucaaccgccugcggugcgaccagcucagcuucgacguccccgacggcuucuacuccaccagcccgauccagcccguggagcugcccguguccaucgucagccugcccguguaccacaagcacacguucaucgugcucuacgucaacuucgagcaccgccgggggccgggcaagugcuacaacugccgccccgccgugaucaacaucacccuggccaacuucaacgagaccaagggcccccugugcguggacaccucccacuucacgacccaguucgucgacaacgugaagcucgcgcgguggagcgccuccaucaacaccgggaacugccccuucagcuucggcaaggugaacaacuucgucaaguucggguccgugugcuucagccugaaggacaucccgggcgggugcgccaugcccaucauggccaaccuggugaacuccaagagccacaacaucggcucccucuacgucagcugguccgacggcgacgugaucaccggggugcccaagcccgucgagggcgugagcuccuucaugaacgugacgcugaacaagugcaccaaguacaacaucuacgacgucagcggggugggcgugauccgcaucagcaacgacaccuuccugaacgggaucaccuacacguccaccagcggcaaccuccugggcuucaaggacgucaccaacgggaccaucuacuccaucaccccgugcaacccgcccgaccagcuggugguguaccagcaggccgucgugggcgcgaugcucagcgagaacuucacguccuacggguucagcaacguggucgagaugcccaaguucuucuacgccuccaacggcaccuacaacugcaccgacgccgugcugaccuacagcuccuucggcgugugcgccgacgggagcaucaucgccguccagccccggaacguguccuacgacagcguguccgcgaucgucacggccaaccugagcauccccuucaacuggaccaccuccguccagguggaguaccuccagaucaccagcacgcccaucgugguggacugcuccaccuacgugugcaacggcaacguccgcugcguggagcugcugaagcaguacaccagcgccugcaagaccaucgaggacgcccuccggaacagcgcgaugcuggaguccgccgacgugagcgagaugcugacguucgacaagaaggccuucacccucgccaacgucuccagcuucggggacuacaaccuguccagcgugauccccucccugccgcgcagcggcucccggguggccgggcgcagcgcgaucgaggacauccucuucuccaagcuggucaccagcggccugggcaccguggacgccgacuacaagaagugcacgaaggggcuguccaucgccgaccucgccugcgcccaguacuacaacggcaucaugguccugcccgggguggcggacgccgagcggauggccauguacaccggcagccugaucgggggcaucgcccucggcgggcugaccuccgccgcgagcauccccuucucccuggccauccagagccgccucaacuacguggcccugcagaccgacguccugcaggagaaccagcgcauccucgccgcguccuucaacaaggccaugacgaacaucguggacgccuucaccggcgugaacgacgccaucacccagaccagccaggcccugcagacggucgcgaccgcccugaacaagauccaggacguggugaaccagcaggggaacagccucaaccaccugaccucccagcugcggcagaacuuccaggccaucagcuccagcauccaggccaucuacgaccgccucgacccgccccaggccgaccagcaggucgaccggcugaucaccggccgccuggcggcccucaacguguucgugucccacacgcugaccaaguacaccgagguccgggccagccgccagcuggcccagcagaaggugaacgagugcgugaagucccagagcaagcgguacggguucugcggcaacggcacccacaucuucucccucgucaacgccgcgcccgaggggcugguguuccugcacacggugcuccugcccacccaguacaaggacgucgaggccuggagcggccugugcguggacgggaucaacggcuacgugcuccgccagccgaaccuggcccuguacaaggaggggaacuacuaccggaucaccucccgcaucauguucgagccccggauccccaccaucgccgacuucguccagaucgagaacugcaacgugacguucgugaacaucagccgcuccgagcuccagaccaucguccccgaguacaucgacgugaacaagacccugcaggagcugagcuacaagcucccgaacuacaccgugcccgaccuggucguggagcaguacaaccagaccauccugaaccucacguccgagaucagcacccuggagaacaaguccgcggagcugaacuacaccgugcagaagcuccagacccugaucgacaacaucaacagcacgcuggucgaccucaaguggcugaaccggguggagaccugaggacuaguuauaagacugacuagcccgaugggccucccaacgggcccuccuccccuccuugcaccgagauuaauaaaaaaaaaaaaaaaaaaaaaaaaaaaaaaaaaaaaaaaaaaaaaaaaaaaaaaaaaaaaaaaaugcaucccccccccccccccccccccccccccccccaaaggcucuuuucagagccaccagaauu

SEQ ID NO: 15151 - RNA, 3625 nt, Artificial Sequence
  HCoV/229E/BN1/GER/2015__AOG74783.1 spike protein mRNA gc (variant)
aggagaaagcuuaccauguucgugcugcucgucgccuacgcccugcugcacaucgccggcugccagaccaccaacgggacgaacaccagccacuccgugugcaacggcugcguggggcacagcgagaacgucuucgccguggaguccggcggguacauccccagcaacuucgccuucaacaacugguuccuccugaccaacaccuccagcguggucgacggcguggugcgcuccuuccagccgcugcuccugaacugccuguggagcgucuccggcagccaguucacgaccggguucguguacuucaacggcaccgggcggggcgccugcaagggguucuacuccaacgccagcuccgacgugauccgcuacaacaucaacuucgaggagaaccuccggcgcggcaccauccuguucaagacgagcuacggcgcggucguguucuacugcaccaacaacacccugguguccggggacgcccacauccccagcggcaccguccucgggaacuucuacugcuucgugaacacgaccaucggcaacgagaccaccuccgccuucgugggcgcccugcccaagacgguccgggaguucgugaucagccgcaccgggcacuucuacaucaacggcuaccgguacuucucccugggggacguggaggcggucaacuucaacgugaccaacgccgccaccacggugugcaccgucgcccucgccagcuacgcggacgugcuggucaacgugagccagaccgccaucgccaacaucaucuacugcaacuccgugaucaaccgccugcggugcgaccagcucagcuucgacguccccgacggcuucuacuccaccagcccgauccagcccguggagcugcccguguccaucgucagccugcccguguaccacaagcacacguucaucgugcucuacgucaacuucgagcaccgccgggggccgggcaagugcuacaacugccgccccgccgugaucaacaucacccuggccaacuucaacgagaccaagggcccccugugcguggacaccucccacuucacgacccaguucgucgacaacgugaagcucgcgcgguggagcgccuccaucaacaccgggaacugccccuucagcuucggcaaggugaacaacuucgucaaguucggguccgugugcuucagccugaaggacaucccgggcgggugcgccaugcccaucauggccaaccuggugaacuccaagagccacaacaucggcucccucuacgucagcugguccgacggcgacgugaucaccggggugcccaagcccgucgagggcgugagcuccuucaugaacgugacgcugaacaagugcaccaaguacaacaucuacgacgucagcggggugggcgugauccgcaucagcaacgacaccuuccugaacgggaucaccuacacguccaccagcggcaaccuccugggcuucaaggacgucaccaacgggaccaucuacuccaucaccccgugcaacccgcccgaccagcuggugguguaccagcaggccgucgugggcgcgaugcucagcgagaacuucacguccuacggguucagcaacguggucgagaugcccaaguucuucuacgccuccaacggcaccuacaacugcaccgacgccgugcugaccuacagcuccuucggcgugugcgccgacgggagcaucaucgccguccagccccggaacguguccuacgacagcguguccgcgaucgucacggccaaccugagcauccccuucaacuggaccaccuccguccagguggaguaccuccagaucaccagcacgcccaucgugguggacugcuccaccuacgugugcaacggcaacguccgcugcguggagcugcugaagcaguacaccagcgccugcaagaccaucgaggacgcccuccggaacagcgcgaugcuggaguccgccgacgugagcgagaugcugacguucgacaagaaggccuucacccucgccaacgucuccagcuucggggacuacaaccuguccagcgugauccccucccugccgcgcagcggcucccggguggccgggcgcagcgcgaucgaggacauccucuucuccaagcuggucaccagcggccugggcaccguggacgccgacuacaagaagugcacgaaggggcuguccaucgccgaccucgccugcgcccaguacuacaacggcaucaugguccugcccgggguggcggacgccgagcggauggccauguacaccggcagccugaucgggggcaucgcccucggcgggcugaccuccgccgcgagcauccccuucucccuggccauccagagccgccucaacuacguggcccugcagaccgacguccugcaggagaaccagcgcauccucgccgcguccuucaacaaggccaugacgaacaucguggacgccuucaccggcgugaacgacgccaucacccagaccagccaggcccugcagacggucgcgaccgcccugaacaagauccaggacguggugaaccagcaggggaacagccucaaccaccugaccucccagcugcggcagaacuuccaggccaucagcuccagcauccaggccaucuacgaccgccucgacccgccccaggccgaccagcaggucgaccggcugaucaccggccgccuggcggcccucaacguguucgugucccacacgcugaccaaguacaccgagguccgggccagccgccagcuggcccagcagaaggugaacgagugcgugaagucccagagcaagcgguacggguucugcggcaacggcacccacaucuucucccucgucaacgccgcgcccgaggggcugguguuccugcacacggugcuccugcccacccaguacaaggacgucgaggccuggagcggccugugcguggacgggaucaacggcuacgugcuccgccagccgaaccuggcccuguacaaggaggggaacuacuaccggaucaccucccgcaucauguucgagccccggauccccaccaucgccgacuucguccagaucgagaacugcaacgugacguucgugaacaucagccgcuccgagcuccagaccaucguccccgaguacaucgacgugaacaagacccugcaggagcugagcuacaagcucccgaacuacaccgugcccgaccuggucguggagcaguacaaccagaccauccugaaccucacguccgagaucagcacccuggagaacaaguccgcggagcugaacuacaccgugcagaagcuccagacccugaucgacaacaucaacagcacgcuggucgaccucaaguggcugaaccggguggagaccggcggcuacauccccgaggcgccccgcgacgggcaggccuacgugcggaaggacggcgaguggguccugcucuccaccuucugaggacuaguuauaagacugacuagcccgaugggccucccaacgggcccuccuccccuccuugcaccgagauuaauaaaaaaaaaaaaaaaaaaaaaaaaaaaaaaaaaaaaaaaaaaaaaaaaaaaaaaaaaaaaaaaaugcaucccccccccccccccccccccccccccccccaaaggcucuuuucagagccaccagaauu

SEQ ID NO: 15152 - RNA, 4288 nt, Artificial Sequence
  HCoV/NL63/RPTEC/2004__AFV53148.1 spike protein mRNA gc (1-1356)
aggagaaagcuuaccaugaagcuguuccucauccugcuggugcucccccuggccagcugcuucuucacgugcaacuccaacgccaaccugagcaugcuccagcugggcgucccggacaacuccagcaccaucgugaccgggcugcuccccacccacugguucugcgcgaaccaguccaccagcguguacuccgccaacggcuucuucuacaucgacgucgggaaccaccgcagcgccuucgcccugcacaccggcuacuacgacgccaaccaguacuacaucuacgugacgaacgagaucgggcugaacgcguccgugacccucaagaucugcaaguucagccggaacaccaccuucgacuuccuguccaacgccagcuccagcuucgacugcaucgucaaccuccucuucacggagcagcugggcgcgccccugggcaucaccaucuccggggagaccgugcgccuccaccuguacaacgugacccggacguucuacguccccgccgccuacaagcugaccaagcucagcgugaagugcuacuucaacuacuccugcguguucagcgucgugaacgccaccgugaccgucaacgugacgacccacaacggccgcguggucaacuacaccgugugcgacgacugcaacggguacaccgacaacaucuucuccgugcagcaggacggccggaucccgaacggguuccccuucaacaacugguuccugcugacgaacggcagcacccucgucgacggcgugagccgccuguaccagccccugcggcugaccugccuguggcccgugccggggcugaaguccagcaccggcuucgucuacuucaacgccacgggguccgacgugaacugcaacggcuaccagcacaacagcgucguggacgugaugcgcuacaaccucaacuucuccgccaacagccuggacaaccugaaguccggcgucaucguguucaagacccuccaguacgacgugcuguucuacugcagcaacuccagcuccgggguccuggacaccaccauccccuucggccccagcucccagcccuacuacugcuucaucaacagcacgaucaacaccacccacguguccaccuucguggggauccucccgcccacgguccgggagaucgugguggcccgcaccggccaguucuacaucaacggguucaaguacuucgaccugggcuucaucgaggcggucaacuucaacgugaccaccgccagcgccacggacuucuggaccguggccuucgccaccuucgucgacgugcuggugaacgucuccgcgaccaacauccagaaccuccuguacugcgacagccccuucgagaagcugcagugcgagcaccuccaguucggccugcaggacggguucuacuccgccaacuuccuggacgacaacgugcuccccgagaccuacguggcccugccgaucuacuaccagcacacggacaucaacuucaccgccaccgccagcuucggcgggagcugcuacgucugcaagccccaccaggugaacaucucccugaacggcaacaccagcgugugcguccggacgucccacuucagcauccgcuacaucuacaaccgggugaaguccgggagccccggcgacuccagcuggcacaucuaccugaaguccgggaccugccccuucagcuucuccaagcucaacaacuuccagaaguucaagaccaucugcuucagcaccguggaggucccgggguccugcaacuucccccuggaggcgacguggcacuacaccagcuacaccaucgugggcgcccuguacgugaccugguccgaggggaacagcaucacgggcguccccuaccccguguccgggauccgcgaguucagcaaccucgugcugaacaacugcaccaaguacaacaucuacgacuacgucggcaccggcaucauccggagcuccaaccagagccuggccgggggcaucaccuacguguccaacagcgggaaccuccugggcuucaagaacguguccacgggcaacaucuucaucgucaccccgugcaaccagcccgaccagguggccguguaccagcagagcaucaucggggccaugaccgcggucaacgagucccgcuacggccugcagaaccuccugcagcugcccaacuucuacuacgugagcaacgggggcaacaacugcaccacggccgugaugaccuacuccaacuucgggaucugcgccgacggcagccucauccccguccggccgcgcaacuccagcgacaacggcaucuccgccaucaucaccgcgaaccugagcauccccuccaacuggaccacgagcguccagguggaguaccugcagaucaccuccacccccaucgugguggacugcgccaccuacgugugcaacgggaacccgcggugcaagaaccuccugaagcaguacacgagcgccugcaagaccaucgaggacgcccugcgccucuccgcccaccuggagaccaacgacgucagcagcaugcugaccuucgacuccaacgcguucagccucgccaacgugacguccuucggcgacuacaaccugagcuccgugcugccccagcggaacauccgcagcucccgcaucgccgggcggagcgcccucgaggaccugcuguucuccaaggucgugaccagcggccucgggaccgucgacguggacuacaaguccugcaccaagggccugagcaucgccgaccuggcgugcgcccaguacuacaacggcaucauggugcuccccggggucgccgacgccgagcgcauggccauguacacgggcucccugaucgggggcauggugcugggcggccucaccagcgcggccgccauccccuucucccuggcccugcaggcgcggcucaacuacguggcccugcagaccgacguccugcaggagaaccagaagauccucgccgccagcuucaacaaggccaucaacaacaucguggcguccuucagcuccgugaacgacgccaucacccagaccgccgaggccauccacacggucaccaucgcccugaacaagauccaggacguggugaaccagcagggcagcgcgcugaaccaccucaccagccagcugcgccacaacuuccaggccaucuccaacagcauccaggccaucuacgaccggcuggacuccauccaggccgaccagcaggucgaccgccucaucaccgggcggcuggccgcgcugaacgccuucgugagccaggugcucaacaaguacacggagguccgcggcucccggcgccuggcccagcagaagaucaacgagugcgucaagagccaguccaaccgguacggguucugcggcaacgggacccacaucuucagcaucgugaacuccgccccggacggccuccuguuccugcacaccgugcugcuccccaccgacuacaagaacgugaaggcguggagcggcaucugcguggacgggaucuacggcuacguccugcgccagcccaaccuggugcucuacuccgacaacgggguguuccgggucacgagccgcaucauguuccagccccggcugccggugcuguccgacuucgugcagaucuacaacugcaacgucaccuucgugaacaucagccgcguggagcuccacaccgucauccccgacuacguggacgugaacaagacccugcaggaguucgcccagaaccugcccaaguacgucaagcccaacuucgaccucacgccguucaaccugaccuaccugaaccucuccagcgagcugaagcagcuggaggccaagaccgccucccucuuccagaccacgguggagcugcagggccugaucgaccagaucaacagcaccuacguggaccucaagcugcugaaccgguucgagaacuacaucaaguggcccuggugggucuggcucaucaucuccgugguguucgucgugcugcugagccuccugguguucugcugccugagcaccggcugcugcgggugcugcaacugccucaccuccagcaugcgcggcugcugcgacugcggguccacgaagcugcccuacuacgaguucgagaagguccacgugcagugaggacuaguuauaagacugacuagcccgaugggccucccaacgggcccuccuccccuccuugcaccgagauuaauaaaaaaaaaaaaaaaaaaaaaaaaaaaaaaaaaaaaaaaaaaaaaaaaaaaaaaaaaaaaaaaaugcaucccccccccccccccccccccccccccccccaaaggcucuuuucagagccaccagaauu

SEQ ID NO: 15153 - RNA, 4288 nt, Artificial Sequence
  HCoV/NL63/RPTEC/2004__AFV53148.1 spike protein mRNA gc (1-1356)(S1052P_I1053P)
aggagaaagcuuaccaugaagcuguuccucauccugcuggugcucccccuggccagcugcuucuucacgugcaacuccaacgccaaccugagcaugcuccagcugggcgucccggacaacuccagcaccaucgugaccgggcugcuccccacccacugguucugcgcgaaccaguccaccagcguguacuccgccaacggcuucuucuacaucgacgucgggaaccaccgcagcgccuucgcccugcacaccggcuacuacgacgccaaccaguacuacaucuacgugacgaacgagaucgggcugaacgcguccgugacccucaagaucugcaaguucagccggaacaccaccuucgacuuccuguccaacgccagcuccagcuucgacugcaucgucaaccuccucuucacggagcagcugggcgcgccccugggcaucaccaucuccggggagaccgugcgccuccaccuguacaacgugacccggacguucuacguccccgccgccuacaagcugaccaagcucagcgugaagugcuacuucaacuacuccugcguguucagcgucgugaacgccaccgugaccgucaacgugacgacccacaacggccgcguggucaacuacaccgugugcgacgacugcaacggguacaccgacaacaucuucuccgugcagcaggacggccggaucccgaacggguuccccuucaacaacugguuccugcugacgaacggcagcacccucgucgacggcgugagccgccuguaccagccccugcggcugaccugccuguggcccgugccggggcugaaguccagcaccggcuucgucuacuucaacgccacgggguccgacgugaacugcaacggcuaccagcacaacagcgucguggacgugaugcgcuacaaccucaacuucuccgccaacagccuggacaaccugaaguccggcgucaucguguucaagacccuccaguacgacgugcuguucuacugcagcaacuccagcuccgggguccuggacaccaccauccccuucggccccagcucccagcccuacuacugcuucaucaacagcacgaucaacaccacccacguguccaccuucguggggauccucccgcccacgguccgggagaucgugguggcccgcaccggccaguucuacaucaacggguucaaguacuucgaccugggcuucaucgaggcggucaacuucaacgugaccaccgccagcgccacggacuucuggaccguggccuucgccaccuucgucgacgugcuggugaacgucuccgcgaccaacauccagaaccuccuguacugcgacagccccuucgagaagcugcagugcgagcaccuccaguucggccugcaggacggguucuacuccgccaacuuccuggacgacaacgugcuccccgagaccuacguggcccugccgaucuacuaccagcacacggacaucaacuucaccgccaccgccagcuucggcgggagcugcuacgucugcaagccccaccaggugaacaucucccugaacggcaacaccagcgugugcguccggacgucccacuucagcauccgcuacaucuacaaccgggugaaguccgggagccccggcgacuccagcuggcacaucuaccugaaguccgggaccugccccuucagcuucuccaagcucaacaacuuccagaaguucaagaccaucugcuucagcaccguggaggucccgggguccugcaacuucccccuggaggcgacguggcacuacaccagcuacaccaucgugggcgcccuguacgugaccugguccgaggggaacagcaucacgggcguccccuaccccguguccgggauccgcgaguucagcaaccucgugcugaacaacugcaccaaguacaacaucuacgacuacgucggcaccggcaucauccggagcuccaaccagagccuggccgggggcaucaccuacguguccaacagcgggaaccuccugggcuucaagaacguguccacgggcaacaucuucaucgucaccccgugcaaccagcccgaccagguggccguguaccagcagagcaucaucggggccaugaccgcggucaacgagucccgcuacggccugcagaaccuccugcagcugcccaacuucuacuacgugagcaacgggggcaacaacugcaccacggccgugaugaccuacuccaacuucgggaucugcgccgacggcagccucauccccguccggccgcgcaacuccagcgacaacggcaucuccgccaucaucaccgcgaaccugagcauccccuccaacuggaccacgagcguccagguggaguaccugcagaucaccuccacccccaucgugguggacugcgccaccuacgugugcaacgggaacccgcggugcaagaaccuccugaagcaguacacgagcgccugcaagaccaucgaggacgcccugcgccucuccgcccaccuggagaccaacgacgucagcagcaugcugaccuucgacuccaacgcguucagccucgccaacgugacguccuucggcgacuacaaccugagcuccgugcugccccagcggaacauccgcagcucccgcaucgccgggcggagcgcccucgaggaccugcuguucuccaaggucgugaccagcggccucgggaccgucgacguggacuacaaguccugcaccaagggccugagcaucgccgaccuggcgugcgcccaguacuacaacggcaucauggugcuccccggggucgccgacgccgagcgcauggccauguacacgggcucccugaucgggggcauggugcugggcggccucaccagcgcggccgccauccccuucucccuggcccugcaggcgcggcucaacuacguggcccugcagaccgacguccugcaggagaaccagaagauccucgccgccagcuucaacaaggccaucaacaacaucguggcguccuucagcuccgugaacgacgccaucacccagaccgccgaggccauccacacggucaccaucgcccugaacaagauccaggacguggugaaccagcagggcagcgcgcugaaccaccucaccagccagcugcgccacaacuuccaggccaucuccaacagcauccaggccaucuacgaccggcuggacccgccccaggccgaccagcaggucgaccgccucaucaccgggcggcuggccgcgcugaacgccuucgugucccaggugcucaacaaguacacggagguccgcggcagccggcgccuggcccagcagaagaucaacgagugcgugaagucccagagcaaccgguacggguucugcggcaacgggacccacaucuucuccaucgugaacagcgcccccgacggccuccuguuccugcacaccguccugcuccccaccgacuacaagaacgugaaggcgugguccggcaucugcguggacgggaucuacggcuacguccugcgccagccgaaccuggugcucuacagcgacaacgggguguuccgggucacgucccgcaucauguuccagccccggcugcccgugcugagcgacuucgugcagaucuacaacugcaacgucaccuucgugaacaucucccgcguggagcuccacaccgucauccccgacuacguggacgugaacaagacccugcaggaguucgcccagaaccugccgaaguacgucaagcccaacuucgaccucacgcccuucaaccugaccuaccugaaccucagcuccgagcugaagcagcuggaggccaagaccgccagccucuuccagaccacgguggagcugcagggccugaucgaccagaucaacuccaccuacguggaccucaagcugcugaaccgguucgagaacuacaucaaguggcccuggugggucuggcucaucaucagcgugguguucgucgugcugcugucccuccugguguucugcugccugagcaccggcugcugcgggugcugcaacugccucaccagcuccaugcgcggcugcugcgacugcgggagcacgaagcugccguacuacgaguucgagaagguccacgugcagugaggacuaguuauaagacugacuagcccgaugggccucccaacgggcccuccuccccuccuugcaccgagauuaauaaaaaaaaaaaaaaaaaaaaaaaaaaaaaaaaaaaaaaaaaaaaaaaaaaaaaaaaaaaaaaaaugcaucccccccccccccccccccccccccccccccaaaggcucuuuucagagccaccagaauu

SEQ ID NO: 15154 - RNA, 4093 nt, Artificial Sequence
  HCoV/NL63/RPTEC/2004__AFV53148.1 spike protein mRNA gc (variant)
aggagaaagcuuaccaugaagcuguuccucauccugcuggugcucccccuggccagcugcuucuucacgugcaacuccaacgccaaccugagcaugcuccagcugggcgucccggacaacuccagcaccaucgugaccgggcugcuccccacccacugguucugcgcgaaccaguccaccagcguguacuccgccaacggcuucuucuacaucgacgucgggaaccaccgcagcgccuucgcccugcacaccggcuacuacgacgccaaccaguacuacaucuacgugacgaacgagaucgggcugaacgcguccgugacccucaagaucugcaaguucagccggaacaccaccuucgacuuccuguccaacgccagcuccagcuucgacugcaucgucaaccuccucuucacggagcagcugggcgcgccccugggcaucaccaucuccggggagaccgugcgccuccaccuguacaacgugacccggacguucuacguccccgccgccuacaagcugaccaagcucagcgugaagugcuacuucaacuacuccugcguguucagcgucgugaacgccaccgugaccgucaacgugacgacccacaacggccgcguggucaacuacaccgugugcgacgacugcaacggguacaccgacaacaucuucuccgugcagcaggacggccggaucccgaacggguuccccuucaacaacugguuccugcugacgaacggcagcacccucgucgacggcgugagccgccuguaccagccccugcggcugaccugccuguggcccgugccggggcugaaguccagcaccggcuucgucuacuucaacgccacgggguccgacgugaacugcaacggcuaccagcacaacagcgucguggacgugaugcgcuacaaccucaacuucuccgccaacagccuggacaaccugaaguccggcgucaucguguucaagacccuccaguacgacgugcuguucuacugcagcaacuccagcuccgggguccuggacaccaccauccccuucggccccagcucccagcccuacuacugcuucaucaacagcacgaucaacaccacccacguguccaccuucguggggauccucccgcccacgguccgggagaucgugguggcccgcaccggccaguucuacaucaacggguucaaguacuucgaccugggcuucaucgaggcggucaacuucaacgugaccaccgccagcgccacggacuucuggaccguggccuucgccaccuucgucgacgugcuggugaacgucuccgcgaccaacauccagaaccuccuguacugcgacagccccuucgagaagcugcagugcgagcaccuccaguucggccugcaggacggguucuacuccgccaacuuccuggacgacaacgugcuccccgagaccuacguggcccugccgaucuacuaccagcacacggacaucaacuucaccgccaccgccagcuucggcgggagcugcuacgucugcaagccccaccaggugaacaucucccugaacggcaacaccagcgugugcguccggacgucccacuucagcauccgcuacaucuacaaccgggugaaguccgggagccccggcgacuccagcuggcacaucuaccugaaguccgggaccugccccuucagcuucuccaagcucaacaacuuccagaaguucaagaccaucugcuucagcaccguggaggucccgggguccugcaacuucccccuggaggcgacguggcacuacaccagcuacaccaucgugggcgcccuguacgugaccugguccgaggggaacagcaucacgggcguccccuaccccguguccgggauccgcgaguucagcaaccucgugcugaacaacugcaccaaguacaacaucuacgacuacgucggcaccggcaucauccggagcuccaaccagagccuggccgggggcaucaccuacguguccaacagcgggaaccuccugggcuucaagaacguguccacgggcaacaucuucaucgucaccccgugcaaccagcccgaccagguggccguguaccagcagagcaucaucggggccaugaccgcggucaacgagucccgcuacggccugcagaaccuccugcagcugcccaacuucuacuacgugagcaacgggggcaacaacugcaccacggccgugaugaccuacuccaacuucgggaucugcgccgacggcagccucauccccguccggccgcgcaacuccagcgacaacggcaucuccgccaucaucaccgcgaaccugagcauccccuccaacuggaccacgagcguccagguggaguaccugcagaucaccuccacccccaucgugguggacugcgccaccuacgugugcaacgggaacccgcggugcaagaaccuccugaagcaguacacgagcgccugcaagaccaucgaggacgcccugcgccucuccgcccaccuggagaccaacgacgucagcagcaugcugaccuucgacuccaacgcguucagccucgccaacgugacguccuucggcgacuacaaccugagcuccgugcugccccagcggaacauccgcagcucccgcaucgccgggcggagcgcccucgaggaccugcuguucuccaaggucgugaccagcggccucgggaccgucgacguggacuacaaguccugcaccaagggccugagcaucgccgaccuggcgugcgcccaguacuacaacggcaucauggugcuccccggggucgccgacgccgagcgcauggccauguacacgggcucccugaucgggggcauggugcugggcggccucaccagcgcggccgccauccccuucucccuggcccugcaggcgcggcucaacuacguggcccugcagaccgacguccugcaggagaaccagaagauccucgccgccagcuucaacaaggccaucaacaacaucguggcguccuucagcuccgugaacgacgccaucacccagaccgccgaggccauccacacggucaccaucgcccugaacaagauccaggacguggugaaccagcagggcagcgcgcugaaccaccucaccagccagcugcgccacaacuuccaggccaucuccaacagcauccaggccaucuacgaccggcuggacccgccccaggccgaccagcaggucgaccgccucaucaccgggcggcuggccgcgcugaacgccuucgugucccaggugcucaacaaguacacggagguccgcggcagccggcgccuggcccagcagaagaucaacgagugcgugaagucccagagcaaccgguacggguucugcggcaacgggacccacaucuucuccaucgugaacagcgcccccgacggccuccuguuccugcacaccguccugcuccccaccgacuacaagaacgugaaggcgugguccggcaucugcguggacgggaucuacggcuacguccugcgccagccgaaccuggugcucuacagcgacaacgggguguuccgggucacgucccgcaucauguuccagccccggcugcccgugcugagcgacuucgugcagaucuacaacugcaacgucaccuucgugaacaucucccgcguggagcuccacaccgucauccccgacuacguggacgugaacaagacccugcaggaguucgcccagaaccugccgaaguacgucaagcccaacuucgaccucacgcccuucaaccugaccuaccugaaccucagcuccgagcugaagcagcuggaggccaagaccgccagccucuuccagaccacgguggagcugcagggccugaucgaccagaucaacuccaccuacguggaccucaagcugcugaaccgguucgagaacugaggacuaguuauaagacugacuagcccgaugggccucccaacgggcccuccuccccuccuugcaccgagauuaauaaaaaaaaaaaaaaaaaaaaaaaaaaaaaaaaaaaaaaaaaaaaaaaaaaaaaaaaaaaaaaaaugcaucccccccccccccccccccccccccccccccaaaggcucuuuucagagccaccagaauu

SEQ ID NO: 15155 - RNA, 4174 nt, Artificial Sequence
  HCoV/NL63/RPTEC/2004__AFV53148.1 spike protein mRNA gc (variant)
aggagaaagcuuaccaugaagcuguuccucauccugcuggugcucccccuggccagcugcuucuucacgugcaacuccaacgccaaccugagcaugcuccagcugggcgucccggacaacuccagcaccaucgugaccgggcugcuccccacccacugguucugcgcgaaccaguccaccagcguguacuccgccaacggcuucuucuacaucgacgucgggaaccaccgcagcgccuucgcccugcacaccggcuacuacgacgccaaccaguacuacaucuacgugacgaacgagaucgggcugaacgcguccgugacccucaagaucugcaaguucagccggaacaccaccuucgacuuccuguccaacgccagcuccagcuucgacugcaucgucaaccuccucuucacggagcagcugggcgcgccccugggcaucaccaucuccggggagaccgugcgccuccaccuguacaacgugacccggacguucuacguccccgccgccuacaagcugaccaagcucagcgugaagugcuacuucaacuacuccugcguguucagcgucgugaacgccaccgugaccgucaacgugacgacccacaacggccgcguggucaacuacaccgugugcgacgacugcaacggguacaccgacaacaucuucuccgugcagcaggacggccggaucccgaacggguuccccuucaacaacugguuccugcugacgaacggcagcacccucgucgacggcgugagccgccuguaccagccccugcggcugaccugccuguggcccgugccggggcugaaguccagcaccggcuucgucuacuucaacgccacgggguccgacgugaacugcaacggcuaccagcacaacagcgucguggacgugaugcgcuacaaccucaacuucuccgccaacagccuggacaaccugaaguccggcgucaucguguucaagacccuccaguacgacgugcuguucuacugcagcaacuccagcuccgggguccuggacaccaccauccccuucggccccagcucccagcccuacuacugcuucaucaacagcacgaucaacaccacccacguguccaccuucguggggauccucccgcccacgguccgggagaucgugguggcccgcaccggccaguucuacaucaacggguucaaguacuucgaccugggcuucaucgaggcggucaacuucaacgugaccaccgccagcgccacggacuucuggaccguggccuucgccaccuucgucgacgugcuggugaacgucuccgcgaccaacauccagaaccuccuguacugcgacagccccuucgagaagcugcagugcgagcaccuccaguucggccugcaggacggguucuacuccgccaacuuccuggacgacaacgugcuccccgagaccuacguggcccugccgaucuacuaccagcacacggacaucaacuucaccgccaccgccagcuucggcgggagcugcuacgucugcaagccccaccaggugaacaucucccugaacggcaacaccagcgugugcguccggacgucccacuucagcauccgcuacaucuacaaccgggugaaguccgggagccccggcgacuccagcuggcacaucuaccugaaguccgggaccugccccuucagcuucuccaagcucaacaacuuccagaaguucaagaccaucugcuucagcaccguggaggucccgggguccugcaacuucccccuggaggcgacguggcacuacaccagcuacaccaucgugggcgcccuguacgugaccugguccgaggggaacagcaucacgggcguccccuaccccguguccgggauccgcgaguucagcaaccucgugcugaacaacugcaccaaguacaacaucuacgacuacgucggcaccggcaucauccggagcuccaaccagagccuggccgggggcaucaccuacguguccaacagcgggaaccuccugggcuucaagaacguguccacgggcaacaucuucaucgucaccccgugcaaccagcccgaccagguggccguguaccagcagagcaucaucggggccaugaccgcggucaacgagucccgcuacggccugcagaaccuccugcagcugcccaacuucuacuacgugagcaacgggggcaacaacugcaccacggccgugaugaccuacuccaacuucgggaucugcgccgacggcagccucauccccguccggccgcgcaacuccagcgacaacggcaucuccgccaucaucaccgcgaaccugagcauccccuccaacuggaccacgagcguccagguggaguaccugcagaucaccuccacccccaucgugguggacugcgccaccuacgugugcaacgggaacccgcggugcaagaaccuccugaagcaguacacgagcgccugcaagaccaucgaggacgcccugcgccucuccgcccaccuggagaccaacgacgucagcagcaugcugaccuucgacuccaacgcguucagccucgccaacgugacguccuucggcgacuacaaccugagcuccgugcugccccagcggaacauccgcagcucccgcaucgccgggcggagcgcccucgaggaccugcuguucuccaaggucgugaccagcggccucgggaccgucgacguggacuacaaguccugcaccaagggccugagcaucgccgaccuggcgugcgcccaguacuacaacggcaucauggugcuccccggggucgccgacgccgagcgcauggccauguacacgggcucccugaucgggggcauggugcugggcggccucaccagcgcggccgccauccccuucucccuggcccugcaggcgcggcucaacuacguggcccugcagaccgacguccugcaggagaaccagaagauccucgccgccagcuucaacaaggccaucaacaacaucguggcguccuucagcuccgugaacgacgccaucacccagaccgccgaggccauccacacggucaccaucgcccugaacaagauccaggacguggugaaccagcagggcagcgcgcugaaccaccucaccagccagcugcgccacaacuuccaggccaucuccaacagcauccaggccaucuacgaccggcuggacccgccccaggccgaccagcaggucgaccgccucaucaccgggcggcuggccgcgcugaacgccuucgugucccaggugcucaacaaguacacggagguccgcggcagccggcgccuggcccagcagaagaucaacgagugcgugaagucccagagcaaccgguacggguucugcggcaacgggacccacaucuucuccaucgugaacagcgcccccgacggccuccuguuccugcacaccguccugcuccccaccgacuacaagaacgugaaggcgugguccggcaucugcguggacgggaucuacggcuacguccugcgccagccgaaccuggugcucuacagcgacaacgggguguuccgggucacgucccgcaucauguuccagccccggcugcccgugcugagcgacuucgugcagaucuacaacugcaacgucaccuucgugaacaucucccgcguggagcuccacaccgucauccccgacuacguggacgugaacaagacccugcaggaguucgcccagaaccugccgaaguacgucaagcccaacuucgaccucacgcccuucaaccugaccuaccugaaccucagcuccgagcugaagcagcuggaggccaagaccgccagccucuuccagaccacgguggagcugcagggccugaucgaccagaucaacuccaccuacguggaccucaagcugcugaaccgguucgagaacggcggguacauccccgaggccccgcgcgacggccaggcguacguccggaaggacggggagugggugcuccugagcaccuucugaggacuaguuauaagacugacuagcccgaugggccucccaacgggcccuccuccccuccuugcaccgagauuaauaaaaaaaaaaaaaaaaaaaaaaaaaaaaaaaaaaaaaaaaaaaaaaaaaaaaaaaaaaaaaaaaugcaucccccccccccccccccccccccccccccccaaaggcucuuuucagagccaccagaauu

SEQ ID NO: 15156 - RNA, 3988 nt, Artificial Sequence
  Bat SARS-like CoV/WIV1__AGZ48828.1 spike protein mRNA gc (1-1256)
aggagaaagcuuaccaugaagcugcucgugcuggucuucgccacccuggugagcuccuacaccaucgagaagugccucgacuucgacgaccgcacgcccccggccaacacccaguuccugagcucccaccggggcguguacuaccccgacgacaucuuccgcagcaacguccugcaccucgugcaggaccacuuccugcccuucgacuccaacgugacccgguucaucaccuucgggcugaacuucgacaaccccaucaucccguucaaggacggcaucuacuucgcggccacggagaaguccaacgucauccgcggguggguguucggcagcaccaugaacaacaagagccaguccgugaucaucaugaacaacagcaccaaccucgucauccgggccugcaacuucgagcugugcgacaaccccuucuucguggugcugaaguccaacaacacccagauccccagcuacaucuucaacaacgccuucaacugcacguucgaguacgucuccaaggacuucaaccucgaccugggggagaagcccggcaacuucaaggaccugcgcgaguucguguuccggaacaaggacggcuuccuccacguguacagcggguaccagccgaucuccgccgcgagcggccugcccaccggguucaacgcccugaagcccaucuucaagcucccccugggcaucaacaucaccaacuuccgcacccugcucacggccuucccgccccggcccgacuacugggggaccuccgccgcggccuacuucgucggcuaccugaagcccaccaccuucaugcugaaguacgacgagaacggcacgaucaccgacgccguggacugcagccagaacccgcucgccgagcugaagugcuccgucaagagcuucgagaucgacaaggggaucuaccagaccagcaacuuccgcguggcccccuccaaggagguggugcgguuccccaacaucaccaaccugugccccuucggcgaggucuucaacgcgacgaccuucccgagcguguacgccugggagcgcaagcggaucuccaacugcguggccgacuacagcguccucuacaacuccaccagcuucuccaccuucaagugcuacggggugagcgccacgaagcugaacgaccugugcuucuccaacgucuacgccgacagcuucguggugaagggcgacgacguccgccagaucgcgcccggccagaccggggugaucgccgacuacaacuacaagcuccccgacgacuucaccggcugcgugcuggccuggaacacccggaacaucgacgccacgcagaccgggaacuacaacuacaaguaccgcucccugcggcacggcaagcuccgccccuucgagcgggacaucagcaacgucccguucucccccgacgggaagcccugcacgcccccggccuucaacugcuacuggccccugaacgacuacggcuucuacaucaccaacggcaucggguaccagcccuaccgcguggugguccugagcuucgagcuccugaacgcgccggccaccgugugcggccccaagcuguccaccgaccucaucaagaaccagugcgugaacuucaacuucaacgggcugaccggcaccgggguccugacgcccagcuccaagcgguuccagcccuuccagcaguucggccgcgacgugagcgacuucaccgacuccgugcgcgacccgaagaccagcgagauccucgacaucagccccugcuccuucggcggggucagcgugaucacccccggcaccaacacguccagcgagguggccguccuguaccaggacgugaacugcaccgacgugcccgucgccauccacgccgaccagcugaccccguccuggcgggugcacagcaccgggaacaacguguuccagacgcaggcgggcugccucaucggggccgagcacgucgacaccuccuacgagugcgacauccccaucggcgccggcaucugcgccagcuaccacaccguguccagccugcgcuccaccagccagaaguccaucguggcguacacgaugagccugggggccgacuccagcaucgccuacuccaacaacaccaucgccauccccaccaacuucagcaucagcaucaccacggaggucaugcccguguccauggccaagaccagcguggacugcaacauguacaucugcggcgacuccaccgagugcgcgaaccugcuccugcaguacgggagcuucugcacccagcugaaccgggcccucuccggcaucgccgucgagcaggaccgcaacacgcgggagguguucgcccaggugaagcagauguacaagaccccgacccugaaggacuucggcggguucaacuucagccagauccugcccgacccccucaagcccaccaagcgcuccuucaucgaggaccugcuguucaacaaggucacgcucgccgacgcgggcuucaugaagcaguacggggagugccugggcgacaucaacgcccgggaccugaucugcgcccagaaguucaacgggcucaccgugcugccgccccugcucaccgacgacaugaucgccgccuacaccgcggcccuggugagcggcacggccaccgccggcuggaccuucggggcgggcgccgcccugcagauccccuucgccaugcagauggccuaccgcuucaacgggaucggcgucacccagaacgugcucuacgagaaccagaagcagaucgcgaaccaguucaacaaggccaucucccagauccaggagagccugacgaccaccuccaccgcccuggggaagcuccaggacguggucaaccagaacgcccaggcccugaacacgcuggugaagcagcucagcuccaacuucggcgcgaucagcuccgugcugaacgacauccugagccggcucgacaaggucgaggccgaggugcagaucgaccgccugaucaccggccggcugcagucccuccagaccuacgugacccagcagcugauccgcgccgccgagauccgggccagcgcgaaccuggccgccacgaagauguccgagugcguccucgggcagagcaagcgcguggacuucugcggcaagggguaccaccugaugagcuucccccaggccgcgccgcacggcguggucuuccugcacgugaccuacgugcccucccaggagcggaacuucaccaccgcccccgccaucugccacgaggggaaggccuacuucccccgcgagggcgucuucguguucaacggcaccagcugguucaucacgcagcggaacuucuucuccccgcagaucaucaccaccgacaacaccuucgucagcggguccugcgacguggugaucggcaucaucaacaacacggucuacgacccccuccagcccgagcuggacagcuucaaggaggagcuggacaaguacuucaagaaccacaccuccccggacguggaccucggggacaucagcggcaucaacgccuccguggucaacauccagaaggagaucgaccgccugaacgagguggcgaagaaccugaacgagagccucaucgaccugcaggagcuggggaaguacgagcaguacaucaaguggcccugguacguguggcucggcuucaucgccggccugaucgccaucgucauggugaccauccugcucugcugcaugaccuccugcugcagcugccugaagggggccugcuccugcggcagcugcugcaaguucgacgaggacgacuccgagcccgugcugaagggggucaagcuccacuacacgugaggacuaguuauaagacugacuagcccgaugggccucccaacgggcccuccuccccuccuugcaccgagauuaauaaaaaaaaaaaaaaaaaaaaaaaaaaaaaaaaaaaaaaaaaaaaaaaaaaaaaaaaaaaaaaaaugcaucccccccccccccccccccccccccccccccaaaggcucuuuucagagccaccagaauu

SEQ ID NO: 15157 - RNA, 3988 nt, Artificial Sequence
  Bat SARS-like CoV/WIV1__AGZ48828.1 spike protein mRNA gc (1-1256)(K969P_V970P)
aggagaaagcuuaccaugaagcugcucgugcuggucuucgccacccuggugagcuccuacaccaucgagaagugccucgacuucgacgaccgcacgcccccggccaacacccaguuccugagcucccaccggggcguguacuaccccgacgacaucuuccgcagcaacguccugcaccucgugcaggaccacuuccugcccuucgacuccaacgugacccgguucaucaccuucgggcugaacuucgacaaccccaucaucccguucaaggacggcaucuacuucgcggccacggagaaguccaacgucauccgcggguggguguucggcuccaccaugaacaacaagagccaguccgugaucaucaugaacaacagcaccaaccucgucauccgggccugcaacuucgagcugugcgacaaccccuucuucguggugcugaaguccaacaacacccagauccccagcuacaucuucaacaacgccuucaacugcacguucgaguacgucuccaaggacuucaaccucgaccugggggagaagcccggcaacuucaaggaccugcgcgaguucguguuccggaacaaggacggcuuccuccacguguacagcggguaccagccgaucuccgccgcgagcggccugcccaccggguucaacgcccugaagcccaucuucaagcucccccugggcaucaacaucaccaacuuccgcacccugcucacggccuucccgccccggcccgacuacugggggaccuccgccgcggccuacuucgucggcuaccugaagcccaccaccuucaugcugaaguacgacgagaacggcacgaucaccgacgccguggacugcagccagaacccgcucgccgagcugaagugcuccgucaagagcuucgagaucgacaaggggaucuaccagaccagcaacuuccgcguggcccccuccaaggagguggugcgguuccccaacaucaccaaccugugccccuucggcgaggucuucaacgcgacgaccuucccgagcguguacgccugggagcgcaagcggaucuccaacugcguggccgacuacagcguccucuacaacuccaccagcuucuccaccuucaagugcuacggggugagcgccacgaagcugaacgaccugugcuucuccaacgucuacgccgacagcuucguggugaagggcgacgacguccgccagaucgcgcccggccagaccggggugaucgccgacuacaacuacaagcuccccgacgacuucaccggcugcgugcuggccuggaacacccggaacaucgacgccacgcagaccgggaacuacaacuacaaguaccgcucccugcggcacggcaagcuccgccccuucgagcgggacaucagcaacgucccguucucccccgacgggaagcccugcacgcccccggccuucaacugcuacuggccccugaacgacuacggcuucuacaucaccaacggcaucggguaccagcccuaccgcguggugguccugagcuucgagcuccugaacgcgccggccaccgugugcggccccaagcuguccaccgaccucaucaagaaccagugcgugaacuucaacuucaacgggcugaccggcaccgggguccugacgcccagcuccaagcgguuccagcccuuccagcaguucggccgcgacgugagcgacuucaccgacuccgugcgcgacccgaagaccagcgagauccucgacaucagccccugcuccuucggcggggucagcgugaucacccccggcaccaacacguccagcgagguggccguccuguaccaggacgugaacugcaccgacgugcccgucgccauccacgccgaccagcugaccccguccuggcgggugcacagcaccgggaacaacguguuccagacgcaggcgggcugccucaucggggccgagcacgucgacaccuccuacgagugcgacauccccaucggcgccggcaucugcgccagcuaccacaccguguccagccugcgcuccaccagccagaaguccaucguggcguacacgaugagccugggggccgacuccagcaucgccuacuccaacaacaccaucgccauccccaccaacuucagcaucagcaucaccacggaggucaugcccguguccauggccaagaccagcguggacugcaacauguacaucugcggcgacuccaccgagugcgcgaaccugcuccugcaguacgggagcuucugcacccagcugaaccgggcccucuccggcaucgccgucgagcaggaccgcaacacgcgggagguguucgcccaggugaagcagauguacaagaccccgacccugaaggacuucggcggguucaacuucagccagauccugcccgacccccucaagcccaccaagcgcuccuucaucgaggaccugcuguucaacaaggucacgcucgccgacgcgggcuucaugaagcaguacggggagugccugggcgacaucaacgcccgggaccugaucugcgcccagaaguucaacgggcucaccgugcugccgccccugcucaccgacgacaugaucgccgccuacaccgcggcccuggugagcggcacggccaccgccggcuggaccuucggggcgggcgccgcccugcagauccccuucgccaugcagauggccuaccgcuucaacgggaucggcgucacccagaacgugcucuacgagaaccagaagcagaucgcgaaccaguucaacaaggccaucucccagauccaggagagccugacgaccaccuccaccgcccuggggaagcuccaggacguggucaaccagaacgcccaggcccugaacacgcuggugaagcagcucagcuccaacuucggcgcgaucagcuccgugcugaacgacauccugagccggcucgacccgcccgaggccgagguccagaucgaccgccugaucaccggccggcugcagucccuccagaccuacgugacccagcagcugauccgcgccgccgagauccgggccagcgcgaaccuggccgccacgaagauguccgagugcgugcucgggcagagcaagcgcgucgacuucugcggcaagggguaccaccugaugagcuucccccaggccgcgccccacggcgugguguuccugcacgucaccuacgugcccucccaggagcggaacuucaccaccgccccggccaucugccacgaggggaaggccuacuucccccgcgagggcguguucgucuucaacggcaccagcugguucaucacgcagcggaacuucuucagcccccagaucaucaccaccgacaacaccuucgugagcggguccugcgacgucgugaucggcaucaucaacaacacgguguacgacccgcuccagcccgagcuggacagcuucaaggaggagcuggacaaguacuucaagaaccacaccucccccgacgucgaccucggggacaucagcggcaucaacgccuccguggugaacauccagaaggagaucgaccgccugaacgaggucgcgaagaaccugaacgagagccucaucgaccugcaggagcuggggaaguacgagcaguacaucaaguggcccugguacguguggcucggcuucaucgccggccugaucgccaucgugauggucaccauccugcucugcugcaugaccuccugcugcagcugccugaagggggccugcuccugcggcagcugcugcaaguucgacgaggacgacuccgagccggugcugaagggggugaagcuccacuacacgugaggacuaguuauaagacugacuagcccgaugggccucccaacgggcccuccuccccuccuugcaccgagauuaauaaaaaaaaaaaaaaaaaaaaaaaaaaaaaaaaaaaaaaaaaaaaaaaaaaaaaaaaaaaaaaaaugcaucccccccccccccccccccccccccccccccaaaggcucuuuucagagccaccagaauu

SEQ ID NO: 15158 - RNA, 3793 nt, Artificial Sequence
  Bat SARS-like CoV/WIV1__AGZ48828.1 spike protein mRNA gc (variant)
aggagaaagcuuaccaugaagcugcucgugcuggucuucgccacccuggugagcuccuacaccaucgagaagugccucgacuucgacgaccgcacgcccccggccaacacccaguuccugagcucccaccggggcguguacuaccccgacgacaucuuccgcagcaacguccugcaccucgugcaggaccacuuccugcccuucgacuccaacgugacccgguucaucaccuucgggcugaacuucgacaaccccaucaucccguucaaggacggcaucuacuucgcggccacggagaaguccaacgucauccgcggguggguguucggcuccaccaugaacaacaagagccaguccgugaucaucaugaacaacagcaccaaccucgucauccgggccugcaacuucgagcugugcgacaaccccuucuucguggugcugaaguccaacaacacccagauccccagcuacaucuucaacaacgccuucaacugcacguucgaguacgucuccaaggacuucaaccucgaccugggggagaagcccggcaacuucaaggaccugcgcgaguucguguuccggaacaaggacggcuuccuccacguguacagcggguaccagccgaucuccgccgcgagcggccugcccaccggguucaacgcccugaagcccaucuucaagcucccccugggcaucaacaucaccaacuuccgcacccugcucacggccuucccgccccggcccgacuacugggggaccuccgccgcggccuacuucgucggcuaccugaagcccaccaccuucaugcugaaguacgacgagaacggcacgaucaccgacgccguggacugcagccagaacccgcucgccgagcugaagugcuccgucaagagcuucgagaucgacaaggggaucuaccagaccagcaacuuccgcguggcccccuccaaggagguggugcgguuccccaacaucaccaaccugugccccuucggcgaggucuucaacgcgacgaccuucccgagcguguacgccugggagcgcaagcggaucuccaacugcguggccgacuacagcguccucuacaacuccaccagcuucuccaccuucaagugcuacggggugagcgccacgaagcugaacgaccugugcuucuccaacgucuacgccgacagcuucguggugaagggcgacgacguccgccagaucgcgcccggccagaccggggugaucgccgacuacaacuacaagcuccccgacgacuucaccggcugcgugcuggccuggaacacccggaacaucgacgccacgcagaccgggaacuacaacuacaaguaccgcucccugcggcacggcaagcuccgccccuucgagcgggacaucagcaacgucccguucucccccgacgggaagcccugcacgcccccggccuucaacugcuacuggccccugaacgacuacggcuucuacaucaccaacggcaucggguaccagcccuaccgcguggugguccugagcuucgagcuccugaacgcgccggccaccgugugcggccccaagcuguccaccgaccucaucaagaaccagugcgugaacuucaacuucaacgggcugaccggcaccgggguccugacgcccagcuccaagcgguuccagcccuuccagcaguucggccgcgacgugagcgacuucaccgacuccgugcgcgacccgaagaccagcgagauccucgacaucagccccugcuccuucggcggggucagcgugaucacccccggcaccaacacguccagcgagguggccguccuguaccaggacgugaacugcaccgacgugcccgucgccauccacgccgaccagcugaccccguccuggcgggugcacagcaccgggaacaacguguuccagacgcaggcgggcugccucaucggggccgagcacgucgacaccuccuacgagugcgacauccccaucggcgccggcaucugcgccagcuaccacaccguguccagccugcgcuccaccagccagaaguccaucguggcguacacgaugagccugggggccgacuccagcaucgccuacuccaacaacaccaucgccauccccaccaacuucagcaucagcaucaccacggaggucaugcccguguccauggccaagaccagcguggacugcaacauguacaucugcggcgacuccaccgagugcgcgaaccugcuccugcaguacgggagcuucugcacccagcugaaccgggcccucuccggcaucgccgucgagcaggaccgcaacacgcgggagguguucgcccaggugaagcagauguacaagaccccgacccugaaggacuucggcggguucaacuucagccagauccugcccgacccccucaagcccaccaagcgcuccuucaucgaggaccugcuguucaacaaggucacgcucgccgacgcgggcuucaugaagcaguacggggagugccugggcgacaucaacgcccgggaccugaucugcgcccagaaguucaacgggcucaccgugcugccgccccugcucaccgacgacaugaucgccgccuacaccgcggcccuggugagcggcacggccaccgccggcuggaccuucggggcgggcgccgcccugcagauccccuucgccaugcagauggccuaccgcuucaacgggaucggcgucacccagaacgugcucuacgagaaccagaagcagaucgcgaaccaguucaacaaggccaucucccagauccaggagagccugacgaccaccuccaccgcccuggggaagcuccaggacguggucaaccagaacgcccaggcccugaacacgcuggugaagcagcucagcuccaacuucggcgcgaucagcuccgugcugaacgacauccugagccggcucgacccgcccgaggccgagguccagaucgaccgccugaucaccggccggcugcagucccuccagaccuacgugacccagcagcugauccgcgccgccgagauccgggccagcgcgaaccuggccgccacgaagauguccgagugcgugcucgggcagagcaagcgcgucgacuucugcggcaagggguaccaccugaugagcuucccccaggccgcgccccacggcgugguguuccugcacgucaccuacgugcccucccaggagcggaacuucaccaccgccccggccaucugccacgaggggaaggccuacuucccccgcgagggcguguucgucuucaacggcaccagcugguucaucacgcagcggaacuucuucagcccccagaucaucaccaccgacaacaccuucgugagcggguccugcgacgucgugaucggcaucaucaacaacacgguguacgacccgcuccagcccgagcuggacagcuucaaggaggagcuggacaaguacuucaagaaccacaccucccccgacgucgaccucggggacaucagcggcaucaacgccuccguggugaacauccagaaggagaucgaccgccugaacgaggucgcgaagaaccugaacgagagccucaucgaccugcaggagcuggggaaguacgagcagugaggacuaguuauaagacugacuagcccgaugggccucccaacgggcccuccuccccuccuugcaccgagauuaauaaaaaaaaaaaaaaaaaaaaaaaaaaaaaaaaaaaaaaaaaaaaaaaaaaaaaaaaaaaaaaaaugcaucccccccccccccccccccccccccccccccaaaggcucuuuucagagccaccagaauu

SEQ ID NO: 15159 - RNA, 3874 nt, Artificial Sequence
  Bat SARS-like CoV/WIV1__AGZ48828.1 spike protein mRNA gc (variant)
aggagaaagcuuaccaugaagcugcucgugcuggucuucgccacccuggugagcuccuacaccaucgagaagugccucgacuucgacgaccgcacgcccccggccaacacccaguuccugagcucccaccggggcguguacuaccccgacgacaucuuccgcagcaacguccugcaccucgugcaggaccacuuccugcccuucgacuccaacgugacccgguucaucaccuucgggcugaacuucgacaaccccaucaucccguucaaggacggcaucuacuucgcggccacggagaaguccaacgucauccgcggguggguguucggcuccaccaugaacaacaagagccaguccgugaucaucaugaacaacagcaccaaccucgucauccgggccugcaacuucgagcugugcgacaaccccuucuucguggugcugaaguccaacaacacccagauccccagcuacaucuucaacaacgccuucaacugcacguucgaguacgucuccaaggacuucaaccucgaccugggggagaagcccggcaacuucaaggaccugcgcgaguucguguuccggaacaaggacggcuuccuccacguguacagcggguaccagccgaucuccgccgcgagcggccugcccaccggguucaacgcccugaagcccaucuucaagcucccccugggcaucaacaucaccaacuuccgcacccugcucacggccuucccgccccggcccgacuacugggggaccuccgccgcggccuacuucgucggcuaccugaagcccaccaccuucaugcugaaguacgacgagaacggcacgaucaccgacgccguggacugcagccagaacccgcucgccgagcugaagugcuccgucaagagcuucgagaucgacaaggggaucuaccagaccagcaacuuccgcguggcccccuccaaggagguggugcgguuccccaacaucaccaaccugugccccuucggcgaggucuucaacgcgacgaccuucccgagcguguacgccugggagcgcaagcggaucuccaacugcguggccgacuacagcguccucuacaacuccaccagcuucuccaccuucaagugcuacggggugagcgccacgaagcugaacgaccugugcuucuccaacgucuacgccgacagcuucguggugaagggcgacgacguccgccagaucgcgcccggccagaccggggugaucgccgacuacaacuacaagcuccccgacgacuucaccggcugcgugcuggccuggaacacccggaacaucgacgccacgcagaccgggaacuacaacuacaaguaccgcucccugcggcacggcaagcuccgccccuucgagcgggacaucagcaacgucccguucucccccgacgggaagcccugcacgcccccggccuucaacugcuacuggccccugaacgacuacggcuucuacaucaccaacggcaucggguaccagcccuaccgcguggugguccugagcuucgagcuccugaacgcgccggccaccgugugcggccccaagcuguccaccgaccucaucaagaaccagugcgugaacuucaacuucaacgggcugaccggcaccgggguccugacgcccagcuccaagcgguuccagcccuuccagcaguucggccgcgacgugagcgacuucaccgacuccgugcgcgacccgaagaccagcgagauccucgacaucagccccugcuccuucggcggggucagcgugaucacccccggcaccaacacguccagcgagguggccguccuguaccaggacgugaacugcaccgacgugcccgucgccauccacgccgaccagcugaccccguccuggcgggugcacagcaccgggaacaacguguuccagacgcaggcgggcugccucaucggggccgagcacgucgacaccuccuacgagugcgacauccccaucggcgccggcaucugcgccagcuaccacaccguguccagccugcgcuccaccagccagaaguccaucguggcguacacgaugagccugggggccgacuccagcaucgccuacuccaacaacaccaucgccauccccaccaacuucagcaucagcaucaccacggaggucaugcccguguccauggccaagaccagcguggacugcaacauguacaucugcggcgacuccaccgagugcgcgaaccugcuccugcaguacgggagcuucugcacccagcugaaccgggcccucuccggcaucgccgucgagcaggaccgcaacacgcgggagguguucgcccaggugaagcagauguacaagaccccgacccugaaggacuucggcggguucaacuucagccagauccugcccgacccccucaagcccaccaagcgcuccuucaucgaggaccugcuguucaacaaggucacgcucgccgacgcgggcuucaugaagcaguacggggagugccugggcgacaucaacgcccgggaccugaucugcgcccagaaguucaacgggcucaccgugcugccgccccugcucaccgacgacaugaucgccgccuacaccgcggcccuggugagcggcacggccaccgccggcuggaccuucggggcgggcgccgcccugcagauccccuucgccaugcagauggccuaccgcuucaacgggaucggcgucacccagaacgugcucuacgagaaccagaagcagaucgcgaaccaguucaacaaggccaucucccagauccaggagagccugacgaccaccuccaccgcccuggggaagcuccaggacguggucaaccagaacgcccaggcccugaacacgcuggugaagcagcucagcuccaacuucggcgcgaucagcuccgugcugaacgacauccugagccggcucgacccgcccgaggccgagguccagaucgaccgccugaucaccggccggcugcagucccuccagaccuacgugacccagcagcugauccgcgccgccgagauccgggccagcgcgaaccuggccgccacgaagauguccgagugcgugcucgggcagagcaagcgcgucgacuucugcggcaagggguaccaccugaugagcuucccccaggccgcgccccacggcgugguguuccugcacgucaccuacgugcccucccaggagcggaacuucaccaccgccccggccaucugccacgaggggaaggccuacuucccccgcgagggcguguucgucuucaacggcaccagcugguucaucacgcagcggaacuucuucagcccccagaucaucaccaccgacaacaccuucgugagcggguccugcgacgucgugaucggcaucaucaacaacacgguguacgacccgcuccagcccgagcuggacagcuucaaggaggagcuggacaaguacuucaagaaccacaccucccccgacgucgaccucggggacaucagcggcaucaacgccuccguggugaacauccagaaggagaucgaccgccugaacgaggucgcgaagaaccugaacgagagccucaucgaccugcaggagcuggggaaguacgagcagggcggcuacauccccgaggccccgcgggacgggcaggccuacgugcgcaaggacggcgagugggugcuccuguccaccuucugaggacuaguuauaagacugacuagcccgaugggccucccaacgggcccuccuccccuccuugcaccgagauuaauaaaaaaaaaaaaaaaaaaaaaaaaaaaaaaaaaaaaaaaaaaaaaaaaaaaaaaaaaaaaaaaaugcaucccccccccccccccccccccccccccccccaaaggcucuuuucagagccaccagaauu

SEQ ID NO: 15160 - RNA, 4042 nt, Artificial Sequence
  BatCoV/HKU9-1 BF_005I__YP_001039971.1 spike protein mRNA gc (1-1274)
aggagaaagcuuaccaugcugcucauccuggugcugggcgucagccucgccgccgcgucccgccccgagugcuucaacccgcgguucacccugacgccccugaaccacacccucaacuacaccagcaucaaggccaagguguccaacgugcugcugcccgaccccuacaucgccuacagcgggcagacccuccgccagaaccuguucauggccgacauguccaacaccauccuguacccggucacgccgcccgccaacggcgcgaacgggggcuucaucuacaacaccagcaucauccccguguccgccggccucuucgugaacaccuggauguaccggcagcccgccagcucccgcgccuacugccaggagcccuucggggucgcguucggcgacaccuucgagaacgaccggaucgccauccugaucauggcccccgacaaccuggggagcugguccgccguggcgccccgcaaccagacgaacaucuaccuccuggugugcagcaacgccacccugugcaucaacccgggcuucaaccggugggggcccgccggcuccuucaucgcccccgacgcccucgucgaccacagcaacuccugcuucgugaacaacaccuucagcgugaacaucuccaccagccgcaucucccuggccuuccuguucaaggacggggaccuccugaucuaccacagcggcuggcugcccacgagcaacuucgagcacggcuucucccgggggagccacccgaugaccuacuucaugucccuccccgucggcgggaaccugccccgcgcgcaguucuuccagagcaucgugcgguccaacgccaucgacaagggcgacggcaugugcaccaacuucgacgugaaccugcacgucgcccaccucaucaaccgcgaccugcuggugagcuacuucaacaacggguccguggccaacgccgcggacugcgccgacagcgccgccgaggagcucuacugcgucaccggcuccuucgacccgcccacggggguguacccccugagccgguaccgcgcccagguggcgggcuucguccgggugacccagcgcggguccuacugcaccccgcccuacagcgugcugcaggacccgccccagcccgucguguggcggcgcuacaugcucuacgacugcgucuucgacuucaccgugguggucgacucccugcccacgcaccagcugcagugcuacggcgugagcccccggcgccucgccuccaugugcuacggcagcgugacccuggacgucaugcggaucaacgagacccaccugaacaaccucuucaaccgcgugcccgacaccuucucccuguacaacuacgcccugcccgacaacuucuacgggugccuccacgccuucuaccugaacagcacggcgccguacgccguggccaaccgcuuccccaucaagcccggcgggcggcaguccaacagcgccuucaucgacaccgucaucaacgccgcgcacuacagccccuucuccuacguguacggccuggccgugaucacccucaagccggccgccgggagcaagcuggucugccccguggccaacgacaccguggucaucacggaccgcugcgugcaguacaaccuguacggcuacaccggcaccggggugcuguccaagaacaccagccucgucauccccgacggcaagguguucacggcguccagcaccgggaccaucaucggcguguccaucaacagcaccacguacuccaucaugcccugcgucaccgugccggugagcgucggguaccaccccaacuucgagcgggcccugcuguucaacggccucuccugcagccagcgcucccgggccgugaccgagcccgugagcguccugugguccgccagcgccaccgcgcaggacgccuucgacacccccuccggcugcguggugaacgucgagcugcgcaacacgaccaucgugaacacgugcgccaugccgaucgggaacagccucugcuucaucaacggcagcaucgccaccgcgaacgccgacucccugccccggcugcagcucgugaacuacgacccccuguacgacaacagcaccgccacccccaugaccccggucuacugggugaaggugcccaccaacuucacgcuguccgccaccgaggaguacauccagaccaccgcccccaagaucacgaucgacugcgcgcgcuaccucugcggggacagcucccggugccugaacguccugcuccacuacggcaccuucugcaacgacaucaacaaggcccugagccgcguguccaccauccuggacagcgcccuccugucccuggugaaggagcucagcaucaacacccgggacgaggucacgaccuucuccuucgacggcgacuacaacuucaccgggcugaugggcugccuggggcccaacugcggcgccaccacguaccgcagcgccuucuccgaccuccuguacgacaaggugcggaucaccgacccgggguucaugcagagcuaccagaagugcaucgacucccaguggggcggcagcauccgcgaccugcucugcacccagaccuacaacgggaucgcggugcugccgcccaucgucucccccgccaugcaggcccuguacacgagccuccuggugggcgccguggccuccagcggguacaccuucggcaucaccagcgcgggggucauccccuucgccacccagcugcaguuccggcucaacggcaucggcgugacgacccaggugcuggucgagaaccagaagcugaucgccuccagcuucaacaacgcccucgugaacauccagaagggguucaccgagaccuccaucgcgcugagcaagaugcaggacgugaucaaccagcacgccgcccagcugcacacgcucgucgugcagcugggcaacuccuucggggccaucagcuccagcaucaacgagaucuucucccgccuggagggccucgccgcgaacgccgaggucgaccggcugaucaacgggcgcaugauggugcugaacaccuacgugacccagcuccugauccaggccagcgaggccaaggcccagaacgcgcuggccgcccagaagaucuccgagugcgucaaggcccagagccuccggaacgacuucugcggcaacggcacccacgugcuguccaucccccagcuggcccccaacgggguccucuucauccacuacgcguacacgccgaccgaguacgccuucgugcagaccagcgccggccugugccacaacgggaccggcuacgcgccccgccaggggauguucgugcugcccaacaacaccaacauguggcacuucacgaccaugcaguucuacaaccccgugaacaucuccgccagcaacacccagguccucaccuccugcagcgugaacuacacguccgugaacuacaccguccuggagccgagcgugcccggcgacuacgacuuccagaaggaguucgacaaguucuacaagaaccugagcaccaucuucaacaacaccuucaaccccaacgacuucaacuucuccacgguggacgucaccgcccagaucaagagccuccacgacguggugaaccagcugaaccaguccuucaucgaccugaagaagcucaacgucuacgagaagaccaucaaguggcccugguacguguggcuggccaugaucgccggcaucguggggcugguccucgccgugaucaugcugaugugcaugaccaacugcugcagcugcuucaagggcaugugcgacugccgccggugcugcggguccuacgacagcuacgacgacguguacccggcgguccgcgugaacaagaagcggacggugugaggacuaguuauaagacugacuagcccgaugggccucccaacgggcccuccuccccuccuugcaccgagauuaauaaaaaaaaaaaaaaaaaaaaaaaaaaaaaaaaaaaaaaaaaaaaaaaaaaaaaaaaaaaaaaaaugcaucccccccccccccccccccccccccccccccaaaggcucuuuucagagccaccagaauu

SEQ ID NO: 15161 - RNA, 4042 nt, Artificial Sequence
  BatCoV/HKU9-1 BF_005I__YP_001039971.1 spike protein mRNA gc (1-1274)(G983P_L984P)
aggagaaagcuuaccaugcugcucauccuggugcugggcgucagccucgccgccgcgucccgccccgagugcuucaacccgcgguucacccugacgccccugaaccacacccucaacuacaccagcaucaaggccaagguguccaacgugcugcugcccgaccccuacaucgccuacagcgggcagacccuccgccagaaccuguucauggccgacauguccaacaccauccuguacccggucacgccgcccgccaacggcgcgaacgggggcuucaucuacaacaccagcaucauccccguguccgccggccucuucgugaacaccuggauguaccggcagcccgccagcucccgcgccuacugccaggagcccuucggggucgcguucggcgacaccuucgagaacgaccggaucgccauccugaucauggcccccgacaaccuggggagcugguccgccguggcgccccgcaaccagacgaacaucuaccuccuggugugcagcaacgccacccugugcaucaacccgggcuucaaccggugggggcccgccggcuccuucaucgcccccgacgcccucgucgaccacagcaacuccugcuucgugaacaacaccuucagcgugaacaucuccaccagccgcaucucccuggccuuccuguucaaggacggggaccuccugaucuaccacagcggcuggcugcccacgagcaacuucgagcacggcuucucccgggggagccacccgaugaccuacuucaugucccuccccgucggcgggaaccugccccgcgcgcaguucuuccagagcaucgugcgguccaacgccaucgacaagggcgacggcaugugcaccaacuucgacgugaaccugcacgucgcccaccucaucaaccgcgaccugcuggugagcuacuucaacaacggguccguggccaacgccgcggacugcgccgacagcgccgccgaggagcucuacugcgucaccggcuccuucgacccgcccacggggguguacccccugagccgguaccgcgcccagguggcgggcuucguccgggugacccagcgcggguccuacugcaccccgcccuacagcgugcugcaggacccgccccagcccgucguguggcggcgcuacaugcucuacgacugcgucuucgacuucaccgugguggucgacucccugcccacgcaccagcugcagugcuacggcgugagcccccggcgccucgccuccaugugcuacggcagcgugacccuggacgucaugcggaucaacgagacccaccugaacaaccucuucaaccgcgugcccgacaccuucucccuguacaacuacgcccugcccgacaacuucuacgggugccuccacgccuucuaccugaacagcacggcgccguacgccguggccaaccgcuuccccaucaagcccggcgggcggcaguccaacagcgccuucaucgacaccgucaucaacgccgcgcacuacagccccuucuccuacguguacggccuggccgugaucacccucaagccggccgccgggagcaagcuggucugccccguggccaacgacaccguggucaucacggaccgcugcgugcaguacaaccuguacggcuacaccggcaccggggugcuguccaagaacaccagccucgucauccccgacggcaagguguucacggcguccagcaccgggaccaucaucggcguguccaucaacagcaccacguacuccaucaugcccugcgucaccgugccggugagcgucggguaccaccccaacuucgagcgggcccugcuguucaacggccucuccugcagccagcgcucccgggccgugaccgagcccgugagcguccugugguccgccagcgccaccgcgcaggacgccuucgacacccccuccggcugcguggugaacgucgagcugcgcaacacgaccaucgugaacacgugcgccaugccgaucgggaacagccucugcuucaucaacggcagcaucgccaccgcgaacgccgacucccugccccggcugcagcucgugaacuacgacccccuguacgacaacagcaccgccacccccaugaccccggucuacugggugaaggugcccaccaacuucacgcuguccgccaccgaggaguacauccagaccaccgcccccaagaucacgaucgacugcgcgcgcuaccucugcggggacagcucccggugccugaacguccugcuccacuacggcaccuucugcaacgacaucaacaaggcccugagccgcguguccaccauccuggacagcgcccuccugucccuggugaaggagcucagcaucaacacccgggacgaggucacgaccuucuccuucgacggcgacuacaacuucaccgggcugaugggcugccuggggcccaacugcggcgccaccacguaccgcagcgccuucuccgaccuccuguacgacaaggugcggaucaccgacccgggguucaugcagagcuaccagaagugcaucgacucccaguggggcggcagcauccgcgaccugcucugcacccagaccuacaacgggaucgcggugcugccgcccaucgucucccccgccaugcaggcccuguacacgagccuccuggugggcgccguggccuccagcggguacaccuucggcaucaccagcgcgggggucauccccuucgccacccagcugcaguuccggcucaacggcaucggcgugacgacccaggugcuggucgagaaccagaagcugaucgccuccagcuucaacaacgcccucgugaacauccagaagggguucaccgagaccuccaucgcgcugagcaagaugcaggacgugaucaaccagcacgccgcccagcugcacacgcucgucgugcagcugggcaacuccuucggggccaucagcuccagcaucaacgagaucuucucccgccuggagccgcccgccgcgaacgccgaggucgaccggcucaucaacggccgcaugauggugcugaacaccuacgugacccagcugcucauccaggccagcgaggccaaggcccagaacgcgcuggccgcccagaagaucuccgagugcgucaaggcccagagccugcggaacgacuucugcgggaacggcacccacgugcucuccaucccccagcuggcccccaacggcgugcuguucauccacuacgcguacacgcccaccgaguacgccuucguccagaccagcgccgggcucugccacaacggcaccggguacgcgccccgccagggcauguucgugcugccgaacaacaccaacauguggcacuucacgaccaugcaguucuacaaccccgugaacaucuccgccagcaacacccagguccugaccuccugcagcgugaacuacacguccgugaacuacaccguccucgagcccagcgugcccggggacuacgacuuccagaaggaguucgacaaguucuacaagaaccugagcaccaucuucaacaacaccuucaacccgaacgacuucaacuucuccacgguggacgucaccgcccagaucaagagccugcacgacguggugaaccagcucaaccaguccuucaucgaccugaagaagcugaacgucuacgagaagaccaucaaguggcccugguacguguggcucgccaugaucgccggcaucgugggccugguccuggccgugaucaugcucaugugcaugaccaacugcugcagcugcuucaaggggaugugcgacugccgccggugcugcggcuccuacgacagcuacgacgacguguaccccgcgguccgcgugaacaagaagcggacggugugaggacuaguuauaagacugacuagcccgaugggccucccaacgggcccuccuccccuccuugcaccgagauuaauaaaaaaaaaaaaaaaaaaaaaaaaaaaaaaaaaaaaaaaaaaaaaaaaaaaaaaaaaaaaaaaaugcaucccccccccccccccccccccccccccccccaaaggcucuuuucagagccaccagaauu

SEQ ID NO: 15162 - RNA, 3841 nt, Artificial Sequence
  BatCoV/HKU9-1 BF_005I__YP_001039971.1 spike protein mRNA gc (variant)
aggagaaagcuuaccaugcugcucauccuggugcugggcgucagccucgccgccgcgucccgccccgagugcuucaacccgcgguucacccugacgccccugaaccacacccucaacuacaccagcaucaaggccaagguguccaacgugcugcugcccgaccccuacaucgccuacagcgggcagacccuccgccagaaccuguucauggccgacauguccaacaccauccuguacccggucacgccgcccgccaacggcgcgaacgggggcuucaucuacaacaccagcaucauccccguguccgccggccucuucgugaacaccuggauguaccggcagcccgccagcucccgcgccuacugccaggagcccuucggggucgcguucggcgacaccuucgagaacgaccggaucgccauccugaucauggcccccgacaaccuggggagcugguccgccguggcgccccgcaaccagacgaacaucuaccuccuggugugcagcaacgccacccugugcaucaacccgggcuucaaccggugggggcccgccggcuccuucaucgcccccgacgcccucgucgaccacagcaacuccugcuucgugaacaacaccuucagcgugaacaucuccaccagccgcaucucccuggccuuccuguucaaggacggggaccuccugaucuaccacagcggcuggcugcccacgagcaacuucgagcacggcuucucccgggggagccacccgaugaccuacuucaugucccuccccgucggcgggaaccugccccgcgcgcaguucuuccagagcaucgugcgguccaacgccaucgacaagggcgacggcaugugcaccaacuucgacgugaaccugcacgucgcccaccucaucaaccgcgaccugcuggugagcuacuucaacaacggguccguggccaacgccgcggacugcgccgacagcgccgccgaggagcucuacugcgucaccggcuccuucgacccgcccacggggguguacccccugagccgguaccgcgcccagguggcgggcuucguccgggugacccagcgcggguccuacugcaccccgcccuacagcgugcugcaggacccgccccagcccgucguguggcggcgcuacaugcucuacgacugcgucuucgacuucaccgugguggucgacucccugcccacgcaccagcugcagugcuacggcgugagcccccggcgccucgccuccaugugcuacggcagcgugacccuggacgucaugcggaucaacgagacccaccugaacaaccucuucaaccgcgugcccgacaccuucucccuguacaacuacgcccugcccgacaacuucuacgggugccuccacgccuucuaccugaacagcacggcgccguacgccguggccaaccgcuuccccaucaagcccggcgggcggcaguccaacagcgccuucaucgacaccgucaucaacgccgcgcacuacagccccuucuccuacguguacggccuggccgugaucacccucaagccggccgccgggagcaagcuggucugccccguggccaacgacaccguggucaucacggaccgcugcgugcaguacaaccuguacggcuacaccggcaccggggugcuguccaagaacaccagccucgucauccccgacggcaagguguucacggcguccagcaccgggaccaucaucggcguguccaucaacagcaccacguacuccaucaugcccugcgucaccgugccggugagcgucggguaccaccccaacuucgagcgggcccugcuguucaacggccucuccugcagccagcgcucccgggccgugaccgagcccgugagcguccugugguccgccagcgccaccgcgcaggacgccuucgacacccccuccggcugcguggugaacgucgagcugcgcaacacgaccaucgugaacacgugcgccaugccgaucgggaacagccucugcuucaucaacggcagcaucgccaccgcgaacgccgacucccugccccggcugcagcucgugaacuacgacccccuguacgacaacagcaccgccacccccaugaccccggucuacugggugaaggugcccaccaacuucacgcuguccgccaccgaggaguacauccagaccaccgcccccaagaucacgaucgacugcgcgcgcuaccucugcggggacagcucccggugccugaacguccugcuccacuacggcaccuucugcaacgacaucaacaaggcccugagccgcguguccaccauccuggacagcgcccuccugucccuggugaaggagcucagcaucaacacccgggacgaggucacgaccuucuccuucgacggcgacuacaacuucaccgggcugaugggcugccuggggcccaacugcggcgccaccacguaccgcagcgccuucuccgaccuccuguacgacaaggugcggaucaccgacccgggguucaugcagagcuaccagaagugcaucgacucccaguggggcggcagcauccgcgaccugcucugcacccagaccuacaacgggaucgcggugcugccgcccaucgucucccccgccaugcaggcccuguacacgagccuccuggugggcgccguggccuccagcggguacaccuucggcaucaccagcgcgggggucauccccuucgccacccagcugcaguuccggcucaacggcaucggcgugacgacccaggugcuggucgagaaccagaagcugaucgccuccagcuucaacaacgcccucgugaacauccagaagggguucaccgagaccuccaucgcgcugagcaagaugcaggacgugaucaaccagcacgccgcccagcugcacacgcucgucgugcagcugggcaacuccuucggggccaucagcuccagcaucaacgagaucuucucccgccuggagccgcccgccgcgaacgccgaggucgaccggcucaucaacggccgcaugauggugcugaacaccuacgugacccagcugcucauccaggccagcgaggccaaggcccagaacgcgcuggccgcccagaagaucuccgagugcgucaaggcccagagccugcggaacgacuucugcgggaacggcacccacgugcucuccaucccccagcuggcccccaacggcgugcuguucauccacuacgcguacacgcccaccgaguacgccuucguccagaccagcgccgggcucugccacaacggcaccggguacgcgccccgccagggcauguucgugcugccgaacaacaccaacauguggcacuucacgaccaugcaguucuacaaccccgugaacaucuccgccagcaacacccagguccugaccuccugcagcgugaacuacacguccgugaacuacaccguccucgagcccagcgugcccggggacuacgacuuccagaaggaguucgacaaguucuacaagaaccugagcaccaucuucaacaacaccuucaacccgaacgacuucaacuucuccacgguggacgucaccgcccagaucaagagccugcacgacguggugaaccagcucaaccaguccuucaucgaccugaagaagcugaacgucuacgagaagugaggacuaguuauaagacugacuagcccgaugggccucccaacgggcccuccuccccuccuugcaccgagauuaauaaaaaaaaaaaaaaaaaaaaaaaaaaaaaaaaaaaaaaaaaaaaaaaaaaaaaaaaaaaaaaaaugcaucccccccccccccccccccccccccccccccaaaggcucuuuucagagccaccagaauu

SEQ ID NO: 15163 - RNA, 3922 nt, Artificial Sequence
  BatCoV/HKU9-1 BF_005I__YP_001039971.1 spike protein mRNA gc (variant)
aggagaaagcuuaccaugcugcucauccuggugcugggcgucagccucgccgccgccucccgccccgagugcuucaacccgcgguucacccugacgccccugaaccacacccucaacuacaccagcaucaaggccaagguguccaacgugcugcugcccgaccccuacaucgccuacagcgggcagacccuccgccagaaccuguucauggccgacauguccaacaccauccuguacccggucacgccgcccgccaacggcgcgaacgggggcuucaucuacaacaccagcaucauccccguguccgccggccucuucgugaacaccuggauguaccggcagcccgccagcucccgcgccuacugccaggagcccuucggggucgcguucggcgacaccuucgagaacgaccggaucgccauccugaucauggcccccgacaaccuggggagcugguccgccguggcgccccgcaaccagacgaacaucuaccuccuggugugcagcaacgccacccugugcaucaacccgggcuucaaccggugggggcccgccggcuccuucaucgcccccgacgcccucgucgaccacagcaacuccugcuucgugaacaacaccuucagcgugaacaucuccaccagccgcaucucccuggccuuccuguucaaggacggggaccuccugaucuaccacagcggcuggcugcccacgagcaacuucgagcacggcuucucccgggggagccacccgaugaccuacuucaugucccuccccgucggcgggaaccugccccgcgcgcaguucuuccagagcaucgugcgguccaacgccaucgacaagggcgacggcaugugcaccaacuucgacgugaaccugcacgucgcccaccucaucaaccgcgaccugcuggugagcuacuucaacaacggguccguggccaacgccgcggacugcgccgacagcgccgccgaggagcucuacugcgucaccggcuccuucgacccgcccacggggguguacccccugagccgguaccgcgcccagguggcgggcuucguccgggugacccagcgcggguccuacugcaccccgcccuacagcgugcugcaggacccgccccagcccgucguguggcggcgcuacaugcucuacgacugcgucuucgacuucaccgugguggucgacucccugcccacgcaccagcugcagugcuacggcgugagcccccggcgccucgccuccaugugcuacggcagcgugacccuggacgucaugcggaucaacgagacccaccugaacaaccucuucaaccgcgugcccgacaccuucucccuguacaacuacgcccugcccgacaacuucuacgggugccuccacgccuucuaccugaacagcacggcgccguacgccguggccaaccgcuuccccaucaagcccggcgggcggcaguccaacagcgccuucaucgacaccgucaucaacgccgcgcacuacagccccuucuccuacguguacggccuggccgugaucacccucaagccggccgccgggagcaagcuggucugccccguggccaacgacaccguggucaucacggaccgcugcgugcaguacaaccuguacggcuacaccggcaccggggugcuguccaagaacaccagccucgucauccccgacggcaagguguucacggcguccagcaccgggaccaucaucggcguguccaucaacagcaccacguacuccaucaugcccugcgucaccgugccggugagcgucggguaccaccccaacuucgagcgggcccugcuguucaacggccucuccugcagccagcgcucccgggccgugaccgagcccgugagcguccugugguccgccagcgccaccgcgcaggacgccuucgacacccccuccggcugcguggugaacgucgagcugcgcaacacgaccaucgugaacacgugcgccaugccgaucgggaacagccucugcuucaucaacggcagcaucgccaccgcgaacgccgacucccugccccggcugcagcucgugaacuacgacccccuguacgacaacagcaccgccacccccaugaccccggucuacugggugaaggugcccaccaacuucacgcuguccgccaccgaggaguacauccagaccaccgcccccaagaucacgaucgacugcgcgcgcuaccucugcggggacagcucccggugccugaacguccugcuccacuacggcaccuucugcaacgacaucaacaaggcccugagccgcguguccaccauccuggacagcgcccuccugucccuggugaaggagcucagcaucaacacccgggacgaggucacgaccuucuccuucgacggcgacuacaacuucaccgggcugaugggcugccuggggcccaacugcggcgccaccacguaccgcagcgccuucuccgaccuccuguacgacaaggugcggaucaccgacccgggguucaugcagagcuaccagaagugcaucgacucccaguggggcggcagcauccgcgaccugcucugcacccagaccuacaacgggaucgcggugcugccgcccaucgucucccccgccaugcaggcccuguacacgagccuccuggugggcgccguggccuccagcggguacaccuucggcaucaccagcgcgggggucauccccuucgccacccagcugcaguuccggcucaacggcaucggcgugacgacccaggugcuggucgagaaccagaagcugaucgccuccagcuucaacaacgcccucgugaacauccagaagggguucaccgagaccuccaucgcgcugagcaagaugcaggacgugaucaaccagcacgccgcccagcugcacacgcucgucgugcagcugggcaacuccuucggggccaucagcuccagcaucaacgagaucuucucccgccuggagccgcccgccgcgaacgccgaggucgaccggcucaucaacggccgcaugauggugcugaacaccuacgugacccagcugcucauccaggccagcgaggccaaggcccagaacgcgcuggccgcccagaagaucuccgagugcgucaaggcccagagccugcggaacgacuucugcgggaacggcacccacgugcucuccaucccccagcuggcccccaacggcgugcuguucauccacuacgcguacacgcccaccgaguacgccuucguccagaccagcgccgggcucugccacaacggcaccggguacgcgccccgccagggcauguucgugcugccgaacaacaccaacauguggcacuucacgaccaugcaguucuacaaccccgugaacaucuccgccagcaacacccagguccugaccuccugcagcgugaacuacacguccgugaacuacaccguccucgagcccagcgugcccggggacuacgacuuccagaaggaguucgacaaguucuacaagaaccugagcaccaucuucaacaacaccuucaacccgaacgacuucaacuucuccacgguggacgucaccgcccagaucaagagccugcacgacguggugaaccagcucaaccaguccuucaucgaccugaagaagcugaacgucuacgagaagggcggcuacauccccgaggcgccccgcgacgggcaggccuacgugcggaaggacggcgagugggugcuccugagcaccuucugaggacuaguuauaagacugacuagcccgaugggccucccaacgggcccuccuccccuccuugcaccgagauuaauaaaaaaaaaaaaaaaaaaaaaaaaaaaaaaaaaaaaaaaaaaaaaaaaaaaaaaaaaaaaaaaaugcaucccccccccccccccccccccccccccccccaaaggcucuuuucagagccaccagaauu

SEQ ID NO: 15164 - RNA, 3700 nt, Artificial Sequence
  PDCoV/Swine/Thailand/S5011/2015__AMN91621.1 spike protein mRNA gc (1-1160)
aggagaaagcuuaccaugcagcgcgcccugcucaucaugacccugcugugccucgcccgggcgaaguucgccgacgaccugcuggaccuccugaccuuccccggcgcccaccgcuuccugcacaagccgacgcggaacgacagcauccucuacucccgcgccaacaacaacuucgacguggggguccugcccggcuaccccaccaagaacgugaaccuguucagcccccucaccaacuccacccugccgaucaacgggcugcaccggagcuaccagccccucaugcugaacugccugacgaagaucaccaaccagacccucuccauguaccugcagcccagcgagauccagaccuacuccugcggcggggccauggugaaguaccagacgcacgacgcgguccgcaucauccuggaccucaucgccaccgaccggaucagcguggagguggucggccaggccggcgagaacuacguguucgugugcuccgaccaguucaacuacaccaccgcccugcacaacagcacguucuucucccugaacagccagcucuacugcuucaccaacaacaccuaccuggggauccugcccccggaccucaccgacuucacggucuaccgcaccggccaguucuacgcgaacggguaccugcugggcacccuccccaucaccgugaacuacgugcggcuguaccgcgggcagcuguccgccaacagcgcccacuucgcccucgccaaccugacggacacccugaucacccucaccaacacgaccaucucccagaucaccuacugcgacaagagcgucguggacuccaucgcgugccagcggagcucccaccagguggaggacggcuucuacagcgaccccaagagcgccguccgcgcccggcagcgcaccaucgugacgcugcccaagcugccggagcucgaggugguccagcugaacaucuccgcccacauggacuucggcgaggcccggcuggacagcgugaccaucaacgggaacaccuccuacugcgugaccaagcccuacuuccgccucgagacgaacuuccugugccggggcugcaccaugaaccugcgcaccgacacgugcagcuucgaccucuccgcggucaacaacgggaugagcuucucccaguucugccugagcaccgaguccggcgccugcgagaugaagaucaucgugaccuacguguggaacuaccugcugcggcagcgccucuacgucaccgccguggagggccagacccacaccgggacgaccagcguccacgccaccgacaccuccagcgugaucacggacgugugcaccgacuacaccaucuacggcgucuccgggaccggcaucaucaagcccagcgaccugcugcuccacaacgggaucgccuucacgucccccaccggcgagcuguacgcguucaagaacaucaccaccggcaagacgcuccaggugcugccgugcgagacccccagccagcugaucgugaucaacaacaccgucgugggggccaucaccuccagcaacuccacggagaacaaccgguucaccaccaccaucgugacgcccaccuucuucuacagcaccaacgccaccacgcugaacugcaccaagcccguccucagcuacggcccgaucuccgugugcagcgacggggccaucgccggcaccuccacccugcagaacacgcgccccagcaucgugucccuguacgacggggagaucgagauccccagcgcguucucccucagcguccagaccgaguaccuccaggugcaggccgagcaggucaucguggacugcccccaguacgugugcaacggcaacucccgcugccugcagcugcuggcccaguacaccagcgccugcuccaacaucgagguggcgcugcacagcuccgcccagcucgacagccgggagaucaucuccauguucaagaccagcacgcagucccugcagcuggccaacaucaccaacuucaagggcgacuacaacuucagcagcauccucaccucccgcgucgggggccggagcgccaucgaggaccugcuguucaacaagguggugaccuccgggcucggcacggucgaccaggacuacaagagcugcucccgcaacauggccaucgcggaccuggugugcagccaguacuacaacgggaucauggugcugccgggcgucguggacgccgagaagauggccauguacaccggcucccucaccggggccaugguguucggcgggcugaccgccgcggccgccauccccuucgccaccgccguccaggcgcggcugaacuacguggcccuccagacgaacgugcugcaggagaaccagaagauccuggccgagagcuucaaccaggccgucggcaacaucucccucgcgcugagcuccgugaacgacgccauccagcagaccagcgaggcccugaacaccguggccaucgccaucaagaagauccagaccgucgugaaccagcagggcgaggcgcucucccaccugacggcccagcugagcaacaacuuccaggccaucuccaccagcauccaggacaucuacaaccgccucgaggagguggaggccaaccagcaggucgaccggcugaucaacgggcgccuggccgcgcucaacgccuacgugacccagcugcugaaccagaugucccagauccggcagagccgccuccuggcccagcagaagaucaacgagugcgugaagucccagagcccccgguacggcuucugcgggaacggcacccacaucuucagccugacgcagaccgcccccaacgggaucuucuucaugcacgccguccucgugccgaacaaguucacccgcgugaacgcguccgccggcaucugcgucgacaacacccggggcuacagccugcagccccagcugauccucuaccaguucaacaacuccuggcgcgugacgccccggaacauguacgagccgcgccugccccggcaggccgacuucauccagcugaccgacugcagcgugaccuucuacaacaccacggccgcgaaccuccccaacaucauccccgacgucaucgacgugaaccagaccguguccgacaucaucgacaaccugccgaccgccaccccgccccagugggacgucgggaucuacaacaacacgauccugaaccucaccguggagaucaacgaccugcaggagcgcagcaagaaccugucccagaucgccgaccggcuccagaacuacaucgacaaccugaacaacacccugguggaccucgaguggcugaaccgcgucgagaccuaccugaaguggcccugguacaucuggcucgccaucgcccuggcgcugaucgccuucgugacgauccucaucaccaucuuccugugcaccggcugcugcgggggcugcuucgggugcugcggcggcugcuucgggcuguucagcaagaagaagcgcuacaccgacgaccagcccacgcccuccuucaaguucaaggaguggugaggacuaguuauaagacugacuagcccgaugggccucccaacgggcccuccuccccuccuugcaccgagauuaauaaaaaaaaaaaaaaaaaaaaaaaaaaaaaaaaaaaaaaaaaaaaaaaaaaaaaaaaaaaaaaaaugcaucccccccccccccccccccccccccccccccaaaggcucuuuucagagccaccagaauu

SEQ ID NO: 15165 - RNA, 3700 nt, Artificial Sequence
  PDCoV/Swine/Thailand/S5011/2015__AMN91621.1 spike protein mRNA gc (1-1160)(E855P_V856P)
aggagaaagcuuaccaugcagcgcgcccugcucaucaugacccugcugugccucgcccgggcgaaguucgccgacgaccugcuggaccuccugaccuuccccggcgcccaccgcuuccugcacaagccgacgcggaacgacagcauccucuacucccgcgccaacaacaacuucgacguggggguccugcccggcuaccccaccaagaacgugaaccuguucagcccccucaccaacuccacccugccgaucaacgggcugcaccggagcuaccagccccucaugcugaacugccugacgaagaucaccaaccagacccucuccauguaccugcagcccagcgagauccagaccuacuccugcggcggggccauggugaaguaccagacgcacgacgcgguccgcaucauccuggaccucaucgccaccgaccggaucagcguggagguggucggccaggccggcgagaacuacguguucgugugcuccgaccaguucaacuacaccaccgcccugcacaacagcacguucuucucccugaacagccagcucuacugcuucaccaacaacaccuaccuggggauccugcccccggaccucaccgacuucacggucuaccgcaccggccaguucuacgcgaacggguaccugcugggcacccuccccaucaccgugaacuacgugcggcuguaccgcgggcagcuguccgccaacagcgcccacuucgcccucgccaaccugacggacacccugaucacccucaccaacacgaccaucucccagaucaccuacugcgacaagagcgucguggacuccaucgcgugccagcggagcucccaccagguggaggacggcuucuacagcgaccccaagagcgccguccgcgcccggcagcgcaccaucgugacgcugcccaagcugccggagcucgaggugguccagcugaacaucuccgcccacauggacuucggcgaggcccggcuggacagcgugaccaucaacgggaacaccuccuacugcgugaccaagcccuacuuccgccucgagacgaacuuccugugccggggcugcaccaugaaccugcgcaccgacacgugcagcuucgaccucuccgcggucaacaacgggaugagcuucucccaguucugccugagcaccgaguccggcgccugcgagaugaagaucaucgugaccuacguguggaacuaccugcugcggcagcgccucuacgucaccgccguggagggccagacccacaccgggacgaccagcguccacgccaccgacaccuccagcgugaucacggacgugugcaccgacuacaccaucuacggcgucuccgggaccggcaucaucaagcccagcgaccugcugcuccacaacgggaucgccuucacgucccccaccggcgagcuguacgcguucaagaacaucaccaccggcaagacgcuccaggugcugccgugcgagacccccagccagcugaucgugaucaacaacaccgucgugggggccaucaccuccagcaacuccacggagaacaaccgguucaccaccaccaucgugacgcccaccuucuucuacagcaccaacgccaccacgcugaacugcaccaagcccguccucagcuacggcccgaucuccgugugcagcgacggggccaucgccggcaccuccacccugcagaacacgcgccccagcaucgugucccuguacgacggggagaucgagauccccagcgcguucucccucagcguccagaccgaguaccuccaggugcaggccgagcaggucaucguggacugcccccaguacgugugcaacggcaacucccgcugccugcagcugcuggcccaguacaccagcgccugcuccaacaucgagguggcgcugcacagcuccgcccagcucgacagccgggagaucaucuccauguucaagaccagcacgcagucccugcagcuggccaacaucaccaacuucaagggcgacuacaacuucagcagcauccucaccucccgcgucgggggccggagcgccaucgaggaccugcuguucaacaagguggugaccuccgggcucggcacggucgaccaggacuacaagagcugcucccgcaacauggccaucgcggaccuggugugcagccaguacuacaacgggaucauggugcugccgggcgucguggacgccgagaagauggccauguacaccggcucccucaccggggccaugguguucggcgggcugaccgccgcggccgccauccccuucgccaccgccguccaggcgcggcugaacuacguggcccuccagacgaacgugcugcaggagaaccagaagauccuggccgagagcuucaaccaggccgucggcaacaucucccucgcgcugagcuccgugaacgacgccauccagcagaccagcgaggcccugaacaccguggccaucgccaucaagaagauccagaccgucgugaaccagcagggcgaggcgcucucccaccugacggcccagcugagcaacaacuuccaggccaucuccaccagcauccaggacaucuacaaccgccucgagccgcccgaggccaaccagcaggucgaccggcugaucaacgggcgccuggccgcgcucaacgccuacgugacccagcugcugaaccagaugucccagauccggcagagccgccuccuggcccagcagaagaucaacgagugcgugaagucccagagcccccgguacggcuucugcgggaacggcacccacaucuucagccugacgcagaccgcccccaacgggaucuucuucaugcacgccgugcucguccccaacaaguucacccgcgugaacgcguccgccggcaucugcguggacaacacccggggcuacagccugcagccgcagcugauccucuaccaguucaacaacuccuggcgcgucacgccccggaacauguacgagccccgccugccccggcaggccgacuucauccagcugaccgacugcagcgugaccuucuacaacaccacggccgcgaaccucccgaacaucauccccgacgugaucgacgucaaccagaccguguccgacaucaucgacaaccugcccaccgccacgcccccgcagugggacguggggaucuacaacaacaccauccugaaccucaccgucgagaucaacgaccugcaggagcgcagcaagaaccugucccagaucgccgaccggcuccagaacuacaucgacaaccugaacaacacccugguggaccucgaguggcugaaccgcguggagaccuaccugaaguggcccugguacaucuggcucgccaucgcccuggcgcugaucgccuucgucacgauccucaucaccaucuuccugugcaccggcugcugcgggggcugcuucgggugcugcggcggcugcuucgggcuguucagcaagaagaagcgcuacaccgacgaccagcccacgcccuccuucaaguucaaggaguggugaggacuaguuauaagacugacuagcccgaugggccucccaacgggcccuccuccccuccuugcaccgagauuaauaaaaaaaaaaaaaaaaaaaaaaaaaaaaaaaaaaaaaaaaaaaaaaaaaaaaaaaaaaaaaaaaugcaucccccccccccccccccccccccccccccccaaaggcucuuuucagagccaccagaauu

SEQ ID NO: 15166 - RNA, 3499 nt, Artificial Sequence
  PDCoV/Swine/Thailand/S5011/2015__AMN91621.1 spike protein mRNA gc (variant)
aggagaaagcuuaccaugcagcgcgcccugcucaucaugacccugcugugccucgcccgggcgaaguucgccgacgaccugcuggaccuccugaccuuccccggcgcccaccgcuuccugcacaagccgacgcggaacgacagcauccucuacucccgcgccaacaacaacuucgacguggggguccugcccggcuaccccaccaagaacgugaaccuguucagcccccucaccaacuccacccugccgaucaacgggcugcaccggagcuaccagccccucaugcugaacugccugacgaagaucaccaaccagacccucuccauguaccugcagcccagcgagauccagaccuacuccugcggcggggccauggugaaguaccagacgcacgacgcgguccgcaucauccuggaccucaucgccaccgaccggaucagcguggagguggucggccaggccggcgagaacuacguguucgugugcuccgaccaguucaacuacaccaccgcccugcacaacagcacguucuucucccugaacagccagcucuacugcuucaccaacaacaccuaccuggggauccugcccccggaccucaccgacuucacggucuaccgcaccggccaguucuacgcgaacggguaccugcugggcacccuccccaucaccgugaacuacgugcggcuguaccgcgggcagcuguccgccaacagcgcccacuucgcccucgccaaccugacggacacccugaucacccucaccaacacgaccaucucccagaucaccuacugcgacaagagcgucguggacuccaucgcgugccagcggagcucccaccagguggaggacggcuucuacagcgaccccaagagcgccguccgcgcccggcagcgcaccaucgugacgcugcccaagcugccggagcucgaggugguccagcugaacaucuccgcccacauggacuucggcgaggcccggcuggacagcgugaccaucaacgggaacaccuccuacugcgugaccaagcccuacuuccgccucgagacgaacuuccugugccggggcugcaccaugaaccugcgcaccgacacgugcagcuucgaccucuccgcggucaacaacgggaugagcuucucccaguucugccugagcaccgaguccggcgccugcgagaugaagaucaucgugaccuacguguggaacuaccugcugcggcagcgccucuacgucaccgccguggagggccagacccacaccgggacgaccagcguccacgccaccgacaccuccagcgugaucacggacgugugcaccgacuacaccaucuacggcgucuccgggaccggcaucaucaagcccagcgaccugcugcuccacaacgggaucgccuucacgucccccaccggcgagcuguacgcguucaagaacaucaccaccggcaagacgcuccaggugcugccgugcgagacccccagccagcugaucgugaucaacaacaccgucgugggggccaucaccuccagcaacuccacggagaacaaccgguucaccaccaccaucgugacgcccaccuucuucuacagcaccaacgccaccacgcugaacugcaccaagcccguccucagcuacggcccgaucuccgugugcagcgacggggccaucgccggcaccuccacccugcagaacacgcgccccagcaucgugucccuguacgacggggagaucgagauccccagcgcguucucccucagcguccagaccgaguaccuccaggugcaggccgagcaggucaucguggacugcccccaguacgugugcaacggcaacucccgcugccugcagcugcuggcccaguacaccagcgccugcuccaacaucgagguggcgcugcacagcuccgcccagcucgacagccgggagaucaucuccauguucaagaccagcacgcagucccugcagcuggccaacaucaccaacuucaagggcgacuacaacuucagcagcauccucaccucccgcgucgggggccggagcgccaucgaggaccugcuguucaacaagguggugaccuccgggcucggcacggucgaccaggacuacaagagcugcucccgcaacauggccaucgcggaccuggugugcagccaguacuacaacgggaucauggugcugccgggcgucguggacgccgagaagauggccauguacaccggcucccucaccggggccaugguguucggcgggcugaccgccgcggccgccauccccuucgccaccgccguccaggcgcggcugaacuacguggcccuccagacgaacgugcugcaggagaaccagaagauccuggccgagagcuucaaccaggccgucggcaacaucucccucgcgcugagcuccgugaacgacgccauccagcagaccagcgaggcccugaacaccguggccaucgccaucaagaagauccagaccgucgugaaccagcagggcgaggcgcucucccaccugacggcccagcugagcaacaacuuccaggccaucuccaccagcauccaggacaucuacaaccgccucgagccgcccgaggccaaccagcaggucgaccggcugaucaacgggcgccuggccgcgcucaacgccuacgugacccagcugcugaaccagaugucccagauccggcagagccgccuccuggcccagcagaagaucaacgagugcgugaagucccagagcccccgguacggcuucugcgggaacggcacccacaucuucagccugacgcagaccgcccccaacgggaucuucuucaugcacgccgugcucguccccaacaaguucacccgcgugaacgcguccgccggcaucugcguggacaacacccggggcuacagccugcagccgcagcugauccucuaccaguucaacaacuccuggcgcgucacgccccggaacauguacgagccccgccugccccggcaggccgacuucauccagcugaccgacugcagcgugaccuucuacaacaccacggccgcgaaccucccgaacaucauccccgacgugaucgacgucaaccagaccguguccgacaucaucgacaaccugcccaccgccacgcccccgcagugggacguggggaucuacaacaacaccauccugaaccucaccgucgagaucaacgaccugcaggagcgcagcaagaaccugucccagaucgccgaccggcuccagaacuacaucgacaaccugaacaacacccugguggaccucgaguggcugaaccgcguggagaccugaggacuaguuauaagacugacuagcccgaugggccucccaacgggcccuccuccccuccuugcaccgagauuaauaaaaaaaaaaaaaaaaaaaaaaaaaaaaaaaaaaaaaaaaaaaaaaaaaaaaaaaaaaaaaaaaugcaucccccccccccccccccccccccccccccccaaaggcucuuuucagagccaccagaauu

SEQ ID NO: 15167 - RNA, 3580 nt, Artificial Sequence
  PDCoV/Swine/Thailand/S5011/2015__AMN91621.1 spike protein mRNA gc (variant)
aggagaaagcuuaccaugcagcgcgcccugcucaucaugacccugcugugccucgcccgggccaaguucgccgacgaccugcuggaccuccugaccuuccccggcgcccaccgcuuccugcacaagccgacgcggaacgacagcauccucuacucccgcgccaacaacaacuucgacguggggguccugcccggcuaccccaccaagaacgugaaccuguucagcccccucaccaacuccacccugccgaucaacgggcugcaccggagcuaccagccccucaugcugaacugccugacgaagaucaccaaccagacccucuccauguaccugcagcccagcgagauccagaccuacuccugcggcggggccauggugaaguaccagacgcacgacgcgguccgcaucauccuggaccucaucgccaccgaccggaucagcguggagguggucggccaggccggcgagaacuacguguucgugugcuccgaccaguucaacuacaccaccgcccugcacaacagcacguucuucucccugaacagccagcucuacugcuucaccaacaacaccuaccuggggauccugcccccggaccucaccgacuucacggucuaccgcaccggccaguucuacgcgaacggguaccugcugggcacccuccccaucaccgugaacuacgugcggcuguaccgcgggcagcuguccgccaacagcgcccacuucgcccucgccaaccugacggacacccugaucacccucaccaacacgaccaucucccagaucaccuacugcgacaagagcgucguggacuccaucgcgugccagcggagcucccaccagguggaggacggcuucuacagcgaccccaagagcgccguccgcgcccggcagcgcaccaucgugacgcugcccaagcugccggagcucgaggugguccagcugaacaucuccgcccacauggacuucggcgaggcccggcuggacagcgugaccaucaacgggaacaccuccuacugcgugaccaagcccuacuuccgccucgagacgaacuuccugugccggggcugcaccaugaaccugcgcaccgacacgugcagcuucgaccucuccgcggucaacaacgggaugagcuucucccaguucugccugagcaccgaguccggcgccugcgagaugaagaucaucgugaccuacguguggaacuaccugcugcggcagcgccucuacgucaccgccguggagggccagacccacaccgggacgaccagcguccacgccaccgacaccuccagcgugaucacggacgugugcaccgacuacaccaucuacggcgucuccgggaccggcaucaucaagcccagcgaccugcugcuccacaacgggaucgccuucacgucccccaccggcgagcuguacgcguucaagaacaucaccaccggcaagacgcuccaggugcugccgugcgagacccccagccagcugaucgugaucaacaacaccgucgugggggccaucaccuccagcaacuccacggagaacaaccgguucaccaccaccaucgugacgcccaccuucuucuacagcaccaacgccaccacgcugaacugcaccaagcccguccucagcuacggcccgaucuccgugugcagcgacggggccaucgccggcaccuccacccugcagaacacgcgccccagcaucgugucccuguacgacggggagaucgagauccccagcgcguucucccucagcguccagaccgaguaccuccaggugcaggccgagcaggucaucguggacugcccccaguacgugugcaacggcaacucccgcugccugcagcugcuggcccaguacaccagcgccugcuccaacaucgagguggcgcugcacagcuccgcccagcucgacagccgggagaucaucuccauguucaagaccagcacgcagucccugcagcuggccaacaucaccaacuucaagggcgacuacaacuucagcagcauccucaccucccgcgucgggggccggagcgccaucgaggaccugcuguucaacaagguggugaccuccgggcucggcacggucgaccaggacuacaagagcugcucccgcaacauggccaucgcggaccuggugugcagccaguacuacaacgggaucauggugcugccgggcgucguggacgccgagaagauggccauguacaccggcucccucaccggggccaugguguucggcgggcugaccgccgcggccgccauccccuucgccaccgccguccaggcgcggcugaacuacguggcccuccagacgaacgugcugcaggagaaccagaagauccuggccgagagcuucaaccaggccgucggcaacaucucccucgcgcugagcuccgugaacgacgccauccagcagaccagcgaggcccugaacaccguggccaucgccaucaagaagauccagaccgucgugaaccagcagggcgaggcgcucucccaccugacggcccagcugagcaacaacuuccaggccaucuccaccagcauccaggacaucuacaaccgccucgagccgcccgaggccaaccagcaggucgaccggcugaucaacgggcgccuggccgcgcucaacgccuacgugacccagcugcugaaccagaugucccagauccggcagagccgccuccuggcccagcagaagaucaacgagugcgugaagucccagagcccccgguacggcuucugcgggaacggcacccacaucuucagccugacgcagaccgcccccaacgggaucuucuucaugcacgccgugcucguccccaacaaguucacccgcgugaacgcguccgccggcaucugcguggacaacacccggggcuacagccugcagccgcagcugauccucuaccaguucaacaacuccuggcgcgucacgccccggaacauguacgagccccgccugccccggcaggccgacuucauccagcugaccgacugcagcgugaccuucuacaacaccacggccgcgaaccucccgaacaucauccccgacgugaucgacgucaaccagaccguguccgacaucaucgacaaccugcccaccgccacgcccccgcagugggacguggggaucuacaacaacaccauccugaaccucaccgucgagaucaacgaccugcaggagcgcagcaagaaccugucccagaucgccgaccggcuccagaacuacaucgacaaccugaacaacacccugguggaccucgaguggcugaaccgcguggagaccggcggguacauccccgaggcgccccgcgacggccaggccuacguccggaaggacggggagugggugcugcucagcacguucugaggacuaguuauaagacugacuagcccgaugggccucccaacgggcccuccuccccuccuugcaccgagauuaauaaaaaaaaaaaaaaaaaaaaaaaaaaaaaaaaaaaaaaaaaaaaaaaaaaaaaaaaaaaaaaaaugcaucccccccccccccccccccccccccccccccaaaggcucuuuucagagccaccagaauu

SEQ ID NO: 15168 - RNA, 4378 nt, Artificial Sequence
  PEDV/NPL-PEDv/2013/P10__AHZ94887.1 spike protein mRNA gc (1-1386)
aggagaaagcuuaccaugaagucccugaccuacuucuggcuguuccugcccgugcugagcacccucagccugccgcaggacgucacgcgcugcuccgccaacaccaacuuccggcgcuucuucagcaaguucaacgugcaggcccccgcgguggucgugcugggcggguaccuccccaucggcgagaaccagggggugaacuccaccugguacugcgccggccagcaccccaccgccagcgggguccacggcaucuucgugucccacauccggggcgggcacggcuucgagaucgggaucagccaggagccguucgaccccuccggcuaccagcuguaccugcacaaggccacgaacgggaacaccaacgccaccgcgcgccuccggaucugccaguuccccagcaucaagacccugggccccacggccaacaacgacgugaccaccggccgcaacugccuguucaacaaggccaucccggcccacauguccgagcacagcgucguggggaucaccugggacaacgaccgggugacggucuucuccgacaagaucuacuacuucuacuucaagaacgacuggagccgcguggcgaccaagugcuacaacuccggcgggugcgccaugcaguacguguacgagcccaccuacuacaugcucaacgucaccagcgccggcgaggacggcaucuccuaccagcccugcacggccaacugcaucggguacgccgcgaacguguucgccaccgagcccaacggccacaucccggagggguucagcuucaacaacugguuccugcuguccaacgacagcacccucgugcacggcaaggucgugagcaaccagccccugcuggugaacugccuccuggccauccccaagaucuacgggcugggccaguucuucuccuucaaccagaccaucgacggcgucugcaacggggccgccgugcagcgggcgcccgaggcccuccgcuucaacaucaacgacaucagcgugauccuggccgagggcuccaucguccugcacacggcccucgggaccaacuucagcuucgugugcuccaacagcuccaacccgcaccuggccaccuucgcgaucccccugggcgccacccagguccccuacuacugcuucuucaagguggacacguacaacagcaccguguacaaguuccucgccguccugcccccgaccgugcgggagaucgugaucaccaaguacggggacgucuacgugaacggcuucggcuaccugcaccucgggcugcuggacgccgugacgaucaacuucaccggccacgggaccgacgacgacgucuccggcuucuggaccaucgccagcacgaacuucguggacgcgcucaucgaggugcaggggaccgccauccagcgcauccuguacugcgacgaccccgucucccagcugaagugcagccagguggccuucgaccucgacgacggcuucuacaccaucuccagccggaaccugcugucccacgagcagcccaucagcuucgugacccuccccuccuucaacgaccacagcuucgucaacaucacgguguccgccagcuucggcgggcacagcggcgcgaaccugaucgccuccgacaccaccaucaacggguucagcuccuucugcguggacacccgccaguucaccaucagccuguucuacaacgucacgaacuccuacggcuacgugagcaagucccaggacagcaacugcccguucacccuccaguccgugaacgacuaccugagcuucuccaaguucugcgucagcaccucccugcucgccagcgccugcaccaucgaccuguucggcuaccccgaguucggguccggcgugaaguucacgagccuguacuuccaguucaccaagggggagcugaucaccggcacccccaagccccucgagggggugacggacgucuccuucaugacccuggacgugugcaccaaguacaccaucuacggcuucaagggcgaggggaucaucacgcugaccaacagcagcuuccucgccggcguguacuacaccuccgacagcgggcagcugcuggcguucaagaacgucaccuccggcgccguguacagcgugacgccgugcuccuucagcgagcaggccgccuacgucgacgacgacaucgugggggugaucuccagccucuccagcuccaccuucaacagcacccgggagcugcccggcuucuucuaccacuccaacgacggcagcaacugcaccgagcccguccugguguacuccaacaucggggugugcaagagcggcuccaucggguacgucccgagccaguccggccaggugaagaucgcccccacggugaccgggaacaucagcauccccaccaacuucagcauguccauccgcaccgaguaccuccagcuguacaacacgcccgucagcguggacugcgcgaccuacgugugcaacggcaacucccggugcaagcagcugcucacccaguacaccgccgccugcaagacgaucgagagcgcccugcagcuguccgcccgccucgagagcgucgaggugaacuccaugcugaccaucagcgacgaggcgcugcagcucgccaccaucuccagcuucaacggcgacggguacaacuucaccaacgugcugggcgucuccguguacgacccggccagccggcgcgugguccagaagcgguccuucaucgaggaccuccucuucaacaagguggugacgaacgggcugggcaccgucgacgaggacuacaagcgcugcagcaacgggcgcuccguggccgaccuggucugcgcgcaguacuacagcggcgugauggugcuccccggcgucguggacgccgagaagcugcacauguacuccgccagccugaucgggggcauggugcucgggggcuucaccuccgccgccgcgcugcccuucagcuacgccguccaggcccggcugaacuaccucgcccugcagaccgacgugcugcagcgcaaccagcagcuccuggccgagagcuucaacuccgcgaucggcaacaucacgagcgccuucgaguccgugaaggaggccaucagccagaccuccaaggggcugaacaccgucgcccacgcccucaccaaggugcaggagguggucaacagccagggcgcggcccugacccagcugacggugcagcuccagcacaacuuccaggccaucuccagcuccaucgacgacaucuacagccggcuggacauccuguccgccgacgcccagguggaccgccucaucaccgggcggcugagcgcccugaacgccuucgucgcccagacccucaccaaguacacggaggugcaggccucccgcaagcuggcgcagcagaaggugaacgagugcgucaagagccagucccagcgguacggcuucugcgggggcgacggcgagcacaucuucagccuggugcaggccgcgccccaggggcuccuguuccugcacaccgugcucgucccguccgacuucguggacgugaucgccaucgccggccugugcgucaacgacgagaucgcgcugacccuccgcgagcccgggcuggugcuguucacccacgagcuccagaaccacacggccaccgaguacuucgugagcucccggcgcauguucgagccccggaagcccaccgucagcgacuucgugcagaucgagagcugcguggucaccuacgugaaccugacgcgcgaccagcugccggacgugauccccgacuacaucgacgucaacaagacccucuacgagauccuggccucccugcccaaccggaccggccccagccucccgcuggacguguucaacgccaccuaccugaaccucacgggggagaucgccgaccuggagcagcgcuccgagagccugcggaacaccaccgaggagcuccagucccugaucuacaacaucaacaacacccugguggaccucgaguggcugaaccgcgucgagacguacaucaaguggcccugguggguguggcugaucaucuucaucgugcucaucuucgucgugagccugcugguguucugcugcaucuccaccggcugcugcggcugcugcgggugcugcugcgcgugcuucagcggcugcugccgggggccccgccuccagcccuacgaggucuucgagaaggugcacgugcagugaggacuaguuauaagacugacuagcccgaugggccucccaacgggcccuccuccccuccuugcaccgagauuaauaaaaaaaaaaaaaaaaaaaaaaaaaaaaaaaaaaaaaaaaaaaaaaaaaaaaaaaaaaaaaaaaugcaucccccccccccccccccccccccccccccccaaaggcucuuuucagagccaccagaauu

SEQ ID NO: 15169 - RNA, 4378 nt, Artificial Sequence
  PEDV/NPL-PEDv/2013/P10__AHZ94887.1 spike protein mRNA gc (1-1386)(I1076P_L1077P)
aggagaaagcuuaccaugaagucccugaccuacuucuggcuguuccugcccgugcugagcacccucagccugccgcaggacgucacgcgcugcuccgccaacaccaacuuccggcgcuucuucagcaaguucaacgugcaggcccccgcgguggucgugcugggcggguaccuccccaucggcgagaaccagggggugaacuccaccugguacugcgccggccagcaccccaccgccagcgggguccacggcaucuucgugucccacauccggggcgggcacggcuucgagaucgggaucagccaggagccguucgaccccuccggcuaccagcuguaccugcacaaggccacgaacgggaacaccaacgccaccgcgcgccuccggaucugccaguuccccagcaucaagacccugggccccacggccaacaacgacgugaccaccggccgcaacugccuguucaacaaggccaucccggcccacauguccgagcacagcgucguggggaucaccugggacaacgaccgggugacggucuucuccgacaagaucuacuacuucuacuucaagaacgacuggagccgcguggcgaccaagugcuacaacuccggcgggugcgccaugcaguacguguacgagcccaccuacuacaugcucaacgucaccagcgccggcgaggacggcaucuccuaccagcccugcacggccaacugcaucggguacgccgcgaacguguucgccaccgagcccaacggccacaucccggagggguucagcuucaacaacugguuccugcuguccaacgacagcacccucgugcacggcaaggucgugagcaaccagccccugcuggugaacugccuccuggccauccccaagaucuacgggcugggccaguucuucuccuucaaccagaccaucgacggcgucugcaacggggccgccgugcagcgggcgcccgaggcccuccgcuucaacaucaacgacaucagcgugauccuggccgagggcuccaucguccugcacacggcccucgggaccaacuucagcuucgugugcuccaacagcuccaacccgcaccuggccaccuucgcgaucccccugggcgccacccagguccccuacuacugcuucuucaagguggacacguacaacagcaccguguacaaguuccucgccguccugcccccgaccgugcgggagaucgugaucaccaaguacggggacgucuacgugaacggcuucggcuaccugcaccucgggcugcuggacgccgugacgaucaacuucaccggccacgggaccgacgacgacgucuccggcuucuggaccaucgccagcacgaacuucguggacgcgcucaucgaggugcaggggaccgccauccagcgcauccuguacugcgacgaccccgucucccagcugaagugcagccagguggccuucgaccucgacgacggcuucuacaccaucuccagccggaaccugcugucccacgagcagcccaucagcuucgugacccuccccuccuucaacgaccacagcuucgucaacaucacgguguccgccagcuucggcgggcacagcggcgcgaaccugaucgccuccgacaccaccaucaacggguucagcuccuucugcguggacacccgccaguucaccaucagccuguucuacaacgucacgaacuccuacggcuacgugagcaagucccaggacagcaacugcccguucacccuccaguccgugaacgacuaccugagcuucuccaaguucugcgucagcaccucccugcucgccagcgccugcaccaucgaccuguucggcuaccccgaguucggguccggcgugaaguucacgagccuguacuuccaguucaccaagggggagcugaucaccggcacccccaagccccucgagggggugacggacgucuccuucaugacccuggacgugugcaccaaguacaccaucuacggcuucaagggcgaggggaucaucacgcugaccaacagcagcuuccucgccggcguguacuacaccuccgacagcgggcagcugcuggcguucaagaacgucaccuccggcgccguguacagcgugacgccgugcuccuucagcgagcaggccgccuacgucgacgacgacaucgugggggugaucuccagccucuccagcuccaccuucaacagcacccgggagcugcccggcuucuucuaccacuccaacgacggcagcaacugcaccgagcccguccugguguacuccaacaucggggugugcaagagcggcuccaucggguacgucccgagccaguccggccaggugaagaucgcccccacggugaccgggaacaucagcauccccaccaacuucagcauguccauccgcaccgaguaccuccagcuguacaacacgcccgucagcguggacugcgcgaccuacgugugcaacggcaacucccggugcaagcagcugcucacccaguacaccgccgccugcaagacgaucgagagcgcccugcagcuguccgcccgccucgagagcgucgaggugaacuccaugcugaccaucagcgacgaggcgcugcagcucgccaccaucuccagcuucaacggcgacggguacaacuucaccaacgugcugggcgucuccguguacgacccggccagccggcgcgugguccagaagcgguccuucaucgaggaccuccucuucaacaagguggugacgaacgggcugggcaccgucgacgaggacuacaagcgcugcagcaacgggcgcuccguggccgaccuggucugcgcgcaguacuacagcggcgugauggugcuccccggcgucguggacgccgagaagcugcacauguacuccgccagccugaucgggggcauggugcucgggggcuucaccuccgccgccgcgcugcccuucagcuacgccguccaggcccggcugaacuaccucgcccugcagaccgacgugcugcagcgcaaccagcagcuccuggccgagagcuucaacuccgcgaucggcaacaucacgagcgccuucgaguccgugaaggaggccaucagccagaccuccaaggggcugaacaccgucgcccacgcccucaccaaggugcaggagguggucaacagccagggcgcggcccugacccagcugacggugcagcuccagcacaacuuccaggccaucuccagcuccaucgacgacaucuacagccggcuggacccgcccuccgccgacgcccagguggaccgccugaucaccgggcggcucagcgcccugaacgccuucgucgcccagacccugaccaaguacacggaggugcaggccucccgcaagcucgcgcagcagaaggugaacgagugcgucaagagccagucccagcgguacggcuucugcgggggcgacggcgagcacaucuucagccuggugcaggccgcgccccaggggcuccuguuccugcacaccgugcugguccccuccgacuucguggacgugaucgccaucgccggccucugcgucaacgacgagaucgcgcugacccugcgcgagcccgggcucgugcuguucacccacgagcugcagaaccacacggccaccgaguacuucgugagcucccggcgcauguucgagccgcggaagcccaccgucagcgacuucgugcagaucgagagcugcguggucaccuacgugaaccucacgcgcgaccagcugcccgacgugauccccgacuacaucgacgucaacaagacccuguacgagauccucgccucccugccgaaccggaccggccccagccugccccucgacguguucaacgccaccuaccugaaccugacgggggagaucgccgaccucgagcagcgcuccgagagccugcggaacaccaccgaggagcugcagucccucaucuacaacaucaacaacacccugguggaccuggaguggcucaaccgcgucgagacguacaucaaguggcccugguggguguggcugaucaucuucaucgugcugaucuucgucgugagccuccugguguucugcugcaucuccaccggcugcugcggcugcugcgggugcugcugcgcgugcuucagcggcugcugccgggggccgcgccugcagcccuacgaggucuucgagaaggugcacgugcagugaggacuaguuauaagacugacuagcccgaugggccucccaacgggcccuccuccccuccuugcaccgagauuaauaaaaaaaaaaaaaaaaaaaaaaaaaaaaaaaaaaaaaaaaaaaaaaaaaaaaaaaaaaaaaaaaugcaucccccccccccccccccccccccccccccccaaaggcucuuuucagagccaccagaauu

SEQ ID NO: 15170 - RNA, 4186 nt, Artificial Sequence
  PEDV/NPL-PEDv/2013/P10__AHZ94887.1 spike protein mRNA gc (variant)
aggagaaagcuuaccaugaagucccugaccuacuucuggcuguuccugcccgugcugagcacccucagccugccgcaggacgucacgcgcugcuccgccaacaccaacuuccggcgcuucuucagcaaguucaacgugcaggcccccgcgguggucgugcugggcggguaccuccccaucggcgagaaccagggggugaacuccaccugguacugcgccggccagcaccccaccgccagcgggguccacggcaucuucgugucccacauccggggcgggcacggcuucgagaucgggaucagccaggagccguucgaccccuccggcuaccagcuguaccugcacaaggccacgaacgggaacaccaacgccaccgcgcgccuccggaucugccaguuccccagcaucaagacccugggccccacggccaacaacgacgugaccaccggccgcaacugccuguucaacaaggccaucccggcccacauguccgagcacagcgucguggggaucaccugggacaacgaccgggugacggucuucuccgacaagaucuacuacuucuacuucaagaacgacuggagccgcguggcgaccaagugcuacaacuccggcgggugcgccaugcaguacguguacgagcccaccuacuacaugcucaacgucaccagcgccggcgaggacggcaucuccuaccagcccugcacggccaacugcaucggguacgccgcgaacguguucgccaccgagcccaacggccacaucccggagggguucagcuucaacaacugguuccugcuguccaacgacagcacccucgugcacggcaaggucgugagcaaccagccccugcuggugaacugccuccuggccauccccaagaucuacgggcugggccaguucuucuccuucaaccagaccaucgacggcgucugcaacggggccgccgugcagcgggcgcccgaggcccuccgcuucaacaucaacgacaucagcgugauccuggccgagggcuccaucguccugcacacggcccucgggaccaacuucagcuucgugugcuccaacagcuccaacccgcaccuggccaccuucgcgaucccccugggcgccacccagguccccuacuacugcuucuucaagguggacacguacaacagcaccguguacaaguuccucgccguccugcccccgaccgugcgggagaucgugaucaccaaguacggggacgucuacgugaacggcuucggcuaccugcaccucgggcugcuggacgccgugacgaucaacuucaccggccacgggaccgacgacgacgucuccggcuucuggaccaucgccagcacgaacuucguggacgcgcucaucgaggugcaggggaccgccauccagcgcauccuguacugcgacgaccccgucucccagcugaagugcagccagguggccuucgaccucgacgacggcuucuacaccaucuccagccggaaccugcugucccacgagcagcccaucagcuucgugacccuccccuccuucaacgaccacagcuucgucaacaucacgguguccgccagcuucggcgggcacagcggcgcgaaccugaucgccuccgacaccaccaucaacggguucagcuccuucugcguggacacccgccaguucaccaucagccuguucuacaacgucacgaacuccuacggcuacgugagcaagucccaggacagcaacugcccguucacccuccaguccgugaacgacuaccugagcuucuccaaguucugcgucagcaccucccugcucgccagcgccugcaccaucgaccuguucggcuaccccgaguucggguccggcgugaaguucacgagccuguacuuccaguucaccaagggggagcugaucaccggcacccccaagccccucgagggggugacggacgucuccuucaugacccuggacgugugcaccaaguacaccaucuacggcuucaagggcgaggggaucaucacgcugaccaacagcagcuuccucgccggcguguacuacaccuccgacagcgggcagcugcuggcguucaagaacgucaccuccggcgccguguacagcgugacgccgugcuccuucagcgagcaggccgccuacgucgacgacgacaucgugggggugaucuccagccucuccagcuccaccuucaacagcacccgggagcugcccggcuucuucuaccacuccaacgacggcagcaacugcaccgagcccguccugguguacuccaacaucggggugugcaagagcggcuccaucggguacgucccgagccaguccggccaggugaagaucgcccccacggugaccgggaacaucagcauccccaccaacuucagcauguccauccgcaccgaguaccuccagcuguacaacacgcccgucagcguggacugcgcgaccuacgugugcaacggcaacucccggugcaagcagcugcucacccaguacaccgccgccugcaagacgaucgagagcgcccugcagcuguccgcccgccucgagagcgucgaggugaacuccaugcugaccaucagcgacgaggcgcugcagcucgccaccaucuccagcuucaacggcgacggguacaacuucaccaacgugcugggcgucuccguguacgacccggccagccggcgcgugguccagaagcgguccuucaucgaggaccuccucuucaacaagguggugacgaacgggcugggcaccgucgacgaggacuacaagcgcugcagcaacgggcgcuccguggccgaccuggucugcgcgcaguacuacagcggcgugauggugcuccccggcgucguggacgccgagaagcugcacauguacuccgccagccugaucgggggcauggugcucgggggcuucaccuccgccgccgcgcugcccuucagcuacgccguccaggcccggcugaacuaccucgcccugcagaccgacgugcugcagcgcaaccagcagcuccuggccgagagcuucaacuccgcgaucggcaacaucacgagcgccuucgaguccgugaaggaggccaucagccagaccuccaaggggcugaacaccgucgcccacgcccucaccaaggugcaggagguggucaacagccagggcgcggcccugacccagcugacggugcagcuccagcacaacuuccaggccaucuccagcuccaucgacgacaucuacagccggcuggacccgcccuccgccgacgcccagguggaccgccugaucaccgggcggcucagcgcccugaacgccuucgucgcccagacccugaccaaguacacggaggugcaggccucccgcaagcucgcgcagcagaaggugaacgagugcgucaagagccagucccagcgguacggcuucugcgggggcgacggcgagcacaucuucagccuggugcaggccgcgccccaggggcuccuguuccugcacaccgugcugguccccuccgacuucguggacgugaucgccaucgccggccucugcgucaacgacgagaucgcgcugacccugcgcgagcccgggcucgugcuguucacccacgagcugcagaaccacacggccaccgaguacuucgugagcucccggcgcauguucgagccgcggaagcccaccgucagcgacuucgugcagaucgagagcugcguggucaccuacgugaaccucacgcgcgaccagcugcccgacgugauccccgacuacaucgacgucaacaagacccuguacgagauccucgccucccugccgaaccggaccggccccagccugccccucgacguguucaacgccaccuaccugaaccugacgggggagaucgccgaccucgagcagcgcuccgagagccugcggaacaccaccgaggagcugcagucccucaucuacaacaucaacaacacccugguggaccuggaguggcucaaccgcgucgagacgugaggacuaguuauaagacugacuagcccgaugggccucccaacgggcccuccuccccuccuugcaccgagauuaauaaaaaaaaaaaaaaaaaaaaaaaaaaaaaaaaaaaaaaaaaaaaaaaaaaaaaaaaaaaaaaaaugcaucccccccccccccccccccccccccccccccaaaggcucuuuucagagccaccagaauu

SEQ ID NO: 15171 - RNA, 4267 nt, Artificial Sequence
  PEDV/NPL-PEDv/2013/P10__AHZ94887.1 spike protein mRNA gc (variant)
aggagaaagcuuaccaugaagucccugaccuacuucuggcuguuccugcccgugcugagcacccucagccugccgcaggacgucacgcgcugcuccgccaacaccaacuuccggcgcuucuucagcaaguucaacgugcaggcccccgcgguggucgugcugggcggguaccuccccaucggcgagaaccagggggugaacuccaccugguacugcgccggccagcaccccaccgccagcgggguccacggcaucuucgugucccacauccggggcgggcacggcuucgagaucgggaucagccaggagccguucgaccccuccggcuaccagcuguaccugcacaaggccacgaacgggaacaccaacgccaccgcgcgccuccggaucugccaguuccccagcaucaagacccugggccccacggccaacaacgacgugaccaccggccgcaacugccuguucaacaaggccaucccggcccacauguccgagcacagcgucguggggaucaccugggacaacgaccgggugacggucuucuccgacaagaucuacuacuucuacuucaagaacgacuggagccgcguggcgaccaagugcuacaacuccggcgggugcgccaugcaguacguguacgagcccaccuacuacaugcucaacgucaccagcgccggcgaggacggcaucuccuaccagcccugcacggccaacugcaucggguacgccgcgaacguguucgccaccgagcccaacggccacaucccggagggguucagcuucaacaacugguuccugcuguccaacgacagcacccucgugcacggcaaggucgugagcaaccagccccugcuggugaacugccuccuggccauccccaagaucuacgggcugggccaguucuucuccuucaaccagaccaucgacggcgucugcaacggggccgccgugcagcgggcgcccgaggcccuccgcuucaacaucaacgacaucagcgugauccuggccgagggcuccaucguccugcacacggcccucgggaccaacuucagcuucgugugcuccaacagcuccaacccgcaccuggccaccuucgcgaucccccugggcgccacccagguccccuacuacugcuucuucaagguggacacguacaacagcaccguguacaaguuccucgccguccugcccccgaccgugcgggagaucgugaucaccaaguacggggacgucuacgugaacggcuucggcuaccugcaccucgggcugcuggacgccgugacgaucaacuucaccggccacgggaccgacgacgacgucuccggcuucuggaccaucgccagcacgaacuucguggacgcgcucaucgaggugcaggggaccgccauccagcgcauccuguacugcgacgaccccgucucccagcugaagugcagccagguggccuucgaccucgacgacggcuucuacaccaucuccagccggaaccugcugucccacgagcagcccaucagcuucgugacccuccccuccuucaacgaccacagcuucgucaacaucacgguguccgccagcuucggcgggcacagcggcgcgaaccugaucgccuccgacaccaccaucaacggguucagcuccuucugcguggacacccgccaguucaccaucagccuguucuacaacgucacgaacuccuacggcuacgugagcaagucccaggacagcaacugcccguucacccuccaguccgugaacgacuaccugagcuucuccaaguucugcgucagcaccucccugcucgccagcgccugcaccaucgaccuguucggcuaccccgaguucggguccggcgugaaguucacgagccuguacuuccaguucaccaagggggagcugaucaccggcacccccaagccccucgagggggugacggacgucuccuucaugacccuggacgugugcaccaaguacaccaucuacggcuucaagggcgaggggaucaucacgcugaccaacagcagcuuccucgccggcguguacuacaccuccgacagcgggcagcugcuggcguucaagaacgucaccuccggcgccguguacagcgugacgccgugcuccuucagcgagcaggccgccuacgucgacgacgacaucgugggggugaucuccagccucuccagcuccaccuucaacagcacccgggagcugcccggcuucuucuaccacuccaacgacggcagcaacugcaccgagcccguccugguguacuccaacaucggggugugcaagagcggcuccaucggguacgucccgagccaguccggccaggugaagaucgcccccacggugaccgggaacaucagcauccccaccaacuucagcauguccauccgcaccgaguaccuccagcuguacaacacgcccgucagcguggacugcgcgaccuacgugugcaacggcaacucccggugcaagcagcugcucacccaguacaccgccgccugcaagacgaucgagagcgcccugcagcuguccgcccgccucgagagcgucgaggugaacuccaugcugaccaucagcgacgaggcgcugcagcucgccaccaucuccagcuucaacggcgacggguacaacuucaccaacgugcugggcgucuccguguacgacccggccagccggcgcgugguccagaagcgguccuucaucgaggaccuccucuucaacaagguggugacgaacgggcugggcaccgucgacgaggacuacaagcgcugcagcaacgggcgcuccguggccgaccuggucugcgcgcaguacuacagcggcgugauggugcuccccggcgucguggacgccgagaagcugcacauguacuccgccagccugaucgggggcauggugcucgggggcuucaccuccgccgccgcgcugcccuucagcuacgccguccaggcccggcugaacuaccucgcccugcagaccgacgugcugcagcgcaaccagcagcuccuggccgagagcuucaacuccgcgaucggcaacaucacgagcgccuucgaguccgugaaggaggccaucagccagaccuccaaggggcugaacaccgucgcccacgcccucaccaaggugcaggagguggucaacagccagggcgcggcccugacccagcugacggugcagcuccagcacaacuuccaggccaucuccagcuccaucgacgacaucuacagccggcuggacccgcccuccgccgacgcccagguggaccgccugaucaccgggcggcucagcgcccugaacgccuucgucgcccagacccugaccaaguacacggaggugcaggccucccgcaagcucgcgcagcagaaggugaacgagugcgucaagagccagucccagcgguacggcuucugcgggggcgacggcgagcacaucuucagccuggugcaggccgcgccccaggggcuccuguuccugcacaccgugcugguccccuccgacuucguggacgugaucgccaucgccggccucugcgucaacgacgagaucgcgcugacccugcgcgagcccgggcucgugcuguucacccacgagcugcagaaccacacggccaccgaguacuucgugagcucccggcgcauguucgagccgcggaagcccaccgucagcgacuucgugcagaucgagagcugcguggucaccuacgugaaccucacgcgcgaccagcugcccgacgugauccccgacuacaucgacgucaacaagacccuguacgagauccucgccucccugccgaaccggaccggccccagccugccccucgacguguucaacgccaccuaccugaaccugacgggggagaucgccgaccucgagcagcgcuccgagagccugcggaacaccaccgaggagcugcagucccucaucuacaacaucaacaacacccugguggaccuggaguggcucaaccgcgucgagacgggcggcuacauccccgaggcgccgcgggacgggcaggccuacgugcgcaaggacggcgagugggugcugcugagcaccuucugaggacuaguuauaagacugacuagcccgaugggccucccaacgggcccuccuccccuccuugcaccgagauuaauaaaaaaaaaaaaaaaaaaaaaaaaaaaaaaaaaaaaaaaaaaaaaaaaaaaaaaaaaaaaaaaaugcaucccccccccccccccccccccccccccccccaaaggcucuuuucagagccaccagaauu

SEQ ID NO: 15172 - RNA, 4303 nt, Artificial Sequence
  MHV/S__BAK18575.1 spike protein mRNA gc (1-1361)
aggagaaagcuuaccaugcugagcguguucauccucuuccugcccuccugccugggcuacaucggggacuuccgcugcaucaaccucgucaacaccgacaccagcaacgccuccgccccgagcguguccacggagguggucgacgugagcaagggcaucgggaccuacuacgugcuggaccgggucuaccugaacgcgacccuccugcugaccggcuacuaccccguggacggguccaacuaccgcaaccucgcccugacgggcaccaacacccugagccucaacugguacaagccgcccuuccuguccgaguucaacgacggcaucuucgccaaggugaagaaccugaaggccagccuccccaaggacuccaccagcuacuuccccacgaucgucaucggguccaacuucgugaccaccagcuacaccgugguccuggagcccuacaacggcaucaucauggccuccaucugccaguacacgaucugccugcuccccuacaccgacugcaagccgaacaccgggggcaacaagcugaucggguucuggcacaucgaccugaagucccccgugugcauccucaagcggaacuucaccuucaacgugaacgcggacuggcuguacuuccacuucuaccagcagggcggcacguucuacgccuacuacgccgacgccggguccgcgaccaccuuccuguucagcuccuacaucggcgacguccucacccaguacuucgugcugcccuucgugugcacgcccaccaccaccggggucuucagcccgcaguacugggugacgccccuggugaagcgccaguaccucuucaacuucaaccagaagggcaccaucaccagcgccgucgacugcgccuccagcuacaccuccgagaucaagugcaagacgcagagcaugaaccccaacaccggcguguacgaccuguccggguacaccgugcagcccgucggccugguguaccggcgcguccggaaccucccggacugccgcaucgaggacuggcuggccgccaagaccgugcccagcccccugaacugggagcggaagacguuccagaacugcaacuucaaccucuccagccugcugcgccucgugcaggcggggucccugagcugcuccaacaucgacgccgccaaggucuacggcaugugcuucgggagcauguccaucgacaaguucgccauccccaacagccggcgcguggaccugcagcucggcaacuccggcuuccugcagagcuucaacuacaagaucgacacccgggccaccuccugccagcuguacuacagccucgcgcaguccaacgugaccgucaacaaccacaacccgagcagcuggaaccgccgguacggguucaacgacguggccacguucggccgcgggaagcacgacguggccuacgccgaggccugcuucaccgucggcgcguccuacugccccugcgccaaccccagcaucgugucccccugcaccaccgggaagccgaaguucgccaacugccccaccggcacgaccaaccgggagugcaacgugcuggcccugggcagcaaccucuucaagugcgacugcacgugcaaccccagcccccugaccaccuacgaccugcgcugccugcaggggcggagcaugcucggcgucggggaccacugcgagggccugggggugcuggaggacaagugcggcggcuccaacacgugcaacugcagcgccgacgcguucguggggugggccaaggacuccugccucagcaacggccgcugccacaucuucuccaaccugaugcugaacgggaucaacagcggcacgaccugcuccaccgaccuccagcugccgaacaccgaggucgugaccggcaucugcgugaaguacgaccuguacgggaucaccggccagggggucuucaaggaggugaaggccgacuacuacaacagcuggcagaaccuccuguacgacgugaacggcaaccugaacggguuccgggacaucgucaccaacaagaccuaccucacccgcuccugcuacagcggccgcguguccgccgcguaccaccaggacgcccccgagcccgcccugcuguaccggaaccucaagugcgacuacguguucaacaacaacaucuuccgcgaggagaccccgcugaacuacuucgacagcuaccugggcugcgucgugaacgccgacaacagcacggagcaggccguggacgcgugcgaccuccggaugggguccggccugugcgucaacuacagcaccgcccaccgcgcccggaccuccgugagcaccggguacaagcugacgaccuucgagcccuucaccguguccaucgucaacgacagcguggaguccgugggcgggcucuacgagaugcagauccccaccaacuucacgaucgccagccaccaggaguucauccagacccgcgcccccaaggucaccaucgacugcgcggccuucgugugcggcgacuacaccacgugccggcagcagcugguggaguacggcuccuucugcgacaacaucaacgccauccugggggaggucaacaaccucaucgacaccaugcagcuccagguggccagcgcccugauccagggcgugacccucuccagccgccuggcggacgggaucuccggccagaucgacgacaucaacuucagcccgcugcucgggugccugggcucccagugcagcgagggcaccauggccgcccaggggcgguccacggucgaggaccugcuguucgacaaggugaagcugagcgacgugggcuucgucgaggccuacaacaacugcaccgggggccaggaggugcgcgaccugcucugcgugcaguccuucaacgggaucaagguccugccgcccgugcugagcgagaaccaggugagcggcuacaccgcgggcgccaccgccuccagcauguucccgcccugguccgccgccgcggggguccccuucagccucuccgugcaguaccggaucaacggccugggggugacgaugaacguccugagcgagaaccagaagaugaucgccuccgccuucaacaacgccaucggcgccauccaggagggcuucgacgcgaccaacagcgcccucgccaagauccaguccguggucaacgccaacgccgaggcgcugaacaaccugcucaaccagcugagcaaccgcuucggggccaucuccgccagccugcaggagauccucucccggcuggacgcccuggaggcgcaggcccagaucgaccgccucaucaacggccggcugaccgcccugaacgccuacgugagcaagcagcucuccgacaugacccugaucaaggugagcgccgcgcaggccaucgagaaggucaacgagugcgugaagucccagagcccccgcaucaacuucugcgggaacggcaaccacauccugucccucgugcagaacgcccccuacgggcuguacuuccugcacuucagcuacguccccaccagcuucacgaccgccaacgugucccccggccucugcaucagcggcgaccgggggcuggcccccaaggcgggcuacuucgugcaggacgacggggaguggaaguucaccggcuccaacuacuacuaccccgagccgaucaccgacaagaacagcgucgugauguccagcugcgccgugaacuacacgaaggcccccgaggucuuccugaacaccuccaucagcaaccuccccgacuucaaggaggagcuggacaagugguucaagaaccagaccuccguggcccccgaccugagccucgacuucgagaagcugaacgugaccuuccuggaccucuccgacgagaugaaccgcauccaggaggccaucaagaagcugaacgagagcuacaucaaccugaaggagaucgggacguacgagauguacgucaaguggccgugguacguguggcuccugaucggccuggcgggcguggccgucugcgugcuccuguucuucaucugcugcugcaccgggugcggcuccugcugcuucaagaagugcgggaacugcugcgacgaguacggcgggcaccaggacagcaucgugauccacaacaucuccagccacgaggacugaggacuaguuauaagacugacuagcccgaugggccucccaacgggcccuccuccccuccuugcaccgagauuaauaaaaaaaaaaaaaaaaaaaaaaaaaaaaaaaaaaaaaaaaaaaaaaaaaaaaaaaaaaaaaaaaugcaucccccccccccccccccccccccccccccccaaaggcucuuuucagagccaccagaauu

SEQ ID NO: 15173 - RNA, 4303 nt, Artificial Sequence
  MHV/S__BAK18575.1 spike protein mRNA gc (1-1361)(A1073P_L1074P)
aggagaaagcuuaccaugcugagcguguucauccucuuccugcccuccugccugggcuacaucggggacuuccgcugcaucaaccucgucaacaccgacaccagcaacgccuccgccccgagcguguccacggagguggucgacgugagcaagggcaucgggaccuacuacgugcuggaccgggucuaccugaacgcgacccuccugcugaccggcuacuaccccguggacggguccaacuaccgcaaccucgcccugacgggcaccaacacccugagccucaacugguacaagccgcccuuccuguccgaguucaacgacggcaucuucgccaaggugaagaaccugaaggccagccuccccaaggacuccaccagcuacuuccccacgaucgucaucggguccaacuucgugaccaccagcuacaccgugguccuggagcccuacaacggcaucaucauggccuccaucugccaguacacgaucugccugcuccccuacaccgacugcaagccgaacaccgggggcaacaagcugaucggguucuggcacaucgaccucaagagccccgugugcauccucaagcggaacuucaccuucaacgugaacgcggacuggcuguacuuccacuucuaccagcagggcggcacguucuacgccuacuacgccgacgccggguccgcgaccaccuuccuguucagcuccuacaucggcgacguccucacccaguacuucgugcugcccuucgugugcacgcccaccaccaccggggucuucagcccgcaguacugggugacgccccuggugaagcgccaguaccucuucaacuucaaccagaagggcaccaucaccagcgccgucgacugcgccuccagcuacaccuccgagaucaagugcaagacgcagagcaugaaccccaacaccggcguguacgaccuguccggguacaccgugcagcccgucggccugguguaccggcgcguccggaaccucccggacugccgcaucgaggacuggcuggccgccaagaccgugcccagcccccugaacugggagcggaagacguuccagaacugcaacuucaaccucuccagccugcugcgccucgugcaggcggggucccugagcugcuccaacaucgacgccgccaaggucuacggcaugugcuucgggagcauguccaucgacaaguucgccauccccaacagccggcgcguggaccugcagcucggcaacuccggcuuccugcagagcuucaacuacaagaucgacacccgggccaccuccugccagcuguacuacagccucgcgcaguccaacgugaccgucaacaaccacaacccgagcagcuggaaccgccgguacggguucaacgacguggccacguucggccgcgggaagcacgacguggccuacgccgaggccugcuucaccgucggcgcguccuacugccccugcgccaaccccagcaucgugucccccugcaccaccgggaagccgaaguucgccaacugccccaccggcacgaccaaccgggagugcaacgugcuggcccugggcagcaaccucuucaagugcgacugcacgugcaaccccagcccccugaccaccuacgaccugcgcugccugcaggggcgguccaugcucggcgucggggaccacugcgagggccugggggugcuggaggacaagugcggcggcuccaacacgugcaacugcagcgccgacgcguucguggggugggccaaggacuccugccucagcaacggccgcugccacaucuucuccaaccugaugcugaacgggaucaacagcggcacgaccugcuccaccgaccuccagcugccgaacaccgaggucgugaccggcaucugcgugaaguacgaccuguacgggaucaccggccagggggucuucaaggaggugaaggccgacuacuacaacagcuggcagaaccuccuguacgacgugaacggcaaccugaacggguuccgggacaucgucaccaacaagaccuaccucacccgcuccugcuacagcggccgcguguccgccgcguaccaccaggacgcccccgagcccgcccugcuguaccggaaccucaagugcgacuacguguucaacaacaacaucuuccgcgaggagaccccgcugaacuacuucgacagcuaccugggcugcgucgugaacgccgacaacagcacggagcaggccguggacgcgugcgaccuccggaugggguccggccugugcgucaacuacagcaccgcccaccgcgcccggaccuccgugagcaccggguacaagcugacgaccuucgagcccuucaccguguccaucgucaacgacagcguggaguccgugggcgggcucuacgagaugcagauccccaccaacuucacgaucgccagccaccaggaguucauccagacccgcgcccccaaggucaccaucgacugcgcggccuucgugugcggcgacuacaccacgugccggcagcagcugguggaguacggcuccuucugcgacaacaucaacgccauccugggggaggucaacaaccucaucgacaccaugcagcuccagguggccagcgcccugauccagggcgugacccucuccagccgccuggcggacgggaucuccggccagaucgacgacaucaacuucagcccgcugcucgggugccugggcucccagugcagcgagggcaccauggccgcccaggggcgguccacggucgaggaccugcuguucgacaaggugaagcugagcgacgugggcuucgucgaggccuacaacaacugcaccgggggccaggaggugcgcgaccugcucugcgugcaguccuucaacgggaucaagguccugccgcccgugcugagcgagaaccaggugagcggcuacaccgcgggcgccaccgccuccagcauguucccgcccugguccgccgccgcggggguccccuucagccucuccgugcaguaccggaucaacggccugggggugacgaugaacguccugagcgagaaccagaagaugaucgccuccgccuucaacaacgccaucggcgccauccaggagggcuucgacgcgaccaacagcgcccucgccaagauccaguccguggucaacgccaacgccgaggcgcugaacaaccugcucaaccagcugagcaaccgcuucggggccaucuccgccagccugcaggagauccucucccggcuggacccgcccgaggcccaggcgcagaucgaccgccugaucaacggccggcucaccgcccugaacgccuacgugagcaagcagcuguccgacaugacccucaucaaggugagcgccgcccaggcgaucgagaaggucaacgagugcgugaagucccagagcccccgcaucaacuucugcgggaacggcaaccacauccugucccuggugcagaacgcccccuacgggcucuacuuccugcacuucagcuacguccccaccagcuucacgaccgccaacgugucccccggccugugcaucagcggcgaccgggggcucgcccccaaggccggcuacuucgugcaggacgacggggaguggaaguucaccggcuccaacuacuacuaccccgagcccaucaccgacaagaacagcgucgugauguccagcugcgcggugaacuacacgaaggcccccgaggucuuccugaacaccuccaucagcaaccugccggacuucaaggaggagcucgacaagugguucaagaaccagaccuccguggcccccgaccugagccuggacuucgagaagcucaacgugaccuuccuggaccuguccgacgagaugaaccgcauccaggaggccaucaagaagcucaacgagagcuacaucaaccugaaggagaucgggacguacgagauguacgucaaguggcccugguacguguggcugcucaucggccuggccggcguggcggucugcgugcugcuguucuucaucugcugcugcaccgggugcggcuccugcugcuucaagaagugcgggaacugcugcgacgaguacggcgggcaccaggacagcaucgugauccacaacaucuccagccacgaggacugaggacuaguuauaagacugacuagcccgaugggccucccaacgggcccuccuccccuccuugcaccgagauuaauaaaaaaaaaaaaaaaaaaaaaaaaaaaaaaaaaaaaaaaaaaaaaaaaaaaaaaaaaaaaaaaaugcaucccccccccccccccccccccccccccccccaaaggcucuuuucagagccaccagaauu

SEQ ID NO: 15174 - RNA, 4111 nt, Artificial Sequence
  MHV/S__BAK18575.1 spike protein mRNA gc (variant)
aggagaaagcuuaccaugcugagcguguucauccucuuccugcccuccugccugggcuacaucggggacuuccgcugcaucaaccucgucaacaccgacaccagcaacgccuccgccccgagcguguccacggagguggucgacgugagcaagggcaucgggaccuacuacgugcuggaccgggucuaccugaacgcgacccuccugcugaccggcuacuaccccguggacggguccaacuaccgcaaccucgcccugacgggcaccaacacccugagccucaacugguacaagccgcccuuccuguccgaguucaacgacggcaucuucgccaaggugaagaaccugaaggccagccuccccaaggacuccaccagcuacuuccccacgaucgucaucggguccaacuucgugaccaccagcuacaccgugguccuggagcccuacaacggcaucaucauggccuccaucugccaguacacgaucugccugcuccccuacaccgacugcaagccgaacaccgggggcaacaagcugaucggguucuggcacaucgaccugaagucccccgugugcauccucaagcggaacuucaccuucaacgugaacgcggacuggcuguacuuccacuucuaccagcagggcggcacguucuacgccuacuacgccgacgccggguccgcgaccaccuuccuguucagcuccuacaucggcgacguccucacccaguacuucgugcugcccuucgugugcacgcccaccaccaccggggucuucagcccgcaguacugggugacgccccuggugaagcgccaguaccucuucaacuucaaccagaagggcaccaucaccagcgccgucgacugcgccuccagcuacaccuccgagaucaagugcaagacgcagagcaugaaccccaacaccggcguguacgaccuguccggguacaccgugcagcccgucggccugguguaccggcgcguccggaaccucccggacugccgcaucgaggacuggcuggccgccaagaccgugcccagcccccugaacugggagcggaagacguuccagaacugcaacuucaaccucuccagccugcugcgccucgugcaggcggggucccugagcugcuccaacaucgacgccgccaaggucuacggcaugugcuucgggagcauguccaucgacaaguucgccauccccaacagccggcgcguggaccugcagcucggcaacuccggcuuccugcagagcuucaacuacaagaucgacacccgggccaccuccugccagcuguacuacagccucgcgcaguccaacgugaccgucaacaaccacaacccgagcagcuggaaccgccgguacggguucaacgacguggccacguucggccgcgggaagcacgacguggccuacgccgaggccugcuucaccgucggcgcguccuacugccccugcgccaaccccagcaucgugucccccugcaccaccgggaagccgaaguucgccaacugccccaccggcacgaccaaccgggagugcaacgugcuggcccugggcagcaaccucuucaagugcgacugcacgugcaaccccagcccccugaccaccuacgaccugcgcugccugcaggggcggagcaugcucggcgucggggaccacugcgagggccugggggugcuggaggacaagugcggcggcuccaacacgugcaacugcagcgccgacgcguucguggggugggccaaggacuccugccucagcaacggccgcugccacaucuucuccaaccugaugcugaacgggaucaacagcggcacgaccugcuccaccgaccuccagcugccgaacaccgaggucgugaccggcaucugcgugaaguacgaccuguacgggaucaccggccagggggucuucaaggaggugaaggccgacuacuacaacagcuggcagaaccuccuguacgacgugaacggcaaccugaacggguuccgggacaucgucaccaacaagaccuaccucacccgcuccugcuacagcggccgcguguccgccgcguaccaccaggacgcccccgagcccgcccugcuguaccggaaccucaagugcgacuacguguucaacaacaacaucuuccgcgaggagaccccgcugaacuacuucgacagcuaccugggcugcgucgugaacgccgacaacagcacggagcaggccguggacgcgugcgaccuccggaugggguccggccugugcgucaacuacagcaccgcccaccgcgcccggaccuccgugagcaccggguacaagcugacgaccuucgagcccuucaccguguccaucgucaacgacagcguggaguccgugggcgggcucuacgagaugcagauccccaccaacuucacgaucgccagccaccaggaguucauccagacccgcgcccccaaggucaccaucgacugcgcggccuucgugugcggcgacuacaccacgugccggcagcagcugguggaguacggcuccuucugcgacaacaucaacgccauccugggggaggucaacaaccucaucgacaccaugcagcuccagguggccagcgcccugauccagggcgugacccucuccagccgccuggcggacgggaucuccggccagaucgacgacaucaacuucagcccgcugcucgggugccugggcucccagugcagcgagggcaccauggccgcccaggggcgguccacggucgaggaccugcuguucgacaaggugaagcugagcgacgugggcuucgucgaggccuacaacaacugcaccgggggccaggaggugcgcgaccugcucugcgugcaguccuucaacgggaucaagguccugccgcccgugcugagcgagaaccaggugagcggcuacaccgcgggcgccaccgccuccagcauguucccgcccugguccgccgccgcggggguccccuucagccucuccgugcaguaccggaucaacggccugggggugacgaugaacguccugagcgagaaccagaagaugaucgccuccgccuucaacaacgccaucggcgccauccaggagggcuucgacgcgaccaacagcgcccucgccaagauccaguccguggucaacgccaacgccgaggcgcugaacaaccugcucaaccagcugagcaaccgcuucggggccaucuccgccagccugcaggagauccucucccggcuggacccgcccgaggcccaggcgcagaucgaccgccugaucaacggccggcucaccgcccugaacgccuacgugagcaagcagcuguccgacaugacccucaucaaggugagcgccgcccaggcgaucgagaaggucaacgagugcgugaagucccagagcccccgcaucaacuucugcgggaacggcaaccacauccugucccuggugcagaacgcccccuacgggcucuacuuccugcacuucagcuacguccccaccagcuucacgaccgccaacgugucccccggccugugcaucagcggcgaccgggggcucgcccccaaggccggcuacuucgugcaggacgacggggaguggaaguucaccggcuccaacuacuacuaccccgagcccaucaccgacaagaacagcgucgugauguccagcugcgcggugaacuacacgaaggcccccgaggucuuccugaacaccuccaucagcaaccugccggacuucaaggaggagcucgacaagugguucaagaaccagaccuccguggcccccgaccugagccuggacuucgagaagcucaacgugaccuuccuggaccuguccgacgagaugaaccgcauccaggaggccaucaagaagcucaacgagagcuacaucaaccugaaggagaucgggacguacgagaugugaggacuaguuauaagacugacuagcccgaugggccucccaacgggcccuccuccccuccuugcaccgagauuaauaaaaaaaaaaaaaaaaaaaaaaaaaaaaaaaaaaaaaaaaaaaaaaaaaaaaaaaaaaaaaaaaugcaucccccccccccccccccccccccccccccccaaaggcucuuuucagagccaccagaauu

SEQ ID NO: 15175 - RNA, 4192 nt, Artificial Sequence
  MHV/S__BAK18575.1 spike protein mRNA gc (variant)
aggagaaagcuuaccaugcugagcguguucauccucuuccugcccuccugccugggcuacaucggggacuuccgcugcaucaaccucgucaacaccgacaccagcaacgccuccgccccgagcguguccacggagguggucgacgugagcaagggcaucgggaccuacuacgugcuggaccgggucuaccugaacgcgacccuccugcugaccggcuacuaccccguggacggguccaacuaccgcaaccucgcccugacgggcaccaacacccugagccucaacugguacaagccgcccuuccuguccgaguucaacgacggcaucuucgccaaggugaagaaccugaaggccagccuccccaaggacuccaccagcuacuuccccacgaucgucaucggguccaacuucgugaccaccagcuacaccgugguccuggagcccuacaacggcaucaucauggccuccaucugccaguacacgaucugccugcuccccuacaccgacugcaagccgaacaccgggggcaacaagcugaucggguucuggcacaucgaccugaagucccccgugugcauccucaagcggaacuucaccuucaacgugaacgcggacuggcuguacuuccacuucuaccagcagggcggcacguucuacgccuacuacgccgacgccggguccgcgaccaccuuccuguucagcuccuacaucggcgacguccucacccaguacuucgugcugcccuucgugugcacgcccaccaccaccggggucuucagcccgcaguacugggugacgccccuggugaagcgccaguaccucuucaacuucaaccagaagggcaccaucaccagcgccgucgacugcgccuccagcuacaccuccgagaucaagugcaagacgcagagcaugaaccccaacaccggcguguacgaccuguccggguacaccgugcagcccgucggccugguguaccggcgcguccggaaccucccggacugccgcaucgaggacuggcuggccgccaagaccgugcccagcccccugaacugggagcggaagacguuccagaacugcaacuucaaccucuccagccugcugcgccucgugcaggcggggucccugagcugcuccaacaucgacgccgccaaggucuacggcaugugcuucgggagcauguccaucgacaaguucgccauccccaacagccggcgcguggaccugcagcucggcaacuccggcuuccugcagagcuucaacuacaagaucgacacccgggccaccuccugccagcuguacuacagccucgcgcaguccaacgugaccgucaacaaccacaacccgagcagcuggaaccgccgguacggguucaacgacguggccacguucggccgcgggaagcacgacguggccuacgccgaggccugcuucaccgucggcgcguccuacugccccugcgccaaccccagcaucgugucccccugcaccaccgggaagccgaaguucgccaacugccccaccggcacgaccaaccgggagugcaacgugcuggcccugggcagcaaccucuucaagugcgacugcacgugcaaccccagcccccugaccaccuacgaccugcgcugccugcaggggcggagcaugcucggcgucggggaccacugcgagggccugggggugcuggaggacaagugcggcggcuccaacacgugcaacugcagcgccgacgcguucguggggugggccaaggacuccugccucagcaacggccgcugccacaucuucuccaaccugaugcugaacgggaucaacagcggcacgaccugcuccaccgaccuccagcugccgaacaccgaggucgugaccggcaucugcgugaaguacgaccuguacgggaucaccggccagggggucuucaaggaggugaaggccgacuacuacaacagcuggcagaaccuccuguacgacgugaacggcaaccugaacggguuccgggacaucgucaccaacaagaccuaccucacccgcuccugcuacagcggccgcguguccgccgcguaccaccaggacgcccccgagcccgcccugcuguaccggaaccucaagugcgacuacguguucaacaacaacaucuuccgcgaggagaccccgcugaacuacuucgacagcuaccugggcugcgucgugaacgccgacaacagcacggagcaggccguggacgcgugcgaccuccggaugggguccggccugugcgucaacuacagcaccgcccaccgcgcccggaccuccgugagcaccggguacaagcugacgaccuucgagcccuucaccguguccaucgucaacgacagcguggaguccgugggcgggcucuacgagaugcagauccccaccaacuucacgaucgccagccaccaggaguucauccagacccgcgcccccaaggucaccaucgacugcgcggccuucgugugcggcgacuacaccacgugccggcagcagcugguggaguacggcuccuucugcgacaacaucaacgccauccugggggaggucaacaaccucaucgacaccaugcagcuccagguggccagcgcccugauccagggcgugacccucuccagccgccuggcggacgggaucuccggccagaucgacgacaucaacuucagcccgcugcucgggugccugggcucccagugcagcgagggcaccauggccgcccaggggcgguccacggucgaggaccugcuguucgacaaggugaagcugagcgacgugggcuucgucgaggccuacaacaacugcaccgggggccaggaggugcgcgaccugcucugcgugcaguccuucaacgggaucaagguccugccgcccgugcugagcgagaaccaggugagcggcuacaccgcgggcgccaccgccuccagcauguucccgcccugguccgccgccgcggggguccccuucagccucuccgugcaguaccggaucaacggccugggggugacgaugaacguccugagcgagaaccagaagaugaucgccuccgccuucaacaacgccaucggcgccauccaggagggcuucgacgcgaccaacagcgcccucgccaagauccaguccguggucaacgccaacgccgaggcgcugaacaaccugcucaaccagcugagcaaccgcuucggggccaucuccgccagccugcaggagauccucucccggcuggacccgcccgaggcccaggcgcagaucgaccgccugaucaacggccggcucaccgcccugaacgccuacgugagcaagcagcuguccgacaugacccucaucaaggugagcgccgcccaggcgaucgagaaggucaacgagugcgugaagucccagagcccccgcaucaacuucugcgggaacggcaaccacauccugucccuggugcagaacgcccccuacgggcucuacuuccugcacuucagcuacguccccaccagcuucacgaccgccaacgugucccccggccugugcaucagcggcgaccgggggcucgcccccaaggccggcuacuucgugcaggacgacggggaguggaaguucaccggcuccaacuacuacuaccccgagcccaucaccgacaagaacagcgucgugauguccagcugcgcggugaacuacacgaaggcccccgaggucuuccugaacaccuccaucagcaaccugccggacuucaaggaggagcucgacaagugguucaagaaccagaccuccguggcccccgaccugagccuggacuucgagaagcucaacgugaccuuccuggaccuguccgacgagaugaaccgcauccaggaggccaucaagaagcucaacgagagcuacaucaaccugaaggagaucgggacguacgagaugggcggcuacauccccgaggcgccccgggacgggcaggccuacguccgcaaggacggcgagugggugcugcucuccaccuucugaggacuaguuauaagacugacuagcccgaugggccucccaacgggcccuccuccccuccuugcaccgagauuaauaaaaaaaaaaaaaaaaaaaaaaaaaaaaaaaaaaaaaaaaaaaaaaaaaaaaaaaaaaaaaaaaugcaucccccccccccccccccccccccccccccccaaaggcucuuuucagagccaccagaauu

SEQ ID NO: 15176 - RNA, 3985 nt, Artificial Sequence
  SARS-CoV__P59594.1 spike protein mRNA human (1-1255)
aggagaaagcuuaccauguucaucuuucugcucuuucuuacccugacaagcggcuccgacuuggauagaugcacuacguuugacgaugugcaggcccccaacuacacccaacacacaucuucaaugagaggggucuauuacccugacgagauuuuccggagugauacuuuauaucugacccaggaccuauuucucccauucuacagcaauguuacaggauuucauaccauaaaccacacuuucgguaauccggugauccccuuuaaggauggcauuuauuucgcugcaacagaaaaauccaacguagugcgcgggugggucuuuggaucuaccaugaauaacaagucgcagucagugaucauuaucaauaacagcacgaauguugugauacgagccuguaacuucgagcugugcgacaauccuuucuucgcggucaguaaaccaaugggcacucagacccauacaaugaucuucgauaacgcuuuuaauuguacuuucgaauacauuuccgacgccuuuucucuugaugugagcgagaaguccgguaacuucaaacaucugcgugaauuuguauucaagaauaaggacggguuuuuguauguuuacaaaggauaccaacccaucgauguggucagagaccucccuucaggcuucaacacccugaagccaauuuuuaaacugccccucggcaucaacauaacaaauuucagggcaauuuuaaccgccuuuaguccugcucaggacaucugggggacgagcgcagccgcuuauuucgugggauaccugaagccaacuacauuuaugcuuaaauaugaugagaacgguaccauuacugacgccguggauugcucucagaauccguuggcggagcugaaguguuccgucaagucauucgaaaucgacaaaggcaucuaccagacaagcaacuuccggguugugcccaguggggauguagugcgcuuuccuaauauuaccaaccuaugcccauucggagaggucuuuaaugcaacgaaguuccccucuguguaugccugggaaaggaaaaagauauccaacuguguugcugacuacagcgugcucuauaauucgaccuuuuucucuacauuuaaaugcuacggcgucuccgccacuaagcugaacgaucuuuguuucucaaauguguacgcagacaguuuuguaguuaaaggugaugacgugaggcaaaucgcuccugggcagaccggagucauugccgauuauaacuacaagcugccagacgacuucaugggcugcguguuggcguggaauacacggaacaucgaugccacuagcaccggcaauuauaacuacaaguaucgcuaccuccgacacgggaaacugagacccuuugagagggacauauccaacgucccguucucuccugauggaaagcccuguacacccccugcauuaaauugcuauuggccccugaacgacuacgguuuuuacaccacuacgggcauuggguaucagccauaccgggugguugugcucagcuucgagcuucugaaugcucccgccacaguaugcggaccuaaauugucaaccgaucuaaucaagaaccagugugucaauuucaacuuuaauggccugacugguaccggggugcucacaccaaguuccaaacguuuccaaccguuucagcaguucggccgcgacguuagcgauuuuaccgacucugugagagaucccaagacuucagaaauccuggacauuaguccuugcagcuucggaggcgucuccgugaucacaccagggacgaacgcuucuucggagguagccgugcuuuaucaagauguuaauuguaccgacgucagcacugcaauucacgccgaucagcugacacccgcuuggaggauauacuccaccggaaacaauguguuucagacacaggcggguugcuugaucggcgcagaacacguggacacuucauaugagugugacauuccuaucggggccggaaucugcgcuaguuaccauaccgucucucuccugcggagcacgucccaaaagucaauuguugccuauaccaugagcuuaggcgcagauucuuccauagccuacaguaacaauacaaucgcuauuccaacuaacuucagcaucucuauuaccacagaagugaugcccguguccauggccaaaacuucaguagacuguaauauguacaucugcggugauaguaccgagugugcaaaccugcuacuccaguaugggagcuuuugcacgcagcugaaccgagcgcuuucgggcauagcugccgagcaggaccgcaauacaagagaagucuucgcacaagugaagcagauguacaaaaccccgacuuugaaguauuuuggaggcuucaacuucucccagauccugccugauccacucaaacccacaaagaggucuuuuauugaggaccugcuuuucaauaagguuacccuggccgaugcuggguuuaugaaacaguacggagaauguuugggugacaucaacgcccgggaucucauuugcgcacaaaaguucaauggccugacuguguuaccuccccugcuaaccgacgauaugaucgcugccuauacagcggcccucgucagcgggacggcuaccgcaggauggacuuuuggcgccggugcugcccugcagauaccauucgcaaugcagauggcguaccgcuuuaacgggauuggcgugacacagaauguucuuuaugagaaccaaaaacagaucgccaaucaguucaacaaggcuauuucacaaauccaggaaaguuugaccacaacuuccaccgcccugggaaaacuccaggacgugguaaaucagaacgcacaagcucugaauacguuagucaagcagcugucuagcaacuuuggcgccauauccucagugcuuaaugauaucuugagcagacucgacaagguggaggcagagguccagauugacaggcugaucacagggcgucuacagagucugcaaaccuacguuacucagcagcucauucgggccgcugaaauccgagcgucugccaaccuggcagcuaccaaaauguccgagugcgugcuuggacagagcaagagaguagauuucuguggcaaagguuaccacuugaugucguuuccucaagccgccccacaugggguggucuuccugcacgugacauauguuccaucacaggaaaggaacuuuacuaccgcuccggcaauaugccacgagggaaaggccuacuucccucgcgaaggcguguucgucuuuaaugguacaucuugguucauuacgcagcggaacuuuuucaguccccaaaucaucaccacugacaauacauuuguguccggcaacugugauguugugauugggaucauuaauaacaccgucuaugacccauuacagcccgagcucgauagcuucaaagaggaacuggacaaguacuuuaaaaaucauacuucuccugauguagaccuuggagauauaagcggcaucaacgcguccgugguuaauauucagaaggagaucgacagacugaacgaaguggcuaagaauuugaacgagucacucauugaucugcaggagcuagggaaauaugaacaauacaucaaguggccaugguaugucuggcugggauucauagccggccucaucgcaauugugaugguaacaauccugcuuugcuguaugaccaguugcuguagcugcuugaaaggugccuguucuugcggguccuguugcaaguuugacgaggacgauucagaacccgugcugaaaggagucaaguuacacuacacgugaggacuaguuauaagacugacuagcccgaugggccucccaacgggcccuccuccccuccuugcaccgagauuaauaaaaaaaaaaaaaaaaaaaaaaaaaaaaaaaaaaaaaaaaaaaaaaaaaaaaaaaaaaaaaaaaugcaucccccccccccccccccccccccccccccccaaaggcucuuuucagagccaccagaauu

SEQ ID NO: 15177 - RNA, 3985 nt, Artificial Sequence
  SARS-CoV__P59594.1 spike protein mRNA human (1-1255)(K968P_V969P)
aggagaaagcuuaccauguucaucuuucugcuguuccuuacccugacaagcggcuccgacuuggauagaugcacuacguuugacgaugugcaggcccccaacuacacccaacacacaucuucaaugagaggggucuauuacccugacgagauuuuccggagugauacuuuauaucugacccaggaccuauuucucccauucuacagcaauguuacaggauuucauaccauaaaccacacuuucgguaauccggugauccccuuuaaggauggcauuuauuucgcugcaacagaaaaauccaacguagugcgcgggugggucuuuggaucuaccaugaauaacaagucgcagucagugaucauuaucaauaacagcacgaauguugugauacgagccuguaacuucgagcugugcgacaauccauuuuucgcggucaguaaaccaaugggcacucagacccauacaaugaucuucgauaacgcuuuuaauuguacuuucgaauacauuuccgacgccuuuucucuugaugugagcgagaaguccgguaacuucaaacaccuccgugaauuuguauucaagaauaaggacggguuuuuguauguuuacaaaggauaccaacccaucgauguggucagagaccucccuucaggcuucaacacccugaagccaauuuuuaaacugccccucggcaucaacauaacaaauuucagggcaauuuuaaccgccuuuaguccugcucaggacaucugggggacgagcgcagccgcuuauuucgugggauaccugaagccaacuacauuuaugcuuaaauaugaugagaacgguaccauuacugacgccguggauugcucucagaauccguuggcggagcugaaguguuccgucaagucauucgaaaucgacaaaggcaucuaccagacaagcaacuuccggguugugcccaguggggauguagugcgcuuuccuaauauuaccaaccuaugcccauucggagaggucuuuaaugcaacgaaguuccccucuguguaugccugggaaaggaaaaagauauccaacuguguugcugacuacagcgugcucuauaauucgaccuuuuucucuacauuuaaaugcuacggcgucuccgccacuaagcugaacgaucuuuguuucucaaauguguacgcagacaguuuuguaguuaaaggugaugacgugaggcaaaucgcuccugggcagaccggagucauugccgauuauaacuacaagcugccagacgacuucaugggcugcguguuggcguggaauacacggaacaucgaugccacuagcaccggcaauuauaacuacaaguaucgcuaccuccgacaugggaaacugagacccuuugagagggacauauccaacgucccguucucuccugauggaaagcccuguacaccuccugcauuaaauugcuauuggccccugaacgacuacgguuuuuacaccacuacgggcauuggguaucagccauaccgggugguugugcucagcuucgagcuucugaaugcucccgccacaguaugcggaccuaaauugucaaccgaucuaaucaagaaccagugugucaauuucaacuuuaauggccugacugguaccggggugcucacaccaaguuccaaacguuuccaaccguuucagcaguucggccgcgacguuagcgauuuuaccgacucugugagagaucccaagacuucagaaauccuggacauuaguccuugcagcuucggaggcgucuccgugaucacaccagggacgaacgcuucuucggagguagccgugcuuuaucaagauguuaauuguaccgacgucagcacugcaauucacgccgaucagcugacacccgcuuggaggauauacuccaccggaaacaauguguuucagacacaggcggguugcuugaucggcgcagaacacguggacacuucauaugagugugacauuccuaucggggccggaaucugcgcuaguuaccauaccgucucucuccugcggagcacgucccaaaagucaauuguugccuauaccaugagcuuaggcgcagauucuuccauagccuacaguaacaauacaaucgcuauuccaacuaacuucagcaucucuauuaccacagaagugaugcccguguccauggccaaaacuucaguagacuguaauauguacaucugcggugauaguaccgagugugcaaaccugcuacuccaguaugggagcuuuugcacgcagcugaaccgagcgcuuucgggcauagcugccgagcaggaccgcaauacaagagaagucuucgcacaagugaagcagauguacaaaaccccgacuuugaaguauuuuggaggcuucaacuucucccagauccugccugauccacucaaacccacaaagaggucuuuuauugaggaccugcuuuucaauaagguuacccuggccgaugcuggguuuaugaaacaguacggagaauguuugggugacaucaacgcccgggaucucauuugcgcacaaaaguucaauggccugacuguguuaccuccccugcuaaccgacgauaugaucgcugccuauacagcggcccucgucagcgggacggcuaccgcaggauggacuuuuggcgccggugcugcccugcagauaccauucgcaaugcagauggcguaccgcuuuaacgggauuggcgugacacagaauguucuuuaugagaaccaaaaacagaucgccaaucaguucaacaaggcuauuucacaaauccaggaaaguuugaccacaacuuccaccgcccugggaaaacuccaggacgugguaaaucagaacgcacaagcucugaauacguuagucaagcagcugucuagcaacuuuggcgccauauccucagugcuuaaugauaucuugagcagacucgacccucccgaggcagaggugcagauugacaggcugaucacagggcgucuacagagucugcaaaccuacgucacucagcagcucauucgggccgcugaaauccgagcgucugccaaccuggcagcuaccaagauguccgagugcguucuuggacagagcaaaagaguggauuucuguggcaaggguuaccacuugaugucguuuccacaagccgccccgcaugggguaguguuccugcacgucacauaugugccuucacaggaaaggaacuuuacuaccgcucccgcaauaugccacgagggaaaagccuacuucccacgcgaaggcguuuucguguuuaaugguacaucuugguucauuacgcagcggaacuuuuucaguccccaaaucaucaccacugacaauacauuugucuccggcaacugugaugugguuauugggaucauuaauaacaccguguaugacccuuuacagccagagcucgauagcuucaaggaggaacuggacaaauacuuuaagaaucauacuucucccgaugucgaccuuggagauauaagcggcaucaacgcguccguagugaauauucagaaagagaucgacagacugaacgaaguugcuaagaauuugaacgagucacucauugaucugcaggagcuagggaaguaugaacaauacaucaaauggccuugguauguguggcugggauucauagccggccucaucgcaauugucauggugacaauccugcuuugcuguaugaccaguugcuguagcugcuugaagggugccuguucuugcggguccuguugcaaauuugacgaggacgauucagaaccgguacugaagggagugaaauuacacuacacgugaggacuaguuauaagacugacuagcccgaugggccucccaacgggcccuccuccccuccuugcaccgagauuaauaaaaaaaaaaaaaaaaaaaaaaaaaaaaaaaaaaaaaaaaaaaaaaaaaaaaaaaaaaaaaaaaugcaucccccccccccccccccccccccccccccccaaaggcucuuuucagagccaccagaauu

SEQ ID NO: 15178 - RNA, 1798 nt, Artificial Sequence
  SARS-CoV__P59594.1 spike protein mRNA human (1-17_747-1255)
aggagaaagcuuaccauguucaucuuucugcucuuucuuacccugacaagcggcuccgacuuggauagagccuuaucugggauugcugcagagcaggacaggaacacucgggaaguguuugcccaagucaagcagauguacaaaacgcccacccugaaguauuucggagguuuuaauuucucacagauacuaccugauccacucaaaccgacaaagcgcaguuuuaucgaggaccugcuuuucaacaaaguuacucuggcggaugcuggcuuuaugaagcaguacggggaaugcuugggagacauuaaugcccgagaucucaucugugcacaaaaguucaacggccugaccgugcugcccccucucuuaacagacgauaugauugccgcuuauaccgcagcccugguaagcgguacugcuacagccggguggaccuuuggagcgggcgcagcccuucagaucccauucgcuaugcagauggccuaccguuuuaauggcauaggggugacgcagaacgucuuguaugagaaucaaaaacagaucgcaaaccaguucaauaaggcuauuucccagauccaagaaucucugacuaccacaucgacugcccuaggaaaacuccaggacgugguuaaccagaaugcgcaagcccugaacacccuugugaagcagcugucaagcaauuucggugcaauuaguuccgucuugaacgauauccucucuagacuggacaaaguggaggcugagguacagauagauagguuaauuacaggccggcugcagagccuccaaaccuacguuacgcagcagcuuauccgcgccgcugaaauuagagccuccgcaaaucuggccgcuacuaagaugucagagugcguguuggggcagaguaagagggucgacuuuuguggaaaaggcuaucaccuaaugagcuucccccaagcggcaccucauggugugguguuucugcacgucacauacguuccaucucaggaacggaacuucaccacugcccccgcuaucugccaugaggggaaggccuacuuuccucgcgagggaguguucguauuuaacggcacauccugguucaucacccagcgaaauuucuucucaccacagauuauaacgaccgacaacacauuugugagcggcaauugugaugucgugaucgggauuaucaacaauacuguuuaugacccgcuccaacccgaacuggauaguuucaaagaggaacuugacaaguacuuuaaaaaccacaccucuccugauguggaccugggagauauauccgguauuaaugcaagcgucgugaacauccagaaggagaucgacagauugaaugaaguagccaaaaaccucaaugagucgcugauugauuuacaggagcugggcaaguaugaacaguacaucaaguggccaugguauguuuggcuaggguucauugcuggacucauagccaucgugauggucacaauucugcuuugcuguaugacuucuugcuguuccugcuugaaaggcgcauguucaugcgguaguugcuguaaguucgacgaggaugacagcgaacccgugcugaaaggggucaagcuccauuacaccugaggacuaguuauaagacugacuagcccgaugggccucccaacgggcccuccuccccuccuugcaccgagauuaauaaaaaaaaaaaaaaaaaaaaaaaaaaaaaaaaaaaaaaaaaaaaaaaaaaaaaaaaaaaaaaaaugcaucccccccccccccccccccccccccccccccaaaggcucuuuucagagccaccagaauu

SEQ ID NO: 15179 - RNA, 3985 nt, Artificial Sequence
  SARS-CoV/Tor2__NP_828851.1 spike protein mRNA human (1-1255)
aggagaaagcuuaccauguucaucuuucugcuguuccuuacccugacaagcggcuccgacuuggauagaugcacuacguuugacgaugugcaggcccccaacuacacccaacacacaucuucaaugagaggggucuauuacccugacgagauuuuccggagugauacuuuauaucugacccaggaccuauuucucccauucuacagcaauguuacaggauuucauaccauaaaccacacuuucgguaauccggugauccccuuuaaggauggcauuuauuucgcugcaacagaaaaauccaacguagugcgcgggugggucuuuggaucuaccaugaauaacaagucgcagucagugaucauuaucaauaacagcacgaauguugugauacgagccuguaacuucgagcugugcgacaauccauuuuucgcggucaguaaaccaaugggcacucagacccauacaaugaucuucgauaacgcuuuuaauuguacuuucgaauacauuuccgacgccuuuucucuugaugugagcgagaaguccgguaacuucaaacaccuccgugaauuuguauucaagaauaaggacggguuuuuguauguuuacaaaggauaccaacccaucgauguggucagagaccucccuucaggcuucaacacccugaagccaauuuuuaaacugccccucggcaucaacauaacaaauuucagggcaauuuuaaccgccuuuaguccugcucaggacaucugggggacgagcgcagccgcuuauuucgugggauaccugaagccaacuacauuuaugcuuaaauaugaugagaacgguaccauuacugacgccguggauugcucucagaauccguuggcggagcugaaguguuccgucaagucauucgaaaucgacaaaggcaucuaccagacaagcaacuuccggguugugcccaguggggauguagugcgcuuuccuaauauuaccaaccuaugcccauucggagaggucuuuaaugcaacgaaguuccccucuguguaugccugggaaaggaaaaagauauccaacuguguugcugacuacagcgugcucuauaauucgaccuuuuucucuacauuuaaaugcuacggcgucuccgccacuaagcugaacgaucuuuguuucucaaauguguacgcagacaguuuuguaguuaaaggugaugacgugaggcaaaucgcuccugggcagaccggagucauugccgauuauaacuacaagcugccagacgacuucaugggcugcguguuggcguggaauacacggaacaucgaugccacuagcaccggcaauuauaacuacaaguaucgcuaccuccgacaugggaaacugagacccuuugagagggacauauccaacgucccguucucuccugauggaaagcccuguacaccuccugcauuaaauugcuauuggccccugaacgacuacgguuuuuacaccacuacgggcauuggguaucagccauaccgggugguugugcucagcuucgagcuucugaaugcucccgccacaguaugcggaccuaaauugucaaccgaucuaaucaagaaccagugugucaauuucaacuuuaauggccugacugguaccggggugcucacaccaaguuccaaacguuuccaaccguuucagcaguucggccgcgacguuagcgauuuuaccgacucugugagagaucccaagacuucagaaauccuggacauuaguccuugcgcuuucggaggcgucagcgugaucacaccagggacgaacgccuccucugagguagcagugcuuuaucaagauguuaauuguaccgacgucucgacugccauucacgcugaucagcugacacccgcguggaggauauacagcaccggaaacaauguguuucagacacaggcagguugcuugaucggcgccgaacacguggacacuuccuaugagugugacauuccuaucggggcuggaaucugcgccucauaccauaccgucagucuccugcggucuacgagccaaaaguccauuguugcauauaccaugucauuaggcgccgauagcucuauagcuuacuccaacaauacaaucgccauuccaacuaacuucaguaucagcauuaccacagaagugaugcccgugucuauggcaaaaacuuccguagacuguaauauguacaucugcggugauucaaccgagugugcgaaccugcuacuccaguaugggaguuuuugcacgcagcugaaccgagcucuuagcggcauagccgcagagcaggaccgcaauacaagagaagucuucgcccaagugaagcagauguacaaaaccccgacuuugaaguauuuuggaggcuucaacuucucgcagauccugccugauccacucaaacccacaaagagguccuuuauugaggaccugcuuuucaauaagguuacccuggcugaugccggguuuaugaaacaguacggagaauguuugggugacaucaacgcacgggaucucauuugcgcucaaaaguucaauggccugacuguguuaccuccccugcuaaccgacgauaugaucgccgcguauacagccgcucucgucucugggacggcaaccgccggauggacuuuuggcgcuggugccgcacugcagauaccauucgcgaugcagauggccuaccgcuuuaacgggauuggcgugacacagaauguucuuuaugagaaccaaaaacagaucgcuaaucaguucaacaaggccauuagccaaauccaggaaucauugaccacaaccaguacugcacugggaaaacuccaggacgugguaaaucagaacgcucaagcccugaauacguuagucaagcagcuguccucuaacuuuggcgcaauaagcuccgugcuuaaugauaucuugucaagacucgacaagguggaggccgagguccagauugacaggcugaucacagggcgucuacagagccugcaaaccuacguuacucagcagcucauucgggcugcggaaauccgagccagugcaaaccuggcugccaccaaaaugucugagugcgugcuuggacaguccaagagaguagauuucuguggcaaagguuaccacuugaugagcuuuccucaagccgcuccccaugggguggucuuccugcacgugacauauguuccaucgcaggaaaggaacuuuacuaccgcaccggccauaugccacgagggaaaggcguacuucccucgcgaaggcguguucgucuuuaaugguacaucaugguucauuacgcagcggaacuuuuucucuccccaaaucaucaccacugacaauacauuugugaguggcaacugugauguugugauugggaucauuaauaacaccgucuaugacccauuacagcccgagcucgauuccuucaaagaggaacuggacaaguacuuuaaaaaucauacuagcccugauguagaccuuggagauauaucuggcaucaacgcuagcgugguuaauauucagaaggagaucgacagacugaacgaaguggccaagaauuugaacgagucccucauugaucugcaggagcuagggaaauaugaacaauacaucaaguggccaugguaugucuggcugggauucauagcaggccucaucgccauugugaugguaacaauccugcuuugcuguaugaccucaugcuguaguugcuugaaaggugcuuguagcugcgggucuuguugcaaguuugacgaggacgauuccgaacccgugcugaaaggagucaaguuacacuacacgugaggacuaguuauaagacugacuagcccgaugggccucccaacgggcccuccuccccuccuugcaccgagauuaauaaaaaaaaaaaaaaaaaaaaaaaaaaaaaaaaaaaaaaaaaaaaaaaaaaaaaaaaaaaaaaaaugcaucccccccccccccccccccccccccccccccaaaggcucuuuucagagccaccagaauu

SEQ ID NO: 15180 - RNA, 3985 nt, Artificial Sequence
  SARS-CoV/Tor2__NP_828851.1 spike protein mRNA human (1-1255)(K968P_V969P)
aggagaaagcuuaccauguucaucuuucugcuguuccuuacccugacaagcggcuccgacuuggauagaugcacuacguuugacgaugugcaggcccccaacuacacccaacacacaucuucaaugagaggggucuauuacccugacgagauuuuccggagugauacuuuauaucugacccaggaccuauuucucccauucuacagcaauguuacaggauuucauaccauaaaccacacuuucgguaauccggugauccccuuuaaggauggcauuuauuucgcugcaacagaaaaauccaacguagugcgcgggugggucuuuggaucuaccaugaauaacaagucgcagucagugaucauuaucaauaacagcacgaauguugugauacgagccuguaacuucgagcugugcgacaauccauuuuucgcggucaguaaaccaaugggcacucagacccauacaaugaucuucgauaacgcuuuuaauuguacuuucgaauacauuuccgacgccuuuucucuugaugugagcgagaaguccgguaacuucaaacaccuccgugaauuuguauucaagaauaaggacggguuuuuguauguuuacaaaggauaccaacccaucgauguggucagagaccucccuucaggcuucaacacccugaagccaauuuuuaaacugccccucggcaucaacauaacaaauuucagggcaauuuuaaccgccuuuaguccugcucaggacaucugggggacgagcgcagccgcuuauuucgugggauaccugaagccaacuacauuuaugcuuaaauaugaugagaacgguaccauuacugacgccguggauugcucucagaauccguuggcggagcugaaguguuccgucaagucauucgaaaucgacaaaggcaucuaccagacaagcaacuuccggguugugcccaguggggauguagugcgcuuuccuaauauuaccaaccuaugcccauucggagaggucuuuaaugcaacgaaguuccccucuguguaugccugggaaaggaaaaagauauccaacuguguugcugacuacagcgugcucuauaauucgaccuuuuucucuacauuuaaaugcuacggcgucuccgccacuaagcugaacgaucuuuguuucucaaauguguacgcagacaguuuuguaguuaaaggugaugacgugaggcaaaucgcuccugggcagaccggagucauugccgauuauaacuacaagcugccagacgacuucaugggcugcguguuggcguggaauacacggaacaucgaugccacuagcaccggcaauuauaacuacaaguaucgcuaccuccgacaugggaaacugagacccuuugagagggacauauccaacgucccguucucuccugauggaaagcccuguacaccuccugcauuaaauugcuauuggccccugaacgacuacgguuuuuacaccacuacgggcauuggguaucagccauaccgggugguugugcucagcuucgagcuucugaaugcucccgccacaguaugcggaccuaaauugucaaccgaucuaaucaagaaccagugugucaauuucaacuuuaauggccugacugguaccggggugcucacaccaaguuccaaacguuuccaaccguuucagcaguucggccgcgacguuagcgauuuuaccgacucugugagagaucccaagacuucagaaauccuggacauuaguccuugcgcuuucggaggcgucagcgugaucacaccagggacgaacgccuccucugagguagcagugcuuuaucaagauguuaauuguaccgacgucucgacugccauucacgcugaucagcugacacccgcguggaggauauacagcaccggaaacaauguguuucagacacaggcagguugcuugaucggcgccgaacacguggacacuuccuaugagugugacauuccuaucggggcuggaaucugcgccucauaccauaccgucagucuccugcggucuacgagccaaaaguccauuguugcauauaccaugucauuaggcgccgauagcucuauagcuuacuccaacaauacaaucgccauuccaacuaacuucaguaucagcauuaccacagaagugaugcccgugucuauggcaaaaacuuccguagacuguaauauguacaucugcggugauucaaccgagugugcgaaccugcuacuccaguaugggaguuuuugcacgcagcugaaccgagcucuuagcggcauagccgcagagcaggaccgcaauacaagagaagucuucgcccaagugaagcagauguacaaaaccccgacuuugaaguauuuuggaggcuucaacuucucgcagauccugccugauccacucaaacccacaaagagguccuuuauugaggaccugcuuuucaauaagguuacccuggcugaugccggguuuaugaaacaguacggagaauguuugggugacaucaacgcacgggaucucauuugcgcucaaaaguucaauggccugacuguguuaccuccccugcuaaccgacgauaugaucgccgcguauacagccgcucucgucucugggacggcaaccgccggauggacuuuuggcgcuggugccgcacugcagauaccauucgcgaugcagauggccuaccgcuuuaacgggauuggcgugacacagaauguucuuuaugagaaccaaaaacagaucgcuaaucaguucaacaaggccauuagccaaauccaggaaucauugaccacaaccaguacugcacugggaaaacuccaggacgugguaaaucagaacgcucaagcccugaauacguuagucaagcagcuguccucuaacuuuggcgcaauaagcuccgugcuuaaugauaucuugucaagacucgacccucccgaggccgaggugcagauugacaggcugaucacagggcgucuacagagccugcaaaccuacgucacucagcagcucauucgggcugcggaaauccgagccagugcaaaccuggcugccaccaagaugucugagugcguucuuggacaguccaaaagaguggauuucuguggcaaggguuaccacuugaugagcuuuccacaagccgcuccgcaugggguaguguuccugcacgucacauaugugccuucgcaggaaaggaacuuuacuaccgcacccgccauaugccacgagggaaaagcguacuucccacgcgaaggcguuuucguguuuaaugguacaucaugguucauuacgcagcggaacuuuuucucuccccaaaucaucaccacugacaauacauuugucaguggcaacugugaugugguuauugggaucauuaauaacaccguguaugacccuuuacagccagagcucgauuccuucaaggaggaacuggacaaauacuuuaagaaucauacuagccccgaugucgaccuuggagauauaucuggcaucaacgcuagcguagugaauauucagaaagagaucgacagacugaacgaaguugccaagaauuugaacgagucccucauugaucugcaggagcuagggaaguaugaacaauacaucaaauggccuugguauguguggcugggauucauagcaggccucaucgccauugucauggugacaauccugcuuugcuguaugaccucaugcuguaguugcuugaagggugcuuguagcugcgggucuuguugcaaauuugacgaggacgauuccgaaccgguacugaagggagugaaauuacacuacacgugaggacuaguuauaagacugacuagcccgaugggccucccaacgggcccuccuccccuccuugcaccgagauuaauaaaaaaaaaaaaaaaaaaaaaaaaaaaaaaaaaaaaaaaaaaaaaaaaaaaaaaaaaaaaaaaaugcaucccccccccccccccccccccccccccccccaaaggcucuuuucagagccaccagaauu

SEQ ID NO: 15181 - RNA, 3790 nt, Artificial Sequence
  SARS-CoV/Tor2__NP_828851.1 spike protein mRNA human (variant)
aggagaaagcuuaccauguucaucuuucugcuguuccuuacccugacaagcggcuccgacuuggauagaugcacuacguuugacgaugugcaggcccccaacuacacccaacacacaucuucaaugagaggggucuauuacccugacgagauuuuccggagugauacuuuauaucugacccaggaccuauuucucccauucuacagcaauguuacaggauuucauaccauaaaccacacuuucgguaauccggugauccccuuuaaggauggcauuuauuucgcugcaacagaaaaauccaacguagugcgcgggugggucuuuggaucuaccaugaauaacaagucgcagucagugaucauuaucaauaacagcacgaauguugugauacgagccuguaacuucgagcugugcgacaauccauuuuucgcggucaguaaaccaaugggcacucagacccauacaaugaucuucgauaacgcuuuuaauuguacuuucgaauacauuuccgacgccuuuucucuugaugugagcgagaaguccgguaacuucaaacaccuccgugaauuuguauucaagaauaaggacggguuuuuguauguuuacaaaggauaccaacccaucgauguggucagagaccucccuucaggcuucaacacccugaagccaauuuuuaaacugccccucggcaucaacauaacaaauuucagggcaauuuuaaccgccuuuaguccugcucaggacaucugggggacgagcgcagccgcuuauuucgugggauaccugaagccaacuacauuuaugcuuaaauaugaugagaacgguaccauuacugacgccguggauugcucucagaauccguuggcggagcugaaguguuccgucaagucauucgaaaucgacaaaggcaucuaccagacaagcaacuuccggguugugcccaguggggauguagugcgcuuuccuaauauuaccaaccuaugcccauucggagaggucuuuaaugcaacgaaguuccccucuguguaugccugggaaaggaaaaagauauccaacuguguugcugacuacagcgugcucuauaauucgaccuuuuucucuacauuuaaaugcuacggcgucuccgccacuaagcugaacgaucuuuguuucucaaauguguacgcagacaguuuuguaguuaaaggugaugacgugaggcaaaucgcuccugggcagaccggagucauugccgauuauaacuacaagcugccagacgacuucaugggcugcguguuggcguggaauacacggaacaucgaugccacuagcaccggcaauuauaacuacaaguaucgcuaccuccgacaugggaaacugagacccuuugagagggacauauccaacgucccguucucuccugauggaaagcccuguacaccuccugcauuaaauugcuauuggccccugaacgacuacgguuuuuacaccacuacgggcauuggguaucagccauaccgggugguugugcucagcuucgagcuucugaaugcucccgccacaguaugcggaccuaaauugucaaccgaucuaaucaagaaccagugugucaauuucaacuuuaauggccugacugguaccggggugcucacaccaaguuccaaacguuuccaaccguuucagcaguucggccgcgacguuagcgauuuuaccgacucugugagagaucccaagacuucagaaauccuggacauuaguccuugcgcuuucggaggcgucagcgugaucacaccagggacgaacgccuccucugagguagcagugcuuuaucaagauguuaauuguaccgacgucucgacugccauucacgcugaucagcugacacccgcguggaggauauacagcaccggaaacaauguguuucagacacaggcagguugcuugaucggcgccgaacacguggacacuuccuaugagugugacauuccuaucggggcuggaaucugcgccucauaccauaccgucagucuccugcggucuacgagccaaaaguccauuguugcauauaccaugucauuaggcgccgauagcucuauagcuuacuccaacaauacaaucgccauuccaacuaacuucaguaucagcauuaccacagaagugaugcccgugucuauggcaaaaacuuccguagacuguaauauguacaucugcggugauucaaccgagugugcgaaccugcuacuccaguaugggaguuuuugcacgcagcugaaccgagcucuuagcggcauagccgcagagcaggaccgcaauacaagagaagucuucgcccaagugaagcagauguacaaaaccccgacuuugaaguauuuuggaggcuucaacuucucgcagauccugccugauccacucaaacccacaaagagguccuuuauugaggaccugcuuuucaauaagguuacccuggcugaugccggguuuaugaaacaguacggagaauguuugggugacaucaacgcacgggaucucauuugcgcucaaaaguucaauggccugacuguguuaccuccccugcuaaccgacgauaugaucgccgcguauacagccgcucucgucucugggacggcaaccgccggauggacuuuuggcgcuggugccgcacugcagauaccauucgcgaugcagauggccuaccgcuuuaacgggauuggcgugacacagaauguucuuuaugagaaccaaaaacagaucgcuaaucaguucaacaaggccauuagccaaauccaggaaucauugaccacaaccaguacugcacugggaaaacuccaggacgugguaaaucagaacgcucaagcccugaauacguuagucaagcagcuguccucuaacuuuggcgcaauaagcuccgugcuuaaugauaucuugucaagacucgacccucccgaggccgaggugcagauugacaggcugaucacagggcgucuacagagccugcaaaccuacgucacucagcagcucauucgggcugcggaaauccgagccagugcaaaccuggcugccaccaagaugucugagugcguucuuggacaguccaaaagaguggauuucuguggcaaggguuaccacuugaugagcuuuccacaagccgcuccgcaugggguaguguuccugcacgucacauaugugccuucgcaggaaaggaacuuuacuaccgcacccgccauaugccacgagggaaaagcguacuucccacgcgaaggcguuuucguguuuaaugguacaucaugguucauuacgcagcggaacuuuuucucuccccaaaucaucaccacugacaauacauuugucaguggcaacugugaugugguuauugggaucauuaauaacaccguguaugacccuuuacagccagagcucgauuccuucaaggaggaacuggacaaauacuuuaagaaucauacuagccccgaugucgaccuuggagauauaucuggcaucaacgcuagcguagugaauauucagaaagagaucgacagacugaacgaaguugccaagaauuugaacgagucccucauugaucugcaggagcuagggaaguaugaacaaugaggacuaguuauaagacugacuagcccgaugggccucccaacgggcccuccuccccuccuugcaccgagauuaauaaaaaaaaaaaaaaaaaaaaaaaaaaaaaaaaaaaaaaaaaaaaaaaaaaaaaaaaaaaaaaaaugcaucccccccccccccccccccccccccccccccaaaggcucuuuucagagccaccagaauu

SEQ ID NO: 15182 - RNA, 3871 nt, Artificial Sequence
  SARS-CoV/Tor2__NP_828851.1 spike protein mRNA human (variant)
aggagaaagcuuaccauguucaucuuucugcuguuccuuacccugacaagcggcuccgacuuggauagaugcacuacguuugacgaugugcaggcccccaacuacacccaacacacaucuucaaugagaggggucuauuacccugacgagauuuuccggagugauacuuuauaucugacccaggaccuauuucucccauucuacagcaauguuacaggauuucauaccauaaaccacacuuucgguaauccggugauccccuuuaaggauggcauuuauuucgcugcaacagaaaaauccaacguagugcgcgggugggucuuuggaucuaccaugaauaacaagucgcagucagugaucauuaucaauaacagcacgaauguugugauacgagccuguaacuucgagcugugcgacaauccauuuuucgcggucaguaaaccaaugggcacucagacccauacaaugaucuucgauaacgcuuuuaauuguacuuucgaauacauuuccgacgccuuuucucuugaugugagcgagaaguccgguaacuucaaacaccuccgugaauuuguauucaagaauaaggacggguuuuuguauguuuacaaaggauaccaacccaucgauguggucagagaccucccuucaggcuucaacacccugaagccaauuuuuaaacugccccucggcaucaacauaacaaauuucagggcaauuuuaaccgccuuuaguccugcucaggacaucugggggacgagcgcagccgcuuauuucgugggauaccugaagccaacuacauuuaugcuuaaauaugaugagaacgguaccauuacugacgccguggauugcucucagaauccguuggcggagcugaaguguuccgucaagucauucgaaaucgacaaaggcaucuaccagacaagcaacuuccggguugugcccaguggggauguagugcgcuuuccuaauauuaccaaccuaugcccauucggagaggucuuuaaugcaacgaaguuccccucuguguaugccugggaaaggaaaaagauauccaacuguguugcugacuacagcgugcucuauaauucgaccuuuuucucuacauuuaaaugcuacggcgucuccgccacuaagcugaacgaucuuuguuucucaaauguguacgcagacaguuuuguaguuaaaggugaugacgugaggcaaaucgcuccugggcagaccggagucauugccgauuauaacuacaagcugccagacgacuucaugggcugcguguuggcguggaauacacggaacaucgaugccacuagcaccggcaauuauaacuacaaguaucgcuaccuccgacaugggaaacugagacccuuugagagggacauauccaacgucccguucucuccugauggaaagcccuguacaccuccugcauuaaauugcuauuggccccugaacgacuacgguuuuuacaccacuacgggcauuggguaucagccauaccgggugguugugcucagcuucgagcuucugaaugcucccgccacaguaugcggaccuaaauugucaaccgaucuaaucaagaaccagugugucaauuucaacuuuaauggccugacugguaccggggugcucacaccaaguuccaaacguuuccaaccguuucagcaguucggccgcgacguuagcgauuuuaccgacucugugagagaucccaagacuucagaaauccuggacauuaguccuugcgcuuucggaggcgucagcgugaucacaccagggacgaacgccuccucugagguagcagugcuuuaucaagauguuaauuguaccgacgucucgacugccauucacgcugaucagcugacacccgcguggaggauauacagcaccggaaacaauguguuucagacacaggcagguugcuugaucggcgccgaacacguggacacuuccuaugagugugacauuccuaucggggcuggaaucugcgccucauaccauaccgucagucuccugcggucuacgagccaaaaguccauuguugcauauaccaugucauuaggcgccgauagcucuauagcuuacuccaacaauacaaucgccauuccaacuaacuucaguaucagcauuaccacagaagugaugcccgugucuauggcaaaaacuuccguagacuguaauauguacaucugcggugauucaaccgagugugcgaaccugcuacuccaguaugggaguuuuugcacgcagcugaaccgagcucuuagcggcauagccgcagagcaggaccgcaauacaagagaagucuucgcccaagugaagcagauguacaaaaccccgacuuugaaguauuuuggaggcuucaacuucucgcagauccugccugauccacucaaacccacaaagagguccuuuauugaggaccugcuuuucaauaagguuacccuggcugaugccggguuuaugaaacaguacggagaauguuugggugacaucaacgcacgggaucucauuugcgcucaaaaguucaauggccugacuguguuaccuccccugcuaaccgacgauaugaucgccgcguauacagccgcucucgucucugggacggcaaccgccggauggacuuuuggcgcuggugccgcacugcagauaccauucgcgaugcagauggccuaccgcuuuaacgggauuggcgugacacagaauguucuuuaugagaaccaaaaacagaucgcuaaucaguucaacaaggccauuagccaaauccaggaaucauugaccacaaccaguacugcacugggaaaacuccaggacgugguaaaucagaacgcucaagcccugaauacguuagucaagcagcuguccucuaacuuuggcgcaauaagcuccgugcuuaaugauaucuugucaagacucgacccucccgaggccgaggugcagauugacaggcugaucacagggcgucuacagagccugcaaaccuacgucacucagcagcucauucgggcugcggaaauccgagccagugcaaaccuggcugccaccaagaugucugagugcguucuuggacaguccaaaagaguggauuucuguggcaaggguuaccacuugaugagcuuuccacaagccgcuccgcaugggguaguguuccugcacgucacauaugugccuucgcaggaaaggaacuuuacuaccgcacccgccauaugccacgagggaaaagcguacuucccacgcgaaggcguuuucguguuuaaugguacaucaugguucauuacgcagcggaacuuuuucucuccccaaaucaucaccacugacaauacauuugucaguggcaacugugaugugguuauugggaucauuaauaacaccguguaugacccuuuacagccagagcucgauuccuucaaggaggaacuggacaaauacuuuaagaaucauacuagccccgaugucgaccuuggagauauaucuggcaucaacgcuagcguagugaauauucagaaagagaucgacagacugaacgaaguugccaagaauuugaacgagucccucauugaucugcaggagcuagggaaguaugaacaaggaggcuacaucccugaggcaccgagggacggucaggccuaugugcgcaaagacggggaauggguccugcucucaacauucugaggacuaguuauaagacugacuagcccgaugggccucccaacgggcccuccuccccuccuugcaccgagauuaauaaaaaaaaaaaaaaaaaaaaaaaaaaaaaaaaaaaaaaaaaaaaaaaaaaaaaaaaaaaaaaaaugcaucccccccccccccccccccccccccccccccaaaggcucuuuucagagccaccagaauu

SEQ ID NO: 15183 - RNA, 4279 nt, Artificial Sequence
  HCoV/OC43__P36334.1 spike protein mRNA human (1-1353)
aggagaaagcuuaccauguuccugauccuccuuauuagccugcccaccgccuuugcugugauaggcgacuugaagugcacauccgauaacaucaaugacaaagauacugggccuccaccgauuucuacggacaccgucgauguuacaaacggauuagguacuuacuaugugcuggacagaguauaccuaaauaccacacucuuccugaacggcuauuaccccaccucagggaguacuuauaggaauauggcacuuaagggaagcgugcuguugucccggcucugguuuaaaccuccauuccugucugauuuuaucaacggcauuuucgccaaggucaaaaauacaaaggugaucaaggaccgcguuauguacucggaguuucccgcgauaaccaucgguucaacguucgugaacacuagcuauagugucgugguacagccucgaaccauuaauuccacacaagauggggacaacaaacugcagggacucuuagaaguuucugugugucaguacaauaugugcgaguacccacagacuaucugucaccccaaccugggcaaucaucguaaggaacuuuggcacuuggauaccggcgucgugagcugccuguauaaaagaaacuuuacauacgacgugaaugcugauuaucuauacuuccauuuuuaucaagaagggggaaccuucuacgccuauuuuacggacacuggugucguuacaaaguuccucuucaacguguaccugggcauggcacuuucccacuacuauguaaugccucugaccuguaacucaaaauugacucucgaguacugggugacaccacugaccaguaggcaguauuuacuggccuuuaaucaggacgggauuaucuucaacgcugaggauugcaugagcgacuuuaugucugagauaaaguguaagacgcaguccauugcaccgcccaccggagucuacgaacucaauggcuauacagugcaaccuaucgccgauguuuaccggcgcaaaccaaaccuucccaauugcaacauugaggcuuggcugaaugacaagucagugccuagcccauugaacugggaaagaaaaacuuucaguaauuguaacuuuaauaugucuucccuaaugagcuucauccaggccgauucguuuaccugcaacaauaucgacgcggcaaagauuuaugguauguguuucucuuccauaacaaucgauaaauuugccauucccaacgggaggaaggucgaccugcagcucggaaaucugggcuaccuucagucauucaacuaccggaucgauacuaccgcuacaaguugccaacuguauuacaacuugccggccgcaaaugugagcguaucccgcuuuaacccuucuaccuggaauaaacgauucggcuuuauagaggacagcguuuucaagcccagaccagcuggggugcucacuaaccaugaugucguguaugcccagcacugcuucaaggcgccuaaaaauuuuugucccugcaagcugaacggaucaugugucgguaguggcccagggaaaaauaacggaauuggcacgugccccgccgguacaaauuacuuaaccugugacaaccugugcacuccugacccaaucaccuucacagggaccuauaaguguccgcagacuaaaucccuagugggcaucggagagcacugcagcggccucgcaguuaagucugauuacugugggggaaauucaugcacauguaggccccaagcguuucuggguuggagugccgacagcugccuucagggcgauaagugcaacauuuucgcuaauuuuaucuugcaugacgugaacuccgggcugacguguucuaccgaucuccagaaagccaauacugacauuauacugggaguaugcgucaacuaugaucuuuacggcauccugggucaggggauuuucguggaaguuaacgcaacauacuauaauucguggcaaaacuugcucuacgacagcaauggcaaccuguauggauuucgggauuacaucaucaaucguaccuucaugauucgcuccuguuauucaggcagagugagugccgcuuuucacgcgaacucuagcgagccugcauuacuguucaggaauauaaagugcaacuacgucuuuaauaacucccuaacacggcagcuccagccaaucaauuauuucgacucauaccuggggugugugguaaacgccuacaauagcacugcuauuucugugcagaccugcgaucuuacgguuggauccgguuauugugucgacuacaguaaaaaccgacgcagcagaggcgccaucaccacaggguauagguuuacuaauuucgaacccuucaccgugaacucugugaacgauuccuuggagccugucggaggccuguacgaaauucaaaucccaucagaguuuacaauagguaauaugguugaguucauccagacuucuagccccaaggugaccauugacugcgcagccuuuguguguggggacuaugcugccugcaaaucgcagcucguagaauacggcuccuucugugauaacaucaaugcaauucugacggaggucaacgaauuacuggacacaacccagcuucaaguggcuaauucuuugaugaacggaguuacucucagcacaaagcugaaggauggcgugaauuuuaacgucgacgauaucaauuucucaccggugcuagggugccugggaagugagugcuccaaagcuaguagccgguccgccauagaagaccuccuguuugauaagguuaaacuuucagacgugggcuucguagaggcauauaacaauuguaccgguggggccgagauucgcgauuugaucugcguccagagcuacaagggaauuaaagugcugccuccauuacucagugaaaaccagaucucuggcuacacucuggcugccaccuccgcaagccuuuuucccccuuggacagcugccgcgggugugcccuucuaucugaauguccaguacagaauaaacggcuuggggguuacgauggacgugcucucgcaaaaucagaagcugaucgccaacgcuuuuaauaacgcacuauaugccauucaggagggauucgaugcuaccaacucagcccugguaaagauccaagcaguggucaaugcgaacgccgaagcucucaauaaccugcuucagcaguugucuaauagguucggcgccauuagugcaucccugcaggagaucuuaagccgucucgacgcucuggaagccgaggcacaaauagaucggcuuauuaacgggcgacugacugcccuaaaugcuuacgugucucagcagcucagcgacuccacacugguuaaauuuucagcggcccaggcaauggagaaggugaacgaaugugucaaaagucaaagcucuagaaucaauuucugcggaaacggcaaucauaucauuuccuuggugcagaacgcuccauauggucuguacuuuauccacuucucauauguuccuaccaaguacgugacagccagggucagucccggguuauguauugccggagaccgcggcauagcuccaaaaagcgguuacuuuguaaaugugaacaauacuuggauguauaccggcuccggguacuauuacccggagccuaucacggaaaacaacguuguggucaugucuacaugcgcagugaauuauaccaaggcccccuacguaaugcucaacacuucgauuccaaaucugcccgauuucaaagaggagcuugaccagugguuuaagaaccagaccagcguggcgccugaucugucauuggacuauaucaaugucacauuccucgaucugcaaguugaaaugaaccggcuacaggaggcuauuaaggugcugaaucaguccuacaucaaccuuaaagacauaggaacuuacgaauauuacgugaaguggccaugguaugucuggcuccugaucuguuuggccggcguggcaaugcugguuuuacucuuuuucauuugcuguugcaccggguguggaacaaguugcuuuaaaaagugcggcgguuguugcgaugacuacacgggguaucaagagcugguaaucaaaaccucucacgaugacugaggacuaguuauaagacugacuagcccgaugggccucccaacgggcccuccuccccuccuugcaccgagauuaauaaaaaaaaaaaaaaaaaaaaaaaaaaaaaaaaaaaaaaaaaaaaaaaaaaaaaaaaaaaaaaaaugcaucccccccccccccccccccccccccccccccaaaggcucuuuucagagccaccagaauu

SEQ ID NO: 15184 - RNA, 4279 nt, Artificial Sequence
  HCoV/OC43__P36334.1 spike protein mRNA human (1-1353)(A1070P_L1071P)
aggagaaagcuuaccauguuccugauccuccuuauuagccugcccaccgccuuugcugugauaggcgacuugaagugcacauccgauaacaucaaugacaaagauacugggccuccaccgauuucuacggacaccgucgauguuacaaacggauuagguacuuacuaugugcuggacagaguauaccuaaauaccacacucuuccugaacggcuauuaccccaccucagggaguacuuauaggaauauggcacuuaagggaagcgugcuguugucccggcucugguuuaaaccuccauuccugucugauuuuaucaacggcauuuucgccaaggucaaaaauacaaaggugaucaaggaccgcguuauguacucggaguuucccgcgauaaccaucgguucaacguucgugaacacuagcuauagugucgugguacagccucgaaccauuaauuccacacaagauggggacaacaaacugcagggacucuuagaaguuucugugugucaguacaauaugugcgaguacccacagacuaucugucaccccaaccugggcaaucaucguaaggaacuuuggcacuuggauaccggcgucgugagcugccuguauaaaagaaacuuuacauacgacgugaaugcugauuaucuauacuuccauuuuuaucaagaagggggaaccuucuacgccuauuuuacggacacuggugucguuacaaaguuccucuucaacguguaccugggcauggcacuuucccacuacuauguaaugccucugaccuguaacucaaaauugacucucgaguacugggugacaccacugaccaguaggcaguauuuacuggccuuuaaucaggacgggauuaucuucaacgcugaggauugcaugagcgacuuuaugucugagauaaaguguaagacgcaguccauugcaccgcccaccggagucuacgaacucaauggcuauacagugcaaccuaucgccgauguuuaccggcgcaaaccaaaccuucccaauugcaacauugaggcuuggcugaaugacaagucagugccuagcccauugaacugggaaagaaaaacuuucaguaauuguaacuuuaauaugucuucccuaaugagcuucauccaggccgauucguuuaccugcaacaauaucgacgcggcaaagauuuaugguauguguuucucuuccauaacaaucgauaaauuugccauucccaacgggaggaaggucgaccugcagcucggaaaucugggcuaccuucagucauucaacuaccggaucgauacuaccgcuacaaguugccaacuguauuacaacuugccggccgcaaaugugagcguaucccgcuuuaacccuucuaccuggaauaaacgauucggcuuuauagaggacagcguuuucaagcccagaccagcuggggugcucacuaaccaugaugucguguaugcccagcacugcuucaaggcgccuaaaaauuuuugucccugcaagcugaacggaucaugugucgguaguggcccagggaaaaauaacggaauuggcacgugccccgccgguacaaauuacuuaaccugugacaaccugugcacuccugacccaaucaccuucacagggaccuauaaguguccgcagacuaaaucccuagugggcaucggagagcacugcagcggccucgcaguuaagucugauuacugugggggaaauucaugcacauguaggccccaagcguuucuggguuggagugccgacagcugccuucagggcgauaagugcaacauuuucgcuaauuuuaucuugcaugacgugaacuccgggcugacguguucuaccgaucuccagaaagccaauacugacauuauacugggaguaugcgucaacuaugaucuuuacggcauccugggucaggggauuuucguggaaguuaacgcaacauacuauaauucguggcaaaacuugcucuacgacagcaauggcaaccuguauggauuucgggauuacaucaucaaucguaccuucaugauucgcuccuguuauucaggcagagugagugccgcuuuucacgcgaacucuagcgagccugcauuacuguucaggaauauaaagugcaacuacgucuuuaauaacucccuaacacggcagcuccagccaaucaauuauuucgacucauaccuggggugugugguaaacgccuacaauagcacugcuauuucugugcagaccugcgaucuuacgguuggauccgguuauugugucgacuacaguaaaaaccgacgcagcagaggcgccaucaccacaggguauagguuuacuaauuucgaacccuucaccgugaacucugugaacgauuccuuggagccugucggaggccuguacgaaauucaaaucccaucagaguuuacaauagguaauaugguugaguucauccagacuucuagccccaaggugaccauugacugcgcagccuuuguguguggggacuaugcugccugcaaaucgcagcucguagaauacggcuccuucugugauaacaucaaugcaauucugacggaggucaacgaauuacuggacacaacccagcuucaaguggcuaauucuuugaugaacggaguuacucucagcacaaagcugaaggauggcgugaauuuuaacgucgacgauaucaauuucucaccggugcuagggugccugggaagugagugcuccaaagcuaguagccgguccgccauagaagaccuccuguuugauaagguuaaacuuucagacgugggcuucguagaggcauauaacaauuguaccgguggggccgagauucgcgauuugaucugcguccagagcuacaagggaauuaaagugcugccuccauuacucagugaaaaccagaucucuggcuacacucuggcugccaccuccgcaagccuuuuucccccuuggacagcugccgcgggugugcccuucuaucugaauguccaguacagaauaaacggcuuggggguuacgauggacgugcucucgcaaaaucagaagcugaucgccaacgcuuuuaauaacgcacuauaugccauucaggagggauucgaugcuaccaacucagcccugguaaagauccaagcaguggucaaugcgaacgccgaagcucucaauaaccugcuucagcaguugucuaauagguucggcgccauuagugcaucccugcaggagaucuuaagccgucucgacccaccugaagcugaggcccaaauagaucggcugauuaacgggcgacuuacugcacugaaugccuacgugucucagcagcuaagcgacuccacacucguuaaauuuucagcugcgcaggccauggagaaggugaacgaaugugucaaaagucaaagcucuagaaucaauuucugcggaaacggcaaucauaucauuucccuggugcagaacgcacccuaugguuuguacuuuauccacuucucauauguuccaaccaaguacgugacagcuagggucaguccggggcuguguauugccggagaccgcggcauagccccuaaaagcgguuacuuuguaaaugugaacaauacuuggauguauaccggcuccggguacuauuaccccgagccaaucacggaaaacaacguuguggucaugucuacaugcgcugugaauuauaccaaggcacccuacguaauguuaaacacuucgauuccuaaucucccagauuucaaagaggagcuggaccagugguuuaagaaccagaccagcguggcccccgaucuuucacuggacuauaucaaugucacauucuuggaucuccaaguugaaaugaaccggcugcaggaggcgauuaaggugcuaaaucaguccuacaucaaccugaaagacauaggaacuuacgaauauuacgugaaguggccuugguaugucuggcuucucaucugucuggcuggcguggccauguugguucuguuauuuuucauuugcuguugcaccggguguggaacaaguugcuuuaaaaagugcggcgguuguugcgaugacuacacgggguaucaagagcucguaaucaaaaccucucacgaugacugaggacuaguuauaagacugacuagcccgaugggccucccaacgggcccuccuccccuccuugcaccgagauuaauaaaaaaaaaaaaaaaaaaaaaaaaaaaaaaaaaaaaaaaaaaaaaaaaaaaaaaaaaaaaaaaaugcaucccccccccccccccccccccccccccccccaaaggcucuuuucagagccaccagaauu

SEQ ID NO: 15185 - RNA, 4306 nt, Artificial Sequence
  HCoV/OC43/1783A_10__AIL49484.1 spike protein mRNA human (1-1362)
aggagaaagcuuaccauguuccugauccuccuuauuagccugcccaccgccuuugcugugauaggcgacuugaagugcccuuuagauuccagaacagggucucugaacaauaucgacacuggaccaccgucaauuaguacggcaaccgucgauguuacaaacggucuaggcacuuacuaugugcucgacaggguauaccugaauaccacacuuuuccugaacggguauuaccccaccagcggauccacuuaucggaauauggccuugaaaggcacagauaagcucucuacccugugguuuaaaccuccauuccugucggacuuuaucaacgguauuuucgcgaaggugaaaaauacgaaggucuuuaaggauggggugauguacucagaguuccccgcuaucacuauaggaagcaccuuuguuaacacaaguuauuccguggucgugcagccucgcacuaucaauucuacccaagacggcguaaacaaacuccagggcuuacuggaaguuagcgugugucaguacaauaugugcgaguacccacacacaauuugucaucccaaacuugggaaccacuucaaggaauuguggcauauggauaccggagucguguccugccuguauaagcgaaauuuuacguacgacgugaacgccacuuaucuauacuuccacuuuuaucaggaggguggcacauucuacgcauauuucaccgauacuggggucguuacaaaauuucucuucaauguguaccugggaauggcccuuucacauuacuauguaaugccucugaccuguaucagucguagagacauuggcuuuacguuggaauacugggugaccccacucacaagcaggcaauaucuguuagcuuucaaccaggaugguaucauauuuaacgcagucgacugcaugucugacuucauguccgagauuaaguguaagacucagucaaucgccccgcccaccgggguguacgagcugaauggauauacaguucagccuauugcugauguguaccggcgcaaaccagaccuccccaacugcaauaucgaagccuggcuuaacgauaagagcgucccuaguccacugaauugggagagaaaaacuuuuucuaacuguaauuucaacauguccagcuugaugucguuuauccaagcggacucuuuuaccugcaauaacauugaugcagccaagauauauggcauguguuucuccucaaucacaauugacaaauucgcuauccccaauggcaggaagguggaucuacagcuggggaaccucggauaccugcagaguuuuaauuaccggauagacaccacugccacgagcugccagcuuuauuacaaccugccggcagcuaauguauccguuucucgcuucaacccuagcacauggaacaaacgauucgguuuuauugaaaauucaguguucaagccccaaccagccggcgucuugaccaaccacgauguggucuaugcgcagcacugcuuuaaggccccuaaaaauuucugucccugcaagcucaacaguucccuguguguggggagcggaccaggcaaaaauaacgguaucgggacuugccccgcaggcaccaauuacuuaacaugucauaaccugugcaauccugacccaaucaccuuuacuggaccguauaaguguccccagacaaaaucucuaguuggcauuggggagcacugcucaggacucgcugugaagagugauuacugugguggcaacccuugcacgugucaaccacaggccuuccugggguggagcgcugacuccugccuucagggagacaagugcaauaucuuugccaacuugauucugcaugauguaaauucuggccucaccuguucgacugaccugcagaaagcaaacacagauauaaaacuuggugucugcgugaauuaugaccuguacgggaucagcggccaaggaauuuucguugaggugaacgccaccuacuauaacuccuggcagaauuugcucuacgauucaaacggcaaucuguauggguuuagagacuacaucacaaacaggacuuucaugauccggaguuguuauucuggacgugucagcgcugcguuucacgcaaauuccucagaacccgccuuacuguuccgcaacauuaagugcaauuacguguuuaacaauagccuaauaagacagcuccagccuaucaacuauuucgauucuuaccuggguuguguagugaaugcuuacaacuccaccgccauuaguguucaaacgugcgaccuuaccgucggcagcggguauuguguggauuacucuaagaauaggcggucccgacgcgcaaucacaacuggauauagauucaccaacuuugagccauucacagugaauagcgucaacgacaguuuggaacccguuggcggucuguacgagauucagaucccgagcgaauuuacuauagggaacauggaggaguucauccagaccucguccccuaaagugacgauugauugcgccgcuuuuguguguggcgacuaugccgcaugcaagucucagcucguagaauacggaucauucugugauaauaucaacgcgauucugacagaggucaaugaauuacuggacaccacucaacuucagguggcuaacucauugaugaauggcguuacacucaguaccaagcugaaagacggggugaacuuuaaugucgaugacaucaacuucuccucugugcuaggaugccugggcagcgagugcuccaaggccucaagcaggagugcaauagaagaucuccuguuugacaaaguuaaacuuucugauguggguuucguagccgcuuauaauaacuguacugggggagccgagauucgggacuugaucugcguccaguccuacaagggcauuaaggugcugccacccuuacucagcgagaaucagaucucggguuacacccuggcagcuacaucagccucucuuuuuccucccuggacggcggccgcuggcgugccauucuaucugaacguccaauaccgcauaaauggguugggaguuaccauggaugugcucagucagaaccagaagcugaucgcaaaugccuucaacaaugcucuagacgccauucaagaaggcuuugaugcaacuaacuccgcgcugguaaaaauccaggccguggucaacgcuaaugccgaggcacucaacaaucugcuucagcaguugagcaacagauucggggcuauuucuagcucccugcaagaaaucuuaucaaggcucgacgcccuggaggcagaagcccagauagaucgucuuauuaauggacggcugacagcucuaaacgcguaugugagucagcagcucagcgacucuacccugguuaaguuuuccgccgcacaagcuauggagaaagugaaugagugugucaagucacagaguagccgaaucaacuucugcggcaaugguaaccacaucauuuccuuggugcagaaugccccuuacgggcuguauuuuauccauuucucuuacguucccacaaaauaugugacugccaaggucucgccaggauuauguauugcuggcgauagagguauagcaccgaaaagcggcuacuuuguaaacgugaauaacaccuggauguacacggggucaggauauuacuauccugaacccaucacagagaauaacguuguggucaugaguaccugcgccgugaacuacacuaaggcgccauauguaaugcucaauaccuccacacccaaccugccugacuucagggaggaacuugaccagugguuuaagaaucaaacuucuguggcuccagaucugagcuuggacuacauuaacgucaccuuccucgaucugcagguugagaugaaucgccuacaggaagccaucaaagugcugaaccaauccuauauuaaucuuaaggacaucggcacauacgaguacuaugugaaauggcccugguacgucuggcuccugauaggguuggcaggaguggccaugcugguuuuacucuuuuucaucuguugcuguacgggcugcgguaccucauguuuuaagaaaugcgggggaugcugugaugacuauacuggcuaccaggaacugguaauuaagacaucucacgaugacugaggacuaguuauaagacugacuagcccgaugggccucccaacgggcccuccuccccuccuugcaccgagauuaauaaaaaaaaaaaaaaaaaaaaaaaaaaaaaaaaaaaaaaaaaaaaaaaaaaaaaaaaaaaaaaaaugcaucccccccccccccccccccccccccccccccaaaggcucuuuucagagccaccagaauu

SEQ ID NO: 15186 - RNA, 4306 nt, Artificial Sequence
  HCoV/OC43/1783A_10__AIL49484.1 spike protein mRNA human (1-1362)(A1079P_L1080P)
aggagaaagcuuaccauguuccugauccuccuuauuagccugcccaccgccuuugcugugauaggcgacuugaagugcccuuuagauuccagaacagggucucugaacaauaucgacacuggaccaccgucaauuaguacggcaaccgucgauguuacaaacggucuaggcacuuacuaugugcucgacaggguauaccugaauaccacacuuuuccugaacggguauuaccccaccagcggauccacuuaucggaauauggccuugaaaggcacagauaagcucucuacccugugguuuaaaccuccauuccugucggacuuuaucaacgguauuuucgcgaaggugaaaaauacgaaggucuuuaaggauggggugauguacucagaguuccccgcuaucacuauaggaagcaccuuuguuaacacaaguuauuccguggucgugcagccucgcacuaucaauucuacccaagacggcguaaacaaacuccagggcuuacuggaaguuagcgugugucaguacaauaugugcgaguacccacacacaauuugucaucccaaacuugggaaccacuucaaggaauuguggcauauggauaccggagucguguccugccuguauaagcgaaauuuuacguacgacgugaacgccacuuaucuauacuuccacuuuuaucaggaggguggcacauucuacgcauauuucaccgauacuggggucguuacaaaauuucucuucaauguguaccugggaauggcccuuucacauuacuauguaaugccucugaccuguaucagucguagagacauuggcuuuacguuggaauacugggugaccccacucacaagcaggcaauaucuguuagcuuucaaccaggaugguaucauauuuaacgcagucgacugcaugucugacuucauguccgagauuaaguguaagacucagucaaucgccccgcccaccgggguguacgagcugaauggauauacaguucagccuauugcugauguguaccggcgcaaaccagaccuccccaacugcaauaucgaagccuggcuuaacgauaagagcgucccuaguccacugaauugggagagaaaaacuuuuucuaacuguaauuucaacauguccagcuugaugucguuuauccaagcggacucuuuuaccugcaauaacauugaugcagccaagauauauggcauguguuucuccucaaucacaauugacaaauucgcuauccccaauggcaggaagguggaucuacagcuggggaaccucggauaccugcagaguuuuaauuaccggauagacaccacugccacgagcugccagcuuuauuacaaccugccggcagcuaauguauccguuucucgcuucaacccuagcacauggaacaaacgauucgguuuuauugaaaauucaguguucaagccccaaccagccggcgucuugaccaaccacgauguggucuaugcgcagcacugcuuuaaggccccuaaaaauuucugucccugcaagcucaacaguucccuguguguggggagcggaccaggcaaaaauaacgguaucgggacuugccccgcaggcaccaauuacuuaacaugucauaaccugugcaauccugacccaaucaccuuuacuggaccguauaaguguccccagacaaaaucucuaguuggcauuggggagcacugcucaggacucgcugugaagagugauuacugugguggcaacccuugcacgugucaaccacaggccuuccugggguggagcgcugacuccugccuucagggagacaagugcaauaucuuugccaacuugauucugcaugauguaaauucuggccucaccuguucgacugaccugcagaaagcaaacacagauauaaaacuuggugucugcgugaauuaugaccuguacgggaucagcggccaaggaauuuucguugaggugaacgccaccuacuauaacuccuggcagaauuugcucuacgauucaaacggcaaucuguauggguuuagagacuacaucacaaacaggacuuucaugauccggaguuguuauucuggacgugucagcgcugcguuucacgcaaauuccucagaacccgccuuacuguuccgcaacauuaagugcaauuacguguuuaacaauagccuaauaagacagcuccagccuaucaacuauuucgauucuuaccuggguuguguagugaaugcuuacaacuccaccgccauuaguguucaaacgugcgaccuuaccgucggcagcggguauuguguggauuacucuaagaauaggcggucccgacgcgcaaucacaacuggauauagauucaccaacuuugagccauucacagugaauagcgucaacgacaguuuggaacccguuggcggucuguacgagauucagaucccgagcgaauuuacuauagggaacauggaggaguucauccagaccucguccccuaaagugacgauugauugcgccgcuuuuguguguggcgacuaugccgcaugcaagucucagcucguagaauacggaucauucugugauaauaucaacgcgauucugacagaggucaaugaauuacuggacaccacucaacuucagguggcuaacucauugaugaauggcguuacacucaguaccaagcugaaagacggggugaacuuuaaugucgaugacaucaacuucuccucugugcuaggaugccugggcagcgagugcuccaaggccucaagcaggagugcaauagaagaucuccuguuugacaaaguuaaacuuucugauguggguuucguagccgcuuauaauaacuguacugggggagccgagauucgggacuugaucugcguccaguccuacaagggcauuaaggugcugccacccuuacucagcgagaaucagaucucggguuacacccuggcagcuacaucagccucucuuuuuccucccuggacggcggccgcuggcgugccauucuaucugaacguccaauaccgcauaaauggguugggaguuaccauggaugugcucagucagaaccagaagcugaucgcaaaugccuucaacaaugcucuagacgccauucaagaaggcuuugaugcaacuaacuccgcgcugguaaaaauccaggccguggucaacgcuaaugccgaggcacucaacaaucugcuucagcaguugagcaacagauucggggcuauuucuagcucccugcaagaaaucuuaucaaggcucgacccucccgaggccgaagcacagauagaucgucugauuaauggacggcuuacagcccugaacgcuuaugugagucagcagcuaagcgacucuacccucguuaaguuuuccgcggcccaagcaauggagaaagugaaugagugugucaagucacagaguagccgaaucaacuucugcggcaaugguaaccacaucauuucccuggugcagaaugcuccauacggguuguauuuuauccauuucucuuacguuccgacaaaauaugugacugccaaggucucgccuggacuguguauugccggcgauagagguauagcucccaaaagcggcuacuuuguaaacgugaauaacaccuggauguacacggggucaggauauuacuauccagaacccaucacagagaauaacguuguggucaugaguaccugcgcagugaacuacacuaaggccccuuauguaauguuaaauaccuccacaccaaaccuccccgacuucagggaggaacuggaccagugguuuaagaaucaaacuucuguggcgccugaucuuagccuggacuacauuaacgucaccuucuuggaucuccagguugagaugaaucgccugcaggaagcuaucaaagugcuaaaccaauccuauauuaaucugaaggacaucggcacauacgaguacuaugugaaauggccgugguacgucuggcuucucauagggcuggccggaguggcaauguugguucuguuauuuuucaucuguugcuguacgggcugcgguaccucauguuuuaagaaaugcgggggaugcugugaugacuauacuggcuaccaggaacucguaauuaagacaucucacgaugacugaggacuaguuauaagacugacuagcccgaugggccucccaacgggcccuccuccccuccuugcaccgagauuaauaaaaaaaaaaaaaaaaaaaaaaaaaaaaaaaaaaaaaaaaaaaaaaaaaaaaaaaaaaaaaaaaugcaucccccccccccccccccccccccccccccccaaaggcucuuuucagagccaccagaauu

SEQ ID NO: 15187 - RNA, 4081 nt, Artificial Sequence
  HCoV/OC43/1783A_10__AIL49484.1 spike protein mRNA human (variant)
aggagaaagcuuaccauguuccugauccuccuuauuagccugcccaccgccuuugcugugauaggcgacuugaagugcccuuuagauuccagaacagggucucugaacaauaucgacacuggaccaccgucaauuaguacggcaaccgucgauguuacaaacggucuaggcacuuacuaugugcucgacaggguauaccugaauaccacacuuuuccugaacggguauuaccccaccagcggauccacuuaucggaauauggccuugaaaggcacagauaagcucucuacccugugguuuaaaccuccauuccugucggacuuuaucaacgguauuuucgcgaaggugaaaaauacgaaggucuuuaaggauggggugauguacucagaguuccccgcuaucacuauaggaagcaccuuuguuaacacaaguuauuccguggucgugcagccucgcacuaucaauucuacccaagacggcguaaacaaacuccagggcuuacuggaaguuagcgugugucaguacaauaugugcgaguacccacacacaauuugucaucccaaacuugggaaccacuucaaggaauuguggcauauggauaccggagucguguccugccuguauaagcgaaauuuuacguacgacgugaacgccacuuaucuauacuuccacuuuuaucaggaggguggcacauucuacgcauauuucaccgauacuggggucguuacaaaauuucucuucaauguguaccugggaauggcccuuucacauuacuauguaaugccucugaccuguaucagucguagagacauuggcuuuacguuggaauacugggugaccccacucacaagcaggcaauaucuguuagcuuucaaccaggaugguaucauauuuaacgcagucgacugcaugucugacuucauguccgagauuaaguguaagacucagucaaucgccccgcccaccgggguguacgagcugaauggauauacaguucagccuauugcugauguguaccggcgcaaaccagaccuccccaacugcaauaucgaagccuggcuuaacgauaagagcgucccuaguccacugaauugggagagaaaaacuuuuucuaacuguaauuucaacauguccagcuugaugucguuuauccaagcggacucuuuuaccugcaauaacauugaugcagccaagauauauggcauguguuucuccucaaucacaauugacaaauucgcuauccccaauggcaggaagguggaucuacagcuggggaaccucggauaccugcagaguuuuaauuaccggauagacaccacugccacgagcugccagcuuuauuacaaccugccggcagcuaauguauccguuucucgcuucaacccuagcacauggaacaaacgauucgguuuuauugaaaauucaguguucaagccccaaccagccggcgucuugaccaaccacgauguggucuaugcgcagcacugcuuuaaggccccuaaaaauuucugucccugcaagcucaacaguucccuguguguggggagcggaccaggcaaaaauaacgguaucgggacuugccccgcaggcaccaauuacuuaacaugucauaaccugugcaauccugacccaaucaccuuuacuggaccguauaaguguccccagacaaaaucucuaguuggcauuggggagcacugcucaggacucgcugugaagagugauuacugugguggcaacccuugcacgugucaaccacaggccuuccugggguggagcgcugacuccugccuucagggagacaagugcaauaucuuugccaacuugauucugcaugauguaaauucuggccucaccuguucgacugaccugcagaaagcaaacacagauauaaaacuuggugucugcgugaauuaugaccuguacgggaucagcggccaaggaauuuucguugaggugaacgccaccuacuauaacuccuggcagaauuugcucuacgauucaaacggcaaucuguauggguuuagagacuacaucacaaacaggacuuucaugauccggaguuguuauucuggacgugucagcgcugcguuucacgcaaauuccucagaacccgccuuacuguuccgcaacauuaagugcaauuacguguuuaacaauagccuaauaagacagcuccagccuaucaacuauuucgauucuuaccuggguuguguagugaaugcuuacaacuccaccgccauuaguguucaaacgugcgaccuuaccgucggcagcggguauuguguggauuacucuaagaauggaggcuccgguucagcaaucacaacuggguauagguucaccaacuuugagccauucacagugaauagugucaacgacagcuuggaacccguuggcggacuguacgagauucagaucccgucggaauuuacuauaggcaacauggaggaguucauccagaccuccucuccuaaagugacgauugauugcgccgcuuuuguguguggggacuaugccgcaugcaagagccagcucguagaauacggaucauucugugauaauaucaacgcgauucugacagaggucaaugaauuacuggacaccacucaacuucagguggcuaacaguuugaugaauggcguuacacucuccaccaagcugaaagacggugugaacuuuaaugucgaugacaucaacuucucuagcgugcuagggugccugggauccgagugcucaaaggccagcagucggucugcaauagaagaucuccuguuugacaaaguuaaacuuuccgaugugggcuucguagccgcuuauaauaacuguacugguggcgccgagauucgagacuugaucugcguccagagcuacaaggggauuaaggugcugccacccuuacucucggagaaucagaucucaggauacacccuggcagcuacaucugccagucuuuuuccucccuggacggcggccgcuggcgugccauucuaucugaacguccaauaccgcauaaauggguugggaguuaccauggaugugcucucccagaaccagaagcugaucgcaaaugccuucaacaaugcucuagacgccauucaagaaggcuuugaugcaacuaacagcgcgcugguaaaaauccaggccguggucaacgcuaaugccgaggcacucaacaaucugcuucagcaguugucuaacagauucggugcuauuagcuccucacugcaagaaaucuuaaguaggcucgacccucccgaggccgaagcacagauagaucggcugauuaaugggcgccuuacagcccugaacgcuuaugugagccagcagcuaucugacuccacccucguuaaguuuucagcggcccaagcaauggagaaagugaaugagugugucaagagucagagcuccagaaucaacuucugcggaaauggcaaccacaucauuucucuggugcagaaugcuccauacgguuuguauuuuauccauuucucguacguuccgacaaaauaugugacugccaaggucagcccuggccuguguauugccggggauaggggaauagcucccaaaucaggcuacuuuguaaacgugaauaacaccuggauguacacgggguccggauauuacuauccagaacccaucacagagaauaacguuguggucaugaguaccugcgcagugaacuacacuaaggccccuuauguaauguuaaauaccucuacaccaaaccuccccgacuuccgugaggaacuggaccagugguuuaagaaucaaacuagcguggcgccugaucuuucccuggacuacauuaacgucaccuucuuggaucuccagguugagaugaaucggcugcaggaagcuaucaaagugcuaaacugaggacuaguuauaagacugacuagcccgaugggccucccaacgggcccuccuccccuccuugcaccgagauuaauaaaaaaaaaaaaaaaaaaaaaaaaaaaaaaaaaaaaaaaaaaaaaaaaaaaaaaaaaaaaaaaaugcaucccccccccccccccccccccccccccccccaaaggcucuuuucagagccaccagaauu

SEQ ID NO: 15188 - RNA, 4162 nt, Artificial Sequence
  HCoV/OC43/1783A_10__AIL49484.1 spike protein mRNA human (variant)
aggagaaagcuuaccauguuccugauccuccuuauuagccugcccaccgccuuugcugugauaggcgacuugaagugcccuuuagauuccagaacagggucucugaacaauaucgacacuggaccaccgucaauuaguacggcaaccgucgauguuacaaacggucuaggcacuuacuaugugcucgacaggguauaccugaauaccacacuuuuccugaacggguauuaccccaccagcggauccacuuaucggaauauggccuugaaaggcacagauaagcucucuacccugugguuuaaaccuccauuccugucggacuuuaucaacgguauuuucgcgaaggugaaaaauacgaaggucuuuaaggauggggugauguacucagaguuccccgcuaucacuauaggaagcaccuuuguuaacacaaguuauuccguggucgugcagccucgcacuaucaauucuacccaagacggcguaaacaaacuccagggcuuacuggaaguuagcgugugucaguacaauaugugcgaguacccacacacaauuugucaucccaaacuugggaaccacuucaaggaauuguggcauauggauaccggagucguguccugccuguauaagcgaaauuuuacguacgacgugaacgccacuuaucuauacuuccacuuuuaucaggaggguggcacauucuacgcauauuucaccgauacuggggucguuacaaaauuucucuucaauguguaccugggaauggcccuuucacauuacuauguaaugccucugaccuguaucagucguagagacauuggcuuuacguuggaauacugggugaccccacucacaagcaggcaauaucuguuagcuuucaaccaggaugguaucauauuuaacgcagucgacugcaugucugacuucauguccgagauuaaguguaagacucagucaaucgccccgcccaccgggguguacgagcugaauggauauacaguucagccuauugcugauguguaccggcgcaaaccagaccuccccaacugcaauaucgaagccuggcuuaacgauaagagcgucccuaguccacugaauugggagagaaaaacuuuuucuaacuguaauuucaacauguccagcuugaugucguuuauccaagcggacucuuuuaccugcaauaacauugaugcagccaagauauauggcauguguuucuccucaaucacaauugacaaauucgcuauccccaauggcaggaagguggaucuacagcuggggaaccucggauaccugcagaguuuuaauuaccggauagacaccacugccacgagcugccagcuuuauuacaaccugccggcagcuaauguauccguuucucgcuucaacccuagcacauggaacaaacgauucgguuuuauugaaaauucaguguucaagccccaaccagccggcgucuugaccaaccacgauguggucuaugcgcagcacugcuuuaaggccccuaaaaauuucugucccugcaagcucaacaguucccuguguguggggagcggaccaggcaaaaauaacgguaucgggacuugccccgcaggcaccaauuacuuaacaugucauaaccugugcaauccugacccaaucaccuuuacuggaccguauaaguguccccagacaaaaucucuaguuggcauuggggagcacugcucaggacucgcugugaagagugauuacugugguggcaacccuugcacgugucaaccacaggccuuccugggguggagcgcugacuccugccuucagggagacaagugcaauaucuuugccaacuugauucugcaugauguaaauucuggccucaccuguucgacugaccugcagaaagcaaacacagauauaaaacuuggugucugcgugaauuaugaccuguacgggaucagcggccaaggaauuuucguugaggugaacgccaccuacuauaacuccuggcagaauuugcucuacgauucaaacggcaaucuguauggguuuagagacuacaucacaaacaggacuuucaugauccggaguuguuauucuggacgugucagcgcugcguuucacgcaaauuccucagaacccgccuuacuguuccgcaacauuaagugcaauuacguguuuaacaauagccuaauaagacagcuccagccuaucaacuauuucgauucuuaccuggguuguguagugaaugcuuacaacuccaccgccauuaguguucaaacgugcgaccuuaccgucggcagcggguauuguguggauuacucuaagaauggaggcuccgguucagcaaucacaacuggguauagguucaccaacuuugagccauucacagugaauagugucaacgacagcuuggaacccguuggcggacuguacgagauucagaucccgucggaauuuacuauaggcaacauggaggaguucauccagaccuccucuccuaaagugacgauugauugcgccgcuuuuguguguggggacuaugccgcaugcaagagccagcucguagaauacggaucauucugugauaauaucaacgcgauucugacagaggucaaugaauuacuggacaccacucaacuucagguggcuaacaguuugaugaauggcguuacacucuccaccaagcugaaagacggugugaacuuuaaugucgaugacaucaacuucucuagcgugcuagggugccugggauccgagugcucaaaggccagcagucggucugcaauagaagaucuccuguuugacaaaguuaaacuuuccgaugugggcuucguagccgcuuauaauaacuguacugguggcgccgagauucgagacuugaucugcguccagagcuacaaggggauuaaggugcugccacccuuacucucggagaaucagaucucaggauacacccuggcagcuacaucugccagucuuuuuccucccuggacggcggccgcuggcgugccauucuaucugaacguccaauaccgcauaaauggguugggaguuaccauggaugugcucucccagaaccagaagcugaucgcaaaugccuucaacaaugcucuagacgccauucaagaaggcuuugaugcaacuaacagcgcgcugguaaaaauccaggccguggucaacgcuaaugccgaggcacucaacaaucugcuucagcaguugucuaacagauucggugcuauuagcuccucacugcaagaaaucuuaaguaggcucgacccucccgaggccgaagcacagauagaucggcugauuaaugggcgccuuacagcccugaacgcuuaugugagccagcagcuaucugacuccacccucguuaaguuuucagcggcccaagcaauggagaaagugaaugagugugucaagagucagagcuccagaaucaacuucugcggaaauggcaaccacaucauuucucuggugcagaaugcuccauacgguuuguauuuuauccauuucucguacguuccgacaaaauaugugacugccaaggucagcccuggccuguguauugccggggauaggggaauagcucccaaaucaggcuacuuuguaaacgugaauaacaccuggauguacacgggguccggauauuacuauccagaacccaucacagagaauaacguuguggucaugaguaccugcgcagugaacuacacuaaggccccuuauguaauguuaaauaccucuacaccaaaccuccccgacuuccgugaggaacuggaccagugguuuaagaaucaaacuagcguggcgccugaucuuucccuggacuacauuaacgucaccuucuuggaucuccagguugagaugaaucggcugcaggaagcuaucaaagugcuaaacggcgguuauauuccggaggccccacgagacgggcaagcauacgugagaaaggauggagaauggguccugcuuucaacauuuugaggacuaguuauaagacugacuagcccgaugggccucccaacgggcccuccuccccuccuugcaccgagauuaauaaaaaaaaaaaaaaaaaaaaaaaaaaaaaaaaaaaaaaaaaaaaaaaaaaaaaaaaaaaaaaaaugcaucccccccccccccccccccccccccccccccaaaggcucuuuucagagccaccagaauu

SEQ ID NO: 15189 - RNA, 4273 nt, Artificial Sequence
  HCoV/HKU1/N5__Q0ZME7.1 spike protein mRNA human (1-1351)
aggagaaagcuuaccauguuccugaucauuuuuauacuccccaccacacuugccgugaucggcgacuucaacugcacuaauagcuuuauuaacgauuacaauaagacgaucccuagaauuuccgaggacgucguugaugugucucugggguugggaaccuauuacguauuaaacaggguguaucugaauacaacucuacucuucaccgguuacuuuccaaaaucaggcgcuaacuuccgggaccuggcacuuaaggggaguaucuaucugagcacauugugguacaaaccgcccuuucucuccgauuucaauaacggaauauuuucuaaggucaaaaauaccaagcuguaugugaacaauacucuguacucggaguucucaacaaucguuauuggcagcguguuugucaacaccaguuacacgaucgugguacagccucacaaugguauucucgaaaucacugccugucaauauaccaugugcgaauacccacauacaguuuguaaguccaaagggucuauacgcaacgagagcuggcacauugacuccucagaacccuuaugccuguucaagaaaaauuuuacuuauaacgugagugcggauuggcuuuacuuccauuucuaucaggagcgaggagucuuuuacgcuuauuacgccgacgugggcaugccuaccacauucuuguuuagccuguaccuaggcaccauccucucucacuauuacgugaugccacugacguguaacgcaauuuccucaaauacugauaacgagacacuugaauauugggucacuccccugagccguagacaguacuugcucaauuucgacgagcaugggguuaucaccaacgccguggauugcaguucuuccuuucugagcgaaauccaguguaagacacaaucguucgcuccuaauaccggaguauaugacuuaucugguuuuacggugaaaccagucgcaaccguguacaggcggauuccgaaccugcccgauugcgacauagacaauuggcucaacaauguuuccgugccuucaccacuuaacugggagcgcagaaucuucaguaauuguaacuuuaaucugagcacauugcuaaggcugguccacguggauuccuucucuugcaacaaucucgacaagagcaagauuuuuggcucauguuucaacaguaucacuguagauaaauuugccauacccaaccggcgccgagacgaucugcagcuuggguccagcggauuccugcagucuucaaauuauaagauugacaucaguagcuccucuugccaguuguacuacucgcucccucugguuaacgugaccaucaauaacuucaauccaagcuccuggaacagaagguauggcuuugguucauucaauuuaaguucuuacgaugucguguauagcgaccacugcuuuuccgucaacucagauuucugucccugcgcugacccgagcgugguuaauucuugugccaaauccaagccucccagugcgauuugcccagcagggacaaaauaccggcauugugaucuggacacuacccuauaugugaagaacuggugccguuguagcugccucccugaccccaucucuacauacuccccaaauaccuguccccaaaagaagguagucgugggaauuggcgagcacugcccuggccuggggauaaacgaagagaaguguggaacucagcuuaaucauucaaguugcuuuugcagcccagaugccuucuuggguuggucguuugacuccuguaucucuaacaaucgcugcaacauuuucagcaacuuuaucuucaauggcaucaacucagggacgacauguaguaaugaucugcucuauuccaacaccgaaauuucuacuggaguuugcgugaauuacgaccuguacggcauaaccggucaggggaucuuuaaagaggucagcgcugccuauuacaacaauuggcagaaccuucuguaugauuccaauggcaacauuaucggauucaaggacuuuuugacaaauaaaaccuacacuauucucccguguuauucaggcagagugagcgcagcuuucuaccaaaacaguucuucccccgcccuguuauauaggaaucugaagugcagcuacguacuaaacaauaucucguucauaucacagccuuuuuacuucgauucuuaucucgggugugugcugaacgcgguuaaccuuacaaguuacuccgucagcucuugcgacuugcggaugggaagcgguuuuuguaucgauuaugcccugccauccucacgacgcaaaagaaggggcauuaguagccccuaccgguucgugacguuugaaccuuucaaugugucuuuugucaacgacuccguugagaccguagggggacucuucgagauccagauuccaacuaauuuuacaaucgcaggccacgaagaguucauacaaaccucaagucccaaggugacaauugauugcagcgcuuuuguguguuccaacuaugccgcuugccacgaccuguuaucugaauacgguacuuucugcgauaauaucaacucgauucugaaugaggucaacgaccuuuuggacaucacccagcuccagguggccaaugcacugaugcaggggguuacgcuaagcucaaaccugaauaccaaccuccauuccgauguggacaauauagauuucaagagucugcuuggcuguuugggaucucaaugcggcagcuccucacgcucucuguuagaagaccuccuguuuaacaaagucaaacuuagcgaugugggguucguugaggccuauaauaacuguacaggagguagugagaucagagaccuguugugcgugcaguccuuuaauggcauuaaaguacucccgccuauccugagcgaaacucagauuucuggguacaccacagcugcgacugucgcagccauguucccacccuggucagcugccgcaggagugccuuuuucccuaaacgugcaguacaggaucaacggccugggugucaccauggauguucucaauaagaaccaaaaacugauagccaaugcuuucaacaaggcccuuuugaguauucagaauggguuuacggcaacaaacagcgcgcuggcuaagauccagucggugguaaaugccaacgcacaggccuuaaauucucuccugcaacagcuuuucaacaaauuuggcgcuaucuccagcucacugcaggagauucuaagucgucucgacaaucuggaagcccaggugcaaaucgaucgguugauuaacggacgacugaccgcauuaaaugcuuaugucucucagcagcucuccgacauaacucugaucaaggccggcgcgagcagagccauugagaaagugaacgaauguguuaagucacaaagucccaggaucaauuucugcgggaacggaaaccacauucuuagccuggugcagaaugcuccauacggcuugcucuuuauccauuucuccuauaaaccuacaucuuuuaagaccguccuggugagccccggucuaugucuguccggggaucgcggaauagcaccaaagcagggcuacuucaucaaacagaacgacucauggauguucacugguucuaguuauuacuauccggagccuauuucggauaagaauguuguguuuaugaacagcugcuccgucaauuucaccaaagcccccuuuaucuaccuuaacaauucuauuccaaaccucucagacuucgaggcugaacugagcuugugguuuaagaaucacacauccaucgcccccaaccugacguucaauagucauauaaacgcaaccuuuuuagaccucuacuaugagaugaauguaauucaagaaucuaucaaaagccugaacucauccuucaucaaucuuaaggagauuggcacuuacgagauguaugugaaauggccuugguacauauggcuguugaucguuauucucuuuaucauuuuccugaugauccuauuuuucauauguugcuguacagggugcggaagugcgugcuuuagcaagugucacaacugcugugaugaauauggcgggcacaacgacuucgugaucaaggccucucaugaugacugaggacuaguuauaagacugacuagcccgaugggccucccaacgggcccuccuccccuccuugcaccgagauuaauaaaaaaaaaaaaaaaaaaaaaaaaaaaaaaaaaaaaaaaaaaaaaaaaaaaaaaaaaaaaaaaaugcaucccccccccccccccccccccccccccccccaaaggcucuuuucagagccaccagaauu

SEQ ID NO: 15190 - RNA, 4273 nt, Artificial Sequence
  HCoV/HKU1/N5__Q0ZME7.1 spike protein mRNA human (1-1351)(N1067P_L1068P)
aggagaaagcuuaccauguuccugaucauuuuuauacuccccaccacacuugccgugaucggcgacuucaacugcacuaauagcuuuauuaacgauuacaauaagacgaucccuagaauuuccgaggacgucguugaugugucucugggguugggaaccuauuacguauuaaacaggguguaucugaauacaacucuacucuucaccgguuacuuuccaaaaucaggcgcuaacuuccgggaccuggcacuuaaggggaguaucuaucugagcacauugugguacaaaccgcccuuucucuccgauuucaauaacggaauauuuucuaaggucaaaaauaccaagcuguaugugaacaauacucuguacucggaguucucaacaaucguuauuggcagcguguuugucaacaccaguuacacgaucgugguacagccucacaaugguauucucgaaaucacugccugucaauauaccaugugcgaauacccacauacaguuuguaaguccaaagggucuauacgcaacgagagcuggcacauugacuccucagaacccuuaugccuguucaagaaaaauuuuacuuauaacgugagugcggauuggcuuuacuuccauuucuaucaggagcgaggagucuuuuacgcuuauuacgccgacgugggcaugccuaccacauucuuguuuagccuguaccuaggcaccauccucucucacuauuacgugaugccacugacguguaacgcaauuuccucaaauacugauaacgagacacuugaauauugggucacuccccugagccguagacaguacuugcucaauuucgacgagcaugggguuaucaccaacgccguggauugcaguucuuccuuucugagcgaaauccaguguaagacacaaucguucgcuccuaauaccggaguauaugacuuaucugguuuuacggugaaaccagucgcaaccguguacaggcggauuccgaaccugcccgauugcgacauagacaauuggcucaacaauguuuccgugccuucaccacuuaacugggagcgcagaaucuucaguaauuguaacuuuaaucugagcacauugcuaaggcugguccacguggauuccuucucuugcaacaaucucgacaagagcaagauuuuuggcucauguuucaacaguaucacuguagauaaauuugccauacccaaccggcgccgagacgaucugcagcuuggguccagcggauuccugcagucuucaaauuauaagauugacaucaguagcuccucuugccaguuguacuacucgcucccucugguuaacgugaccaucaauaacuucaauccaagcuccuggaacagaagguauggcuuugguucauucaauuuaaguucuuacgaugucguguauagcgaccacugcuuuuccgucaacucagauuucugucccugcgcugacccgagcgugguuaauucuugugccaaauccaagccucccagugcgauuugcccagcagggacaaaauaccggcauugugaucuggacacuacccuauaugugaagaacuggugccguuguagcugccucccugaccccaucucuacauacuccccaaauaccuguccccaaaagaagguagucgugggaauuggcgagcacugcccuggccuggggauaaacgaagagaaguguggaacucagcuuaaucauucaaguugcuuuugcagcccagaugccuucuuggguuggucguuugacuccuguaucucuaacaaucgcugcaacauuuucagcaacuuuaucuucaauggcaucaacucagggacgacauguaguaaugaucugcucuauuccaacaccgaaauuucuacuggaguuugcgugaauuacgaccuguacggcauaaccggucaggggaucuuuaaagaggucagcgcugccuauuacaacaauuggcagaaccuucuguaugauuccaauggcaacauuaucggauucaaggacuuuuugacaaauaaaaccuacacuauucucccguguuauucaggcagagugagcgcagcuuucuaccaaaacaguucuucccccgcccuguuauauaggaaucugaagugcagcuacguacuaaacaauaucucguucauaucacagccuuuuuacuucgauucuuaucucgggugugugcugaacgcgguuaaccuuacaaguuacuccgucagcucuugcgacuugcggaugggaagcgguuuuuguaucgauuaugcccugccauccucacgacgcaaaagaaggggcauuaguagccccuaccgguucgugacguuugaaccuuucaaugugucuuuugucaacgacuccguugagaccguagggggacucuucgagauccagauuccaacuaauuuuacaaucgcaggccacgaagaguucauacaaaccucaagucccaaggugacaauugauugcagcgcuuuuguguguuccaacuaugccgcuugccacgaccuguuaucugaauacgguacuuucugcgauaauaucaacucgauucugaaugaggucaacgaccuuuuggacaucacccagcuccagguggccaaugcacugaugcaggggguuacgcuaagcucaaaccugaauaccaaccuccauuccgauguggacaauauagauuucaagagucugcuuggcuguuugggaucucaaugcggcagcuccucacgcucucuguuagaagaccuccuguuuaacaaagucaaacuuagcgaugugggguucguugaggccuauaauaacuguacaggagguagugagaucagagaccuguugugcgugcaguccuuuaauggcauuaaaguacucccgccuauccugagcgaaacucagauuucuggguacaccacagcugcgacugucgcagccauguucccacccuggucagcugccgcaggagugccuuuuucccuaaacgugcaguacaggaucaacggccugggugucaccauggauguucucaauaagaaccaaaaacugauagccaaugcuuucaacaaggcccuuuugaguauucagaauggguuuacggcaacaaacagcgcgcuggcuaagauccagucggugguaaaugccaacgcacaggccuuaaauucucuccugcaacagcuuuucaacaaauuuggcgcuaucuccagcucacugcaggagauucuaagucgucucgaucccccagaagcccaggugcaaaucgaccggcugauuaauggacgauugaccgcacugaacgcuuaugucucucagcaguuauccgacauaacucucaucaaggccggcgcgagcagagccauugagaaagugaaugaauguguuaagucacaaaguccuaggaucaacuucugcgggaauggaaaccacauucugagccuugugcagaacgcucccuacggccuguuguuuauccauuucuccuauaaaccaacaucuuuuaagaccguccucgugagcccgggucugugucuauccggggaucgcggaauagcaccuaagcagggcuacuucaucaaacagaaugacucauggauguucacugguucuaguuauuacuaucccgagccaauuucggauaagaacguuguguuuaugaauagcugcuccgucaacuucaccaaagcccccuuuaucuaccugaauaacucuauuccuaaucuuucagacuucgaggcugaacucagccugugguuuaagaaccacacauccaucgccccaaauuugacguucaacagucauauaaaugcaaccuuucuggacuuauacuaugagaugaacguaauucaagaaucuaucaaaagccucaauucauccuucaucaaccugaaggagauuggcacuuacgagauguaugugaaauggcccugguacauauggcuucugaucguuauuuuguuuaucauuuuccucaugauccuguuuuucauauguugcuguacagggugcggaagugcgugcuuuagcaagugucacaauugcugugaugaauauggcgggcacaacgacuucgugaucaaggccucucaugaugacugaggacuaguuauaagacugacuagcccgaugggccucccaacgggcccuccuccccuccuugcaccgagauuaauaaaaaaaaaaaaaaaaaaaaaaaaaaaaaaaaaaaaaaaaaaaaaaaaaaaaaaaaaaaaaaaaugcaucccccccccccccccccccccccccccccccaaaggcucuuuucagagccaccagaauu

SEQ ID NO: 15191 - RNA, 4048 nt, Artificial Sequence
  HCoV/HKU1/N5__Q0ZME7.1 spike protein mRNA human (variant)
aggagaaagcuuaccauguuccugaucauuuuuauacuccccaccacacuugccgugaucggcgacuucaacugcacuaauagcuuuauuaacgauuacaauaagacgaucccuagaauuuccgaggacgucguugaugugucucugggguugggaaccuauuacguauuaaacaggguguaucugaauacaacucuacucuucaccgguuacuuuccaaaaucaggcgcuaacuuccgggaccuggcacuuaaggggaguaucuaucugagcacauugugguacaaaccgcccuuucucuccgauuucaauaacggaauauuuucuaaggucaaaaauaccaagcuguaugugaacaauacucuguacucggaguucucaacaaucguuauuggcagcguguuugucaacaccaguuacacgaucgugguacagccucacaaugguauucucgaaaucacugccugucaauauaccaugugcgaauacccacauacaguuuguaaguccaaagggucuauacgcaacgagagcuggcacauugacuccucagaacccuuaugccuguucaagaaaaauuuuacuuauaacgugagugcggauuggcuuuacuuccauuucuaucaggagcgaggagucuuuuacgcuuauuacgccgacgugggcaugccuaccacauucuuguuuagccuguaccuaggcaccauccucucucacuauuacgugaugccacugacguguaacgcaauuuccucaaauacugauaacgagacacuugaauauugggucacuccccugagccguagacaguacuugcucaauuucgacgagcaugggguuaucaccaacgccguggauugcaguucuuccuuucugagcgaaauccaguguaagacacaaucguucgcuccuaauaccggaguauaugacuuaucugguuuuacggugaaaccagucgcaaccguguacaggcggauuccgaaccugcccgauugcgacauagacaauuggcucaacaauguuuccgugccuucaccacuuaacugggagcgcagaaucuucaguaauuguaacuuuaaucugagcacauugcuaaggcugguccacguggauuccuucucuugcaacaaucucgacaagagcaagauuuuuggcucauguuucaacaguaucacuguagauaaauuugccauacccaaccggcgccgagacgaucugcagcuuggguccagcggauuccugcagucuucaaauuauaagauugacaucaguagcuccucuugccaguuguacuacucgcucccucugguuaacgugaccaucaauaacuucaauccaagcuccuggaacagaagguauggcuuugguucauucaauuuaaguucuuacgaugucguguauagcgaccacugcuuuuccgucaacucagauuucugucccugcgcugacccgagcgugguuaauucuugugccaaauccaagccucccagugcgauuugcccagcagggacaaaauaccggcauugugaucuggacacuacccuauaugugaagaacuggugccguuguagcugccucccugaccccaucucuacauacuccccaaauaccuguccccagaaaaagguagucgugggaauuggcgagcacugcccuggccuggggauaaacgaagagaaguguggaacucaacuuaaucauucaaguugcuuuugcagcccagaugccuucuuggguuggucguuugacuccuguaucucuaacaaucgcugcaacauuuucagcaacuuuaucuucaauggcaucaacucagggacgacauguaguaaugaucugcucuauuccaacaccgaaauuucuacuggaguuugcgugaauuacgaccuguacggcauaaccggucaggggaucuuuaaagaggucagcgcugccuauuacaacaauuggcagaaccuucuguaugauuccaauggcaacauuaucggauucaaggacuuuuugacaaauaaaaccuacacuauucucccguguuauucaggcagagugagcgcagcuuucuaccaaaacaguucuucccccgcccuguuauauaggaaucugaagugcagcuacguacuaaacaauaucucguucauaucacagccuuuuuacuucgauucuuaucucgggugugugcugaacgcgguuaaccuuacaaguuacuccgucagcucuugcgacuugcggaugggaagcgguuuuuguaucgauuaugcccugccauccucaggcgggaguggaagcggcauuucuucccccuaccgauucgugacguuugaaccuuucaaugugucauuugucaacgacaguguugagaccguggguggccucuucgagauccagauuccaacuaauuuuacaaucgcagggcacgaagaguucauacaaaccagcucccccaaagugacaauugauugcucugcuuuuguauguucgaacuaugccgcuugccacgaccuguuaagcgaauacggaacuuucugcgauaauaucaacucaauucugaaugaggucaacgaccuuuuggacaucacccagcuccagguggccaaugcacugaugcagggcguuacgcuauccaguaaccugaauaccaaccuccauucugauguggacaauauagauuucaagagccugcuuggguguuugggaucccaaugcgguucaucuagccgcagucuguuagaagaccuccuguuuaacaaggucaaacuuuccgaugugggcuucguugaggccuauaauaacuguacagggggaagcgagaucagagaccuguugugcgugcagucuuuuaauggcauuaagguacucccgccuauccugucagaaacucagauuuccgguuacaccacagcugcgacugucgcagccauguucccacccuggagugcugccgcaggggugccuuuuagccuaaacgugcaguacaggaucaacggccugggagucaccauggauguucucaauaaaaaccaaaagcugauagccaaugcuuucaacaaagcccuuuugucgauucagaauggcuuuacggcaacaaacucugcgcuggcuaagauccaguccgugguaaaugccaacgcacaggccuuaaauagccuccugcaacagcuuuucaacaaguuuggggcuaucucaaguucucugcaggagauucuaucccggcucgaucccccagaagcccaggugcaaaucgaccgccugauuaauggaagauugaccgcacugaacgcuuaugucagccagcaguuaucagacauaacucucaucaaagccggcgcgaguagggccauugagaaggugaaugaauguguuaaaagccaauccccucguaucaacuucugcgguaaugggaaccacauucugucucuugugcagaacgcucccuacggacuguuguuuauccauuucagcuauaagccaacauccuuuaaaaccguccucgugucaccgggccugugucuaucuggugaucggggcauagcaccuaagcagggguacuucaucaagcagaaugacaguuggauguucacuggaucgagcuauuacuaucccgagccaauuuccgauaaaaacguuguguuuaugaacucuugcucagucaauuucaccaaggcccccuuuaucuaccugaauaacagcauuccuaaucuuuccgacuucgaggcugaacucagucugugguuuaaaaaccacacaucuaucgccccaaauuugacguucaacagccauauaaaugcaaccuuucuggacuuauacuaugagaugaacguaauucaagaaucaaucaagucccucaauugaggacuaguuauaagacugacuagcccgaugggccucccaacgggcccuccuccccuccuugcaccgagauuaauaaaaaaaaaaaaaaaaaaaaaaaaaaaaaaaaaaaaaaaaaaaaaaaaaaaaaaaaaaaaaaaaugcaucccccccccccccccccccccccccccccccaaaggcucuuuucagagccaccagaauu

SEQ ID NO: 15192 - RNA, 4129 nt, Artificial Sequence
  HCoV/HKU1/N5__Q0ZME7.1 spike protein mRNA human (variant)
aggagaaagcuuaccauguuccugaucauuuuuauacuccccaccacacuugccgugaucggcgacuucaacugcacuaauagcuuuauuaacgauuacaauaagacgaucccuagaauuuccgaggacgucguugaugugucucugggguugggaaccuauuacguauuaaacaggguguaucugaauacaacucuacucuucaccgguuacuuuccaaaaucaggcgcuaacuuccgggaccuggcacuuaaggggaguaucuaucugagcacauugugguacaaaccgcccuuucucuccgauuucaauaacggaauauuuucuaaggucaaaaauaccaagcuguaugugaacaauacucuguacucggaguucucaacaaucguuauuggcagcguguuugucaacaccaguuacacgaucgugguacagccucacaaugguauucucgaaaucacugccugucaauauaccaugugcgaauacccacauacaguuuguaaguccaaagggucuauacgcaacgagagcuggcacauugacuccucagaacccuuaugccuguucaagaaaaauuuuacuuauaacgugagugcggauuggcuuuacuuccauuucuaucaggagcgaggagucuuuuacgcuuauuacgccgacgugggcaugccuaccacauucuuguuuagccuguaccuaggcaccauccucucucacuauuacgugaugccacugacguguaacgcaauuuccucaaauacugauaacgagacacuugaauauugggucacuccccugagccguagacaguacuugcucaauuucgacgagcaugggguuaucaccaacgccguggauugcaguucuuccuuucugagcgaaauccaguguaagacacaaucguucgcuccuaauaccggaguauaugacuuaucugguuuuacggugaaaccagucgcaaccguguacaggcggauuccgaaccugcccgauugcgacauagacaauuggcucaacaauguuuccgugccuucaccacuuaacugggagcgcagaaucuucaguaauuguaacuuuaaucugagcacauugcuaaggcugguccacguggauuccuucucuugcaacaaucucgacaagagcaagauuuuuggcucauguuucaacaguaucacuguagauaaauuugccauacccaaccggcgccgagacgaucugcagcuuggguccagcggauuccugcagucuucaaauuauaagauugacaucaguagcuccucuugccaguuguacuacucgcucccucugguuaacgugaccaucaauaacuucaauccaagcuccuggaacagaagguauggcuuugguucauucaauuuaaguucuuacgaugucguguauagcgaccacugcuuuuccgucaacucagauuucugucccugcgcugacccgagcgugguuaauucuugugccaaauccaagccucccagugcgauuugcccagcagggacaaaauaccggcauugugaucuggacacuacccuauaugugaagaacuggugccguuguagcugccucccugaccccaucucuacauacuccccaaauaccuguccccagaaaaagguagucgugggaauuggcgagcacugcccuggccuggggauaaacgaagagaaguguggaacucaacuuaaucauucaaguugcuuuugcagcccagaugccuucuuggguuggucguuugacuccuguaucucuaacaaucgcugcaacauuuucagcaacuuuaucuucaauggcaucaacucagggacgacauguaguaaugaucugcucuauuccaacaccgaaauuucuacuggaguuugcgugaauuacgaccuguacggcauaaccggucaggggaucuuuaaagaggucagcgcugccuauuacaacaauuggcagaaccuucuguaugauuccaauggcaacauuaucggauucaaggacuuuuugacaaauaaaaccuacacuauucucccguguuauucaggcagagugagcgcagcuuucuaccaaaacaguucuucccccgcccuguuauauaggaaucugaagugcagcuacguacuaaacaauaucucguucauaucacagccuuuuuacuucgauucuuaucucgggugugugcugaacgcgguuaaccuuacaaguuacuccgucagcucuugcgacuugcggaugggaagcgguuuuuguaucgauuaugcccugccauccucaggcgggaguggaagcggcauuucuucccccuaccgauucgugacguuugaaccuuucaaugugucauuugucaacgacaguguugagaccguggguggccucuucgagauccagauuccaacuaauuuuacaaucgcagggcacgaagaguucauacaaaccagcucccccaaagugacaauugauugcucugcuuuuguauguucgaacuaugccgcuugccacgaccuguuaagcgaauacggaacuuucugcgauaauaucaacucaauucugaaugaggucaacgaccuuuuggacaucacccagcuccagguggccaaugcacugaugcagggcguuacgcuauccaguaaccugaauaccaaccuccauucugauguggacaauauagauuucaagagccugcuuggguguuugggaucccaaugcgguucaucuagccgcagucuguuagaagaccuccuguuuaacaaggucaaacuuuccgaugugggcuucguugaggccuauaauaacuguacagggggaagcgagaucagagaccuguugugcgugcagucuuuuaauggcauuaagguacucccgccuauccugucagaaacucagauuuccgguuacaccacagcugcgacugucgcagccauguucccacccuggagugcugccgcaggggugccuuuuagccuaaacgugcaguacaggaucaacggccugggagucaccauggauguucucaauaaaaaccaaaagcugauagccaaugcuuucaacaaagcccuuuugucgauucagaauggcuuuacggcaacaaacucugcgcuggcuaagauccaguccgugguaaaugccaacgcacaggccuuaaauagccuccugcaacagcuuuucaacaaguuuggggcuaucucaaguucucugcaggagauucuaucccggcucgaucccccagaagcccaggugcaaaucgaccgccugauuaauggaagauugaccgcacugaacgcuuaugucagccagcaguuaucagacauaacucucaucaaagccggcgcgaguagggccauugagaaggugaaugaauguguuaaaagccaauccccucguaucaacuucugcgguaaugggaaccacauucugucucuugugcagaacgcucccuacggacuguuguuuauccauuucagcuauaagccaacauccuuuaaaaccguccucgugucaccgggccugugucuaucuggugaucggggcauagcaccuaagcagggguacuucaucaagcagaaugacaguuggauguucacuggaucgagcuauuacuaucccgagccaauuuccgauaaaaacguuguguuuaugaacucuugcucagucaauuucaccaaggcccccuuuaucuaccugaauaacagcauuccuaaucuuuccgacuucgaggcugaacucagucugugguuuaaaaaccacacaucuaucgccccaaauuugacguucaacagccauauaaaugcaaccuuucuggacuuauacuaugagaugaacguaauucaagaaucaaucaagucccucaauggcggguacauccccgaggcgccucgagauggacaggccuaugugagaaaagacggcgaguggguucugcuuaguacuuucugaggacuaguuauaagacugacuagcccgaugggccucccaacgggcccuccuccccuccuugcaccgagauuaauaaaaaaaaaaaaaaaaaaaaaaaaaaaaaaaaaaaaaaaaaaaaaaaaaaaaaaaaaaaaaaaaugcaucccccccccccccccccccccccccccccccaaaggcucuuuucagagccaccagaauu

SEQ ID NO: 15193 - RNA, 3733 nt, Artificial Sequence
  HCoV/229E/BN1/GER/2015__AOG74783.1 spike protein mRNA human (1-1171)
aggagaaagcuuaccauguucgugcugcucgucgccuacgcacuucugcacaucgcuggcugccagaccacaaacgggacuaauacgagccauuccguuuguaacggaugcgugggucacucugagaauguauuugccguggaaucaggcggguauauucccaguaacuucgcguuuaauaacugguucuuguuaaccaauacaagcuccgucguggacggaguugugagaucuuuucaaccucugcuacucaacugucuguggucggucucaggcagccaguucacuaccgguuuuguguacuucaaugggacaggaaggggcgcuugcaagggcuuuuauaguaacgccuccucugauguaauacgguacaauaucaacuucgaggaaaaucuucgccgagggaccauucuguuuaaaacuagcuauggagcaguuguguucuacuguacaaacaauaccuuggucuccggugacgcccauaucccaucaggcacggugcucgggaacuuuuauugcuucgugaacacuaccauuggaaaugagacaacuagcgcuuucgucggcgcacugccgaagaccguucgugaauuugugaucagcagaacaggucacuucuacauaaacggguacagguauuuuucucugggagauguagaggccgugaauuucaacgucaccaaugcugccacgacuguguguacaguugcgcucgcauccuacgccgacguguuagucaacgugucacagaccgcuaucgccaauauuaucuauugcaacagcguaauuaaucggcugcgcugugaucagcuuaguuuugacguucccgauggcuucuacucuacuuccccuauccaaccaguggaguugcccgucagcauagugucgcugccugucuaucauaaacacacauuuauugugcuauacguuaacuucgaacacagaaggggcccagggaagugcuauaauugucggcccgcagugaucaacauuacccucgcuaauuuuaacgagacgaaaggaccucugugcguagacaccucucauuucacaacucaguuugucgauaaugugaaguuggcccgcugguccgcgucaaucaacaccgguaacugcccauucaguuuuggcaagguuaauaacuucgugaaauucgggagcgucuguuuuucccugaaggacaucccgggaggcugcgccaugcccauuauggcaaauuuggugaacucuaaaagccacaauauagguucacucuacguaaguugguccgauggggacgugaucacaggcguuccuaagccagucgaaggagugagcucuuucaugaacgugacucugaauaaauguaccaaguacaacauuuaugaugucucaggcguuggggugauccgaauaaguaaugacacauuuuuaaacggaauuaccuacacuagcacguccgguaaucugcucggcuucaaggacgugacaaacgggaccaucuauucuaucacucccugcaauccuccagaucagcuuguagucuaccagcaagcugugguuggagccaugcugucggagaacuuuaccagcuauggcuucuccaauguggucgagaugcccaaauuuuucuacgcuucaaacgguacauauaacuguaccgacgccguguugacuuacaguucuuuugggguuugcgcagauggcagcauuaucgccgugcagccgagaaauguauccuacgacucagucagcgcuauugugacagcgaaccuaucuauaccuuucaauuggacgaccuccgugcaggucgaauaucugcagaucacaaguacucccauuguuguggauuguagcaccuacguaugcaacggaaaugugaggugugucgagcuccugaagcaauauacaucugcaugcaaaacuaucgaagacgcccuucggaacuccgcuaugcuggagucagccgaugugagugaaauguugaccuuugacaagaaagcauucacgcucgccaauguuagcucguuuggcgauuacaaccuguccucugugaucccaaguuuaccucguucagggagucgcgucgcuggaagauccgccauugaggacauacuguucucuaagcuagugaccagcggucucggcacaguugaugcagacuauaaaaaguguacuaaggggcuguccaucgcggaccuugcuugcgcccaguacuauaauggaauuaugguguugcccggcgucgcagaugccgagaggauggcuauguacaccgguucacugaucgggggcauugcccucggaggccugacaagcgcagcuaguaucccauucucucuugccauacagucccggcugaacuacguagcguugcaaacugacgugcuccaggaaaaucagcgaauccuggccgcuagcuuuaacaaagcaaugaccaauauuguugaugccuucacgggggugaacgacgcuaucacacagaccucgcaagccuuacagacugucgcaacagcgcugaauaagauucaggaugugguaaaccagcaaggaaacucacuaaaucaucucaccucucagcugcgccagaacuuucaggccaucaguuccagcauacaagcuauuuaugacagacuugauaucauucaggccgaccaacagguggauagguugaucacuggccggcuggcagcucucaaugucuucguuucucacacccugacaaaauacacggaggugcgcgccagcagacaguuagcacagcagaaggugaacgaaugcgucaaaucccaaucaaagagguaugguuuuugugggaauggaacccacauauucagucuggugaacgccgcucccgagggccuuguuuuucuucauacuguacuccugccuacacaguacaaggacguggaagcguggagcggucuaugcgucgauggcaucaauggguaugugcugcgucagccaaaccucgcccuguacaaagagggaaauuauuaccggauuaccucucgaaucauguucgagccgaggauucccacaaucgcagacuuuguucagauagaaaacuguaaugugacuuucgucaacauuuccagaucagagcuucaaaccaucgugccugaauacaucgauguaaauaagacguugcaggagcugaguuauaaauuaccaaacuacacaguccccgaccucgugguugaacaguauaaucagaccauucugaaccuuacuagcgagaucuccacccuggagaauaagucugcugaauugaacuacacagugcaaaaacuccagacucugauugacaacauaaauucgacccuagucgaucugaaguggcucaaccgcguggagacauauaucaaguggccuugguggguuuggcugugcauuagcgugguccuuaucuuugugguaucaauguugcuguuauguugcuguuccacgggcugcuguggguucuucaguugcuuugccucuagcauucggggauguugcgaauccaccaaacucccauacuaugacguggagaagauccacauacagugaggacuaguuauaagacugacuagcccgaugggccucccaacgggcccuccuccccuccuugcaccgagauuaauaaaaaaaaaaaaaaaaaaaaaaaaaaaaaaaaaaaaaaaaaaaaaaaaaaaaaaaaaaaaaaaaugcaucccccccccccccccccccccccccccccccaaaggcucuuuucagagccaccagaauu

SEQ ID NO: 15194 - RNA, 3733 nt, Artificial Sequence
  HCoV/229E/BN1/GER/2015__AOG74783.1 spike protein mRNA human (1-1171)(I869P_I870P)
aggagaaagcuuaccauguucgugcugcucgucgccuacgcacuucugcacaucgcuggcugccagaccacaaacgggacuaauacgagccauuccguuuguaacggaugcgugggucacucugagaauguauuugccguggaaucaggcggguauauucccaguaacuucgcguuuaauaacugguucuuguuaaccaauacaagcuccgucguggacggaguugugagaucuuuucaaccucugcuacucaacugucuguggucggucucaggcagccaguucacuaccgguuuuguguacuucaaugggacaggaaggggcgcuugcaagggcuuuuauaguaacgccuccucugauguaauacgguacaauaucaacuucgaggaaaaucuucgccgagggaccauucuguuuaaaacuagcuauggagcaguuguguucuacuguacaaacaauaccuuggucuccggugacgcccauaucccaucaggcacggugcucgggaacuuuuauugcuucgugaacacuaccauuggaaaugagacaacuagcgcuuucgucggcgcacugccgaagaccguucgugaauuugugaucagcagaacaggucacuucuacauaaacggguacagguauuuuucucugggagauguagaggccgugaauuucaacgucaccaaugcugccacgacuguguguacaguugcgcucgcauccuacgccgacguguuagucaacgugucacagaccgcuaucgccaauauuaucuauugcaacagcguaauuaaucggcugcgcugugaucagcuuaguuuugacguucccgauggcuucuacucuacuuccccuauccaaccaguggaguugcccgucagcauagugucgcugccugucuaucauaaacacacauuuauugugcuauacguuaacuucgaacacagaaggggcccagggaagugcuauaauugucggcccgcagugaucaacauuacccucgcuaauuuuaacgagacgaaaggaccucugugcguagacaccucucauuucacaacucaguuugucgauaaugugaaguuggcccgcugguccgcgucaaucaacaccgguaacugcccauucaguuuuggcaagguuaauaacuucgugaaauucgggagcgucuguuuuucccugaaggacaucccgggaggcugcgccaugcccauuauggcaaauuuggugaacucuaaaagccacaauauagguucacucuacguaaguugguccgauggggacgugaucacaggcguuccuaagccagucgaaggagugagcucuuucaugaacgugacucugaauaaauguaccaaguacaacauuuaugaugucucaggcguuggggugauccgaauaaguaaugacacauuuuuaaacggaauuaccuacacuagcacguccgguaaucugcucggcuucaaggacgugacaaacgggaccaucuauucuaucacucccugcaauccuccagaucagcuuguagucuaccagcaagcugugguuggagccaugcugucggagaacuuuaccagcuauggcuucuccaauguggucgagaugcccaaauuuuucuacgcuucaaacgguacauauaacuguaccgacgccguguugacuuacaguucuuuugggguuugcgcagauggcagcauuaucgccgugcagccgagaaauguauccuacgacucagucagcgcuauugugacagcgaaccuaucuauaccuuucaauuggacgaccuccgugcaggucgaauaucugcagaucacaaguacucccauuguuguggauuguagcaccuacguaugcaacggaaaugugaggugugucgagcuccugaagcaauauacaucugcaugcaaaacuaucgaagacgcccuucggaacuccgcuaugcuggagucagccgaugugagugaaauguugaccuuugacaagaaagcauucacgcucgccaauguuagcucguuuggcgauuacaaccuguccucugugaucccaaguuuaccucguucagggagucgcgucgcuggaagauccgccauugaggacauacuguucucuaagcuagugaccagcggucucggcacaguugaugcagacuauaaaaaguguacuaaggggcuguccaucgcggaccuugcuugcgcccaguacuauaauggaauuaugguguugcccggcgucgcagaugccgagaggauggcuauguacaccgguucacugaucgggggcauugcccucggaggccugacaagcgcagcuaguaucccauucucucuugccauacagucccggcugaacuacguagcguugcaaacugacgugcuccaggaaaaucagcgaauccuggccgcuagcuuuaacaaagcaaugaccaauauuguugaugccuucacgggggugaacgacgcuaucacacagaccucgcaagccuuacagacugucgcaacagcgcugaauaagauucaggaugugguaaaccagcaaggaaacucacuaaaucaucucaccucucagcugcgccagaacuuucaggccaucaguuccagcauacaagcuauuuaugacagacuugaucccccucaggccgaccaacagguggauagguugaucacuggccggcuggcagcucucaaugucuucguuucucacacccugacaaaauacacggaggugcgcgccagcagacaguuagcacagcagaaggugaacgaaugcgucaaaucccaaucaaagagguaugguuuuugugggaauggaacccacauuuucagucuggugaacgccgcuccagagggccuuguuuuucuucauacuguacuccugccgacacaguacaaggacguggaagcguggagcggucuaugcgucgauggcaucaauggguaugugcugcgucagcccaaccucgcccuguacaaagagggaaauuauuaccggauaaccucucgaaucauguucgagccuaggauuccaacaaucgcagacuuuguucagauugaaaacuguaaugugacuuucgucaacaucuccagaucagagcuucaaaccauagugcccgaauacauugauguaaauaagacguugcaggagcugaguuauaaauuaccuaacuacacagucccagaccucgugguugaacaguauaaucagaccauccugaaccuuacuagcgagaucuccacccuggagaauaagucugcugaauugaacuacacagugcaaaaacuccagacucugauugacaacaucaauucgacccuagucgaucugaaguggcucaaccgcguggagacauauauuaaguggcccugguggguuuggcugugcauaagcgugguccuuaucuuugugguaucaauguugcuguuauguugcuguuccacgggcugcuguggguucuucaguugcuuugccucuagcauucggggauguugcgaauccaccaaacucccguacuaugacguggagaagauccacauucagugaggacuaguuauaagacugacuagcccgaugggccucccaacgggcccuccuccccuccuugcaccgagauuaauaaaaaaaaaaaaaaaaaaaaaaaaaaaaaaaaaaaaaaaaaaaaaaaaaaaaaaaaaaaaaaaaugcaucccccccccccccccccccccccccccccccaaaggcucuuuucagagccaccagaauu

SEQ ID NO: 15195 - RNA, 3544 nt, Artificial Sequence
  HCoV/229E/BN1/GER/2015__AOG74783.1 spike protein mRNA human (variant)
aggagaaagcuuaccauguucgugcugcucgucgccuacgcacuucugcacaucgcuggcugccagaccacaaacgggacuaauacgagccauuccguuuguaacggaugcgugggucacucugagaauguauuugccguggaaucaggcggguauauucccaguaacuucgcguuuaauaacugguucuuguuaaccaauacaagcuccgucguggacggaguugugagaucuuuucaaccucugcuacucaacugucuguggucggucucaggcagccaguucacuaccgguuuuguguacuucaaugggacaggaaggggcgcuugcaagggcuuuuauaguaacgccuccucugauguaauacgguacaauaucaacuucgaggaaaaucuucgccgagggaccauucuguuuaaaacuagcuauggagcaguuguguucuacuguacaaacaauaccuuggucuccggugacgcccauaucccaucaggcacggugcucgggaacuuuuauugcuucgugaacacuaccauuggaaaugagacaacuagcgcuuucgucggcgcacugccgaagaccguucgugaauuugugaucagcagaacaggucacuucuacauaaacggguacagguauuuuucucugggagauguagaggccgugaauuucaacgucaccaaugcugccacgacuguguguacaguugcgcucgcauccuacgccgacguguuagucaacgugucacagaccgcuaucgccaauauuaucuauugcaacagcguaauuaaucggcugcgcugugaucagcuuaguuuugacguucccgauggcuucuacucuacuuccccuauccaaccaguggaguugcccgucagcauagugucgcugccugucuaucauaaacacacauuuauugugcuauacguuaacuucgaacacagaaggggcccagggaagugcuauaauugucggcccgcagugaucaacauuacccucgcuaauuuuaacgagacgaaaggaccucugugcguagacaccucucauuucacaacucaguuugucgauaaugugaaguuggcccgcugguccgcgucaaucaacaccgguaacugcccauucaguuuuggcaagguuaauaacuucgugaaauucgggagcgucuguuuuucccugaaggacaucccgggaggcugcgccaugcccauuauggcaaauuuggugaacucuaaaagccacaauauagguucacucuacguaaguugguccgauggggacgugaucacaggcguuccuaagccagucgaaggagugagcucuuucaugaacgugacucugaauaaauguaccaaguacaacauuuaugaugucucaggcguuggggugauccgaauaaguaaugacacauuuuuaaacggaauuaccuacacuagcacguccgguaaucugcucggcuucaaggacgugacaaacgggaccaucuauucuaucacucccugcaauccuccagaucagcuuguagucuaccagcaagcugugguuggagccaugcugucggagaacuuuaccagcuauggcuucuccaauguggucgagaugcccaaauuuuucuacgcuucaaacgguacauauaacuguaccgacgccguguugacuuacaguucuuuugggguuugcgcagauggcagcauuaucgccgugcagccgagaaauguauccuacgacucagucagcgcuauugugacagcgaaccuaucuauaccuuucaauuggacgaccuccgugcaggucgaauaucugcagaucacaaguacucccauuguuguggauuguagcaccuacguaugcaacggaaaugugaggugugucgagcuccugaagcaauauacaucugcaugcaaaacuaucgaagacgcccuucggaacuccgcuaugcuggagucagccgaugugagugaaauguugaccuuugacaagaaagcauucacgcucgccaauguuagcucguuuggcgauuacaaccuguccucugugaucccaaguuuaccucguucagggagucgcgucgcuggaagauccgccauugaggacauacuguucucuaagcuagugaccagcggucucggcacaguugaugcagacuauaaaaaguguacuaaggggcuguccaucgcggaccuugcuugcgcccaguacuauaauggaauuaugguguugcccggcgucgcagaugccgagaggauggcuauguacaccgguucacugaucgggggcauugcccucggaggccugacaagcgcagcuaguaucccauucucucuugccauacagucccggcugaacuacguagcguugcaaacugacgugcuccaggaaaaucagcgaauccuggccgcuagcuuuaacaaagcaaugaccaauauuguugaugccuucacgggggugaacgacgcuaucacacagaccucgcaagccuuacagacugucgcaacagcgcugaauaagauucaggaugugguaaaccagcaaggaaacucacuaaaucaucucaccucucagcugcgccagaacuuucaggccaucaguuccagcauacaagcuauuuaugacagacuugaucccccucaggccgaccaacagguggauagguugaucacuggccggcuggcagcucucaaugucuucguuucucacacccugacaaaauacacggaggugcgcgccagcagacaguuagcacagcagaaggugaacgaaugcgucaaaucccaaucaaagagguaugguuuuugugggaauggaacccacauuuucagucuggugaacgccgcuccagagggccuuguuuuucuucauacuguacuccugccgacacaguacaaggacguggaagcguggagcggucuaugcgucgauggcaucaauggguaugugcugcgucagcccaaccucgcccuguacaaagagggaaauuauuaccggauaaccucucgaaucauguucgagccuaggauuccaacaaucgcagacuuuguucagauugaaaacuguaaugugacuuucgucaacaucuccagaucagagcuucaaaccauagugcccgaauacauugauguaaauaagacguugcaggagcugaguuauaaauuaccuaacuacacagucccagaccucgugguugaacaguauaaucagaccauccugaaccuuacuagcgagaucuccacccuggagaauaagucugcugaauugaacuacacagugcaaaaacuccagacucugauugacaacaucaauucgacccuagucgaucugaaguggcucaaccgcguggagacaugaggacuaguuauaagacugacuagcccgaugggccucccaacgggcccuccuccccuccuugcaccgagauuaauaaaaaaaaaaaaaaaaaaaaaaaaaaaaaaaaaaaaaaaaaaaaaaaaaaaaaaaaaaaaaaaaugcaucccccccccccccccccccccccccccccccaaaggcucuuuucagagccaccagaauu

SEQ ID NO: 15196 - RNA, 3625 nt, Artificial Sequence
  HCoV/229E/BN1/GER/2015__AOG74783.1 spike protein mRNA human (variant)
aggagaaagcuuaccauguucgugcugcucgucgccuacgcacuucugcacaucgcuggcugccagaccacaaacgggacuaauacgagccauuccguuuguaacggaugcgugggucacucugagaauguauuugccguggaaucaggcggguauauucccaguaacuucgcguuuaauaacugguucuuguuaaccaauacaagcuccgucguggacggaguugugagaucuuuucaaccucugcuacucaacugucuguggucggucucaggcagccaguucacuaccgguuuuguguacuucaaugggacaggaaggggcgcuugcaagggcuuuuauaguaacgccuccucugauguaauacgguacaauaucaacuucgaggaaaaucuucgccgagggaccauucuguuuaaaacuagcuauggagcaguuguguucuacuguacaaacaauaccuuggucuccggugacgcccauaucccaucaggcacggugcucgggaacuuuuauugcuucgugaacacuaccauuggaaaugagacaacuagcgcuuucgucggcgcacugccgaagaccguucgugaauuugugaucagcagaacaggucacuucuacauaaacggguacagguauuuuucucugggagauguagaggccgugaauuucaacgucaccaaugcugccacgacuguguguacaguugcgcucgcauccuacgccgacguguuagucaacgugucacagaccgcuaucgccaauauuaucuauugcaacagcguaauuaaucggcugcgcugugaucagcuuaguuuugacguucccgauggcuucuacucuacuuccccuauccaaccaguggaguugcccgucagcauagugucgcugccugucuaucauaaacacacauuuauugugcuauacguuaacuucgaacacagaaggggcccagggaagugcuauaauugucggcccgcagugaucaacauuacccucgcuaauuuuaacgagacgaaaggaccucugugcguagacaccucucauuucacaacucaguuugucgauaaugugaaguuggcccgcugguccgcgucaaucaacaccgguaacugcccauucaguuuuggcaagguuaauaacuucgugaaauucgggagcgucuguuuuucccugaaggacaucccgggaggcugcgccaugcccauuauggcaaauuuggugaacucuaaaagccacaauauagguucacucuacguaaguugguccgauggggacgugaucacaggcguuccuaagccagucgaaggagugagcucuuucaugaacgugacucugaauaaauguaccaaguacaacauuuaugaugucucaggcguuggggugauccgaauaaguaaugacacauuuuuaaacggaauuaccuacacuagcacguccgguaaucugcucggcuucaaggacgugacaaacgggaccaucuauucuaucacucccugcaauccuccagaucagcuuguagucuaccagcaagcugugguuggagccaugcugucggagaacuuuaccagcuauggcuucuccaauguggucgagaugcccaaauuuuucuacgcuucaaacgguacauauaacuguaccgacgccguguugacuuacaguucuuuugggguuugcgcagauggcagcauuaucgccgugcagccgagaaauguauccuacgacucagucagcgcuauugugacagcgaaccuaucuauaccuuucaauuggacgaccuccgugcaggucgaauaucugcagaucacaaguacucccauuguuguggauuguagcaccuacguaugcaacggaaaugugaggugugucgagcuccugaagcaauauacaucugcaugcaaaacuaucgaagacgcccuucggaacuccgcuaugcuggagucagccgaugugagugaaauguugaccuuugacaagaaagcauucacgcucgccaauguuagcucguuuggcgauuacaaccuguccucugugaucccaaguuuaccucguucagggagucgcgucgcuggaagauccgccauugaggacauacuguucucuaagcuagugaccagcggucucggcacaguugaugcagacuauaaaaaguguacuaaggggcuguccaucgcggaccuugcuugcgcccaguacuauaauggaauuaugguguugcccggcgucgcagaugccgagaggauggcuauguacaccgguucacugaucgggggcauugcccucggaggccugacaagcgcagcuaguaucccauucucucuugccauacagucccggcugaacuacguagcguugcaaacugacgugcuccaggaaaaucagcgaauccuggccgcuagcuuuaacaaagcaaugaccaauauuguugaugccuucacgggggugaacgacgcuaucacacagaccucgcaagccuuacagacugucgcaacagcgcugaauaagauucaggaugugguaaaccagcaaggaaacucacuaaaucaucucaccucucagcugcgccagaacuuucaggccaucaguuccagcauacaagcuauuuaugacagacuugaucccccucaggccgaccaacagguggauagguugaucacuggccggcuggcagcucucaaugucuucguuucucacacccugacaaaauacacggaggugcgcgccagcagacaguuagcacagcagaaggugaacgaaugcgucaaaucccaaucaaagagguaugguuuuugugggaauggaacccacauuuucagucuggugaacgccgcuccagagggccuuguuuuucuucauacuguacuccugccgacacaguacaaggacguggaagcguggagcggucuaugcgucgauggcaucaauggguaugugcugcgucagcccaaccucgcccuguacaaagagggaaauuauuaccggauaaccucucgaaucauguucgagccuaggauuccaacaaucgcagacuuuguucagauugaaaacuguaaugugacuuucgucaacaucuccagaucagagcuucaaaccauagugcccgaauacauugauguaaauaagacguugcaggagcugaguuauaaauuaccuaacuacacagucccagaccucgugguugaacaguauaaucagaccauccugaaccuuacuagcgagaucuccacccuggagaauaagucugcugaauugaacuacacagugcaaaaacuccagacucugauugacaacaucaauucgacccuagucgaucugaaguggcucaaccgcguggagacaggcggguauauucccgaagccccgcgggacggacaggccuacguuagaaaggauggcgagugggugcugcuuagcacguuuugaggacuaguuauaagacugacuagcccgaugggccucccaacgggcccuccuccccuccuugcaccgagauuaauaaaaaaaaaaaaaaaaaaaaaaaaaaaaaaaaaaaaaaaaaaaaaaaaaaaaaaaaaaaaaaaaugcaucccccccccccccccccccccccccccccccaaaggcucuuuucagagccaccagaauu

SEQ ID NO: 15197 - RNA, 4288 nt, Artificial Sequence
  HCoV/NL63/RPTEC/2004__AFV53148.1 spike protein mRNA human (1-1356)
aggagaaagcuuaccaugaagcuguuccucauccuucugguguugcccuuagccagcugcuuuuucaccuguaacuccaaugcuaaccugucuaugcuacagcucggcgucccugacaauucaaguacaauuguuacugggcugcuuccaacgcacugguuuugcgcaaaccaaagcaccuccguguacucugccaauggauucuuuuauauagauguagguaaccauagaucggcguucgcucugcacacaggcuacuaugacgccaaucaguacuauaucuacgugacuaacgagauuggguugaaugcaucagucacccucaaaaucuguaaguuuagcaggaacacaaccuucgauuuucugaguaaugccuccucuagcuucgacugcauugugaaccugcucuuuacugaacaguuaggagcuccgcugggcaucacaauauccggugagaccguucggcuucauuuguauaaugugacgcgcacuuucuacguccccgcagccuacaaacugaccaagcuaucagugaaauguuauuuuaacuacaguugcguauucagcguugugaaugcuacagucacugugaacgugaccacacacaacgggcgagucguuaauuauaccgugugugaugacugcaacggauacacggauaauaucuucucuguacagcaagacggccguauuccuaacggcuuuccauucaauaacugguuucuccugacuaauggguccacacuuguggauggagucucaagacuguaucagcccuugaggcucaccugucuguggccugugccagguuuaaagagcaguacuggcuucguuuacuuuaacgccacagggucugacgugaauugcaacggauaucagcauaauuccgucguggauguaaugcgguacaaccugaauuucagcgcgaacucgcucgacaaucuuaagucuggcguuaucguguuuaaaacccugcaguacgaugucuuguucuauuguuccaacucaaguagcggugugcuagacacgaccauucccuuugggccuuccucucaaccauacuauugcuucaucaacagcacaauaaauacuacccacgucucaacauuugugggcauucugccgcccacuguucgcgaaaucgugguagcaagaaccggacaguucuacauuaacggcuuuaaguauuucgaccucggguucaucgaggccgucaauuuuaacgugacaaccgcuagugccacugauuucuggacgguugcauuugcuacauucguggacguccuggugaauguauccgccaccaacauccagaaucuucuguacugcgauagcccuuuugaaaaauugcagugugagcaccuccaauucggacugcaggacgguuuuuauucugcgaacuucuuagaugacaaugugcugccagagacuuacguugcccuacccauuuacuaucagcauaccgauauaaacuuuacagcaaccgcuucauucggcgggaguugcuacgucuguaagccucaccaagugaauaucagccucaacggaaauacuuccgugugcgucaggacaucucauuuuucgauucgguauaucuacaaccgcguuaaaagcggcuccccaggugacucaaguuggcacauauaucugaagucugggacgugucccuucagcuuuuccaaacuuaauaacuuccagaaguucaagaccauuugcuuuucaacuguggaagugccgggcagcuguaacuucccuuuggaggccacauggcacuacaccucuuauacaaucguaggagcucuguacgucacuugguccgaaggcaauaguaucaccggggugcccuacccaguuagcgguauucgagaguuuucuaaccucgugcugaauaacugcacgaaauauaauaucuacgauuaugucggaaccggcauuauaagauccucaaaccagagucuugccgggggaaucacauacgugagcaauucgggcaaccuguuggguuucaagaauguuuccacugggaacauuuuuaucgugaccccuuguaaucagcccgaccaaguagcagucuaucagcagucuaucauuggcgccaugacagcugugaacgagagcagguacggacuccagaaucuguuacaacugccaaacuucuauuacgugucaaauggcgggaacaacugcacuaccgcggucaugacguacaguaauuuuggaauaugugcagaugguucccuaauccccguucggccucguaacucuagcgacaauggcauuuccgccaucauuacagcuaaccucucaaucccaagcaauuggaccacaagugugcagguagaauaucugcagauaacuucuaccccgaucguggucgacugcgccacuuacgugugcaacgggaauccccgcuguaaaaaccuuuugaagcaguauaccuccgcaugcaaaacaauugaggaugcccugagacucagcgcucaucuggaaacgaaugacguuucgucaauguuaaccuucgauucuaacgccuuuagucuggcaaaugugacuuccuucggagacuacaaccuuagcucugucuugccucaaaggaauauccggagcucccgaauugcgggccgcucagcucucgaggaucugcuauuuaguaaggugguuacaagcggucuggggaccguggacgucgauuauaagucuuguacaaaaggccucuccaucgccgaccuggcaugcgcccaguacuauaacggaauaaugguacuuccaggcguggcugaugccgaaagaauggcaauguacacugggucauugauuggaggcaugguucuggguggguuaaccagugcugccgcgauccccuucagccucgcccugcaggcuaggcuuaauuacguggcacugcagacggacgucuugcaagagaaccagaagauucucgccgcuuccuucaauaaagccaucaacaacauaguggcaucuuuuucgagcguaaaugaugcgaucacacagaccgccgaggcuauucacacugugaccaucgcccugaacaagauucaagacgucguuaaucagcagggaucagcacuaaaccaucugacaucccagcuccggcacaauuuccaagcuaucaguaacucuauacaggccauuuaugaucgccuggacagcauccaggcagaccagcaaguggauagacuuaucacuggcagguuggccgcucugaaugcguuugugucccaggucuuaaacaaauacaccgaagugcgugguucacggcgacucgcccagcagaagauuaaugaguguguuaagucucaaagcaacagauauggcuucugcgggaauggaacacauaucuuuaguauuguaaacuccgcaccugacggccugcuuuuccugcacacggugcuacucccaaccgauuacaaaaaugucaaggcuuggagcgggauauguguggacggaaucuauggcuacguucugaggcagcccaacuuggugcuguauucugauaauggugucuuucgcgugacuucacggauuauguuccagccgagauuaccuguacucuccgacuuuguccaaaucuacaacugcaacgugacauucguuaauauuaguaggguggaacugcacaccgucaucccagauuacguggacguuaacaaaacucuucaggaguuugcccagaaucugcccaaguaugugaaaccuaacuucgauuugacacccuuuaaucucaccuaccugaaccuaagcucggaacugaagcagcuugaggccaagacggcuucucucuuccaaacuaccgucgagcugcagggguugauagaccagaucaauuccacauauguggaucugaaauuacucaaccgcuucgaaaauuacauuaaguggccaugguggguauggcugaucauuagcgugguuuuugucgugcuucugucauugcucguguucuguugccugaguaccggauguugcggcugcuguaacugccuaacuucuuccaugcgagguuguugcgacuguggcagcacaaaacugccuuauuacgaguuugaaaagguccauguacagugaggacuaguuauaagacugacuagcccgaugggccucccaacgggcccuccuccccuccuugcaccgagauuaauaaaaaaaaaaaaaaaaaaaaaaaaaaaaaaaaaaaaaaaaaaaaaaaaaaaaaaaaaaaaaaaaugcaucccccccccccccccccccccccccccccccaaaggcucuuuucagagccaccagaauu

SEQ ID NO: 15198 - RNA, 4288 nt, Artificial Sequence
  HCoV/NL63/RPTEC/2004__AFV53148.1 spike protein mRNA human (1-1356)(S1052P_I1053P)
aggagaaagcuuaccaugaagcuguuccucauccuucugguguugcccuuagccagcugcuuuuucaccuguaacuccaaugcuaaccugucuaugcuacagcucggcgucccugacaauucaaguacaauuguuacugggcugcuuccaacgcacugguuuugcgcaaaccaaagcaccuccguguacucugccaauggauucuuuuauauagauguagguaaccauagaucggcguucgcucugcacacaggcuacuaugacgccaaucaguacuauaucuacgugacuaacgagauuggguugaaugcaucagucacccucaaaaucuguaaguuuagcaggaacacaaccuucgauuuucugaguaaugccuccucuagcuucgacugcauugugaaccugcucuuuacugaacaguuaggagcuccgcugggcaucacaauauccggugagaccguucggcuucauuuguauaaugugacgcgcacuuucuacguccccgcagccuacaaacugaccaagcuaucagugaaauguuauuuuaacuacaguugcguauucagcguugugaaugcuacagucacugugaacgugaccacacacaacgggcgagucguuaauuauaccgugugugaugacugcaacggauacacggauaauaucuucucuguacagcaagacggccguauuccuaacggcuuuccauucaauaacugguuucuccugacuaauggguccacacuuguggauggagucucaagacuguaucagcccuugaggcucaccugucuguggccugugccagguuuaaagagcaguacuggcuucguuuacuuuaacgccacagggucugacgugaauugcaacggauaucagcauaauuccgucguggauguaaugcgguacaaccugaauuucagcgcgaacucgcucgacaaucuuaagucuggcguuaucguguuuaaaacccugcaguacgaugucuuguucuauuguuccaacucaaguagcggugugcuagacacgaccauucccuuugggccuuccucucaaccauacuauugcuucaucaacagcacaauaaauacuacccacgucucaacauuugugggcauucugccgcccacuguucgcgaaaucgugguagcaagaaccggacaguucuacauuaacggcuuuaaguauuucgaccucggguucaucgaggccgucaauuuuaacgugacaaccgcuagugccacugauuucuggacgguugcauuugcuacauucguggacguccuggugaauguauccgccaccaacauccagaaucuucuguacugcgauagcccuuuugaaaaauugcagugugagcaccuccaauucggacugcaggacgguuuuuauucugcgaacuucuuagaugacaaugugcugccagagacuuacguugcccuacccauuuacuaucagcauaccgauauaaacuuuacagcaaccgcuucauucggcgggaguugcuacgucuguaagccucaccaagugaauaucagccucaacggaaauacuuccgugugcgucaggacaucucauuuuucgauucgguauaucuacaaccgcguuaaaagcggcuccccaggugacucaaguuggcacauauaucugaagucugggacgugucccuucagcuuuuccaaacuuaauaacuuccagaaguucaagaccauuugcuuuucaacuguggaagugccgggcagcuguaacuucccuuuggaggccacauggcacuacaccucuuauacaaucguaggagcucuguacgucacuugguccgaaggcaauaguaucaccggggugcccuacccaguuagcgguauucgagaguuuucuaaccucgugcugaauaacugcacgaaauauaauaucuacgauuaugucggaaccggcauuauaagauccucaaaccagagucuugccgggggaaucacauacgugagcaauucgggcaaccuguuggguuucaagaauguuuccacugggaacauuuuuaucgugaccccuuguaaucagcccgaccaaguagcagucuaucagcagucuaucauuggcgccaugacagcugugaacgagagcagguacggacuccagaaucuguuacaacugccaaacuucuauuacgugucaaauggcgggaacaacugcacuaccgcggucaugacguacaguaauuuuggaauaugugcagaugguucccuaauccccguucggccucguaacucuagcgacaauggcauuuccgccaucauuacagcuaaccucucaaucccaagcaauuggaccacuucggugcagguagaauaucugcagauaacaucuaccccgaucguggucgacugcgccacuuacgugugcaacgggaauccccgcuguaaaaaccuuuugaagcaguauaccuccgcaugcaaaacaauugaggaugcccugagacucagcgcucaucuggaaacgaaugacguuucgucaauguuaaccuucgauucuaacgccuuuagucuggcaaaugugacuuccuucggagacuacaaccuuagcucugucuugccucaaaggaauauccggagcucccgaauugcgggccgcucagcucucgaggaucugcuauuuaguaaggugguuacaagcggucuggggaccguggacgucgauuauaagucuuguacaaaaggccucuccaucgccgaccuggcaugcgcccaguacuauaacggaauaaugguacuuccaggcguggcugaugccgaaagaauggcaauguacacugggucauugauuggaggcaugguucuggguggguuaaccagugcugccgcgauccccuucagccucgcccugcaggcuaggcuuaauuacguggcacugcagacggacgucuugcaagagaaccagaagauucucgccgcuuccuucaauaaagccaucaacaacauaguggcaucuuuuucgagcguaaaugaugcgaucacacagaccgccgaggcuauucacacugugaccaucgcccugaacaagauucaagacgucguuaaucagcagggaucagcacuaaaccaucugacaucccagcuccggcacaauuuccaagcuaucaguaacucuauacaggccauuuaugaucgccuggacccuccacaggcagaccagcaaguggauagacuuaucacuggcagguuggccgcucugaaugcguuugugagccaggucuuaaacaaauacaccgaagugcgugguucccggcgacucgcccagcagaagaucaaugaguguguuaagucacaaucuaacagauauggcuucugcgggaauggaacacauauuuuuagcaucguaaacagugcacccgacggccugcuuuuccugcacacggugcuacucccgaccgauuacaaaaaugucaaggcuugguccgggauuuguguggacggaauauauggcuacguucugaggcagccuaacuuggugcuguauagcgauaauggugucuuucgcgugacuucucggaucauguuccagccaagauuacccguacucucagacuuuguccaaauuuacaacugcaacgugacauucguuaauaucuccaggguggaacugcacaccgucauuccugauuacguggacguuaacaaaacucuucaggaguuugcccagaaucugcccaaguaugugaaaccaaacuucgauuugacaccuuuuaaucucaccuaccugaaccuaaguagcgaacugaagcagcuugaggccaagacggcuagucucuuccaaacuaccgucgagcugcagggguugaucgaccagauaaauucuacauauguggaucugaaauuacucaaccgcuucgaaaauuacaucaaguggcccugguggguauggcugauuaucuccgugguuuuugucgugcuucugagcuugcucguguucuguugccugucaaccggauguugcggcugcuguaacugccuaacaaguucuaugcgagguuguugcgacuguggcuccacuaaacugccauauuacgaguuugaaaagguccauguacagugaggacuaguuauaagacugacuagcccgaugggccucccaacgggcccuccuccccuccuugcaccgagauuaauaaaaaaaaaaaaaaaaaaaaaaaaaaaaaaaaaaaaaaaaaaaaaaaaaaaaaaaaaaaaaaaaugcaucccccccccccccccccccccccccccccccaaaggcucuuuucagagccaccagaauu

SEQ ID NO: 15199 - RNA, 4093 nt, Artificial Sequence
  HCoV/NL63/RPTEC/2004__AFV53148.1 spike protein mRNA human (variant)
aggagaaagcuuaccaugaagcuguuccucauccuucugguguugcccuuagccagcugcuuuuucaccuguaacuccaaugcuaaccugucuaugcuacagcucggcgucccugacaauucaaguacaauuguuacugggcugcuuccaacgcacugguuuugcgcaaaccaaagcaccuccguguacucugccaauggauucuuuuauauagauguagguaaccauagaucggcguucgcucugcacacaggcuacuaugacgccaaucaguacuauaucuacgugacuaacgagauuggguugaaugcaucagucacccucaaaaucuguaaguuuagcaggaacacaaccuucgauuuucugaguaaugccuccucuagcuucgacugcauugugaaccugcucuuuacugaacaguuaggagcuccgcugggcaucacaauauccggugagaccguucggcuucauuuguauaaugugacgcgcacuuucuacguccccgcagccuacaaacugaccaagcuaucagugaaauguuauuuuaacuacaguugcguauucagcguugugaaugcuacagucacugugaacgugaccacacacaacgggcgagucguuaauuauaccgugugugaugacugcaacggauacacggauaauaucuucucuguacagcaagacggccguauuccuaacggcuuuccauucaauaacugguuucuccugacuaauggguccacacuuguggauggagucucaagacuguaucagcccuugaggcucaccugucuguggccugugccagguuuaaagagcaguacuggcuucguuuacuuuaacgccacagggucugacgugaauugcaacggauaucagcauaauuccgucguggauguaaugcgguacaaccugaauuucagcgcgaacucgcucgacaaucuuaagucuggcguuaucguguuuaaaacccugcaguacgaugucuuguucuauuguuccaacucaaguagcggugugcuagacacgaccauucccuuugggccuuccucucaaccauacuauugcuucaucaacagcacaauaaauacuacccacgucucaacauuugugggcauucugccgcccacuguucgcgaaaucgugguagcaagaaccggacaguucuacauuaacggcuuuaaguauuucgaccucggguucaucgaggccgucaauuuuaacgugacaaccgcuagugccacugauuucuggacgguugcauuugcuacauucguggacguccuggugaauguauccgccaccaacauccagaaucuucuguacugcgauagcccuuuugaaaaauugcagugugagcaccuccaauucggacugcaggacgguuuuuauucugcgaacuucuuagaugacaaugugcugccagagacuuacguugcccuacccauuuacuaucagcauaccgauauaaacuuuacagcaaccgcuucauucggcgggaguugcuacgucuguaagccucaccaagugaauaucagccucaacggaaauacuuccgugugcgucaggacaucucauuuuucgauucgguauaucuacaaccgcguuaaaagcggcuccccaggugacucaaguuggcacauauaucugaagucugggacgugucccuucagcuuuuccaaacuuaauaacuuccagaaguucaagaccauuugcuuuucaacuguggaagugccgggcagcuguaacuucccuuuggaggccacauggcacuacaccucuuauacaaucguaggagcucuguacgucacuugguccgaaggcaauaguaucaccggggugcccuacccaguuagcgguauucgagaguuuucuaaccucgugcugaauaacugcacgaaauauaauaucuacgauuaugucggaaccggcauuauaagauccucaaaccagagucuugccgggggaaucacauacgugagcaauucgggcaaccuguuggguuucaagaauguuuccacugggaacauuuuuaucgugaccccuuguaaucagcccgaccaaguagcagucuaucagcagucuaucauuggcgccaugacagcugugaacgagagcagguacggacuccagaaucuguuacaacugccaaacuucuauuacgugucaaauggcgggaacaacugcacuaccgcggucaugacguacaguaauuuuggaauaugugcagaugguucccuaauccccguucggccucguaacucuagcgacaauggcauuuccgccaucauuacagcuaaccucucaaucccaagcaauuggaccacuucggugcagguagaauaucugcagauaacaucuaccccgaucguggucgacugcgccacuuacgugugcaacgggaauccccgcuguaaaaaccuuuugaagcaguauaccuccgcaugcaaaacaauugaggaugcccugagacucagcgcucaucuggaaacgaaugacguuucgucaauguuaaccuucgauucuaacgccuuuagucuggcaaaugugacuuccuucggagacuacaaccuuagcucugucuugccucaaaggaauauccggagcucccgaauugcgggccgcucagcucucgaggaucugcuauuuaguaaggugguuacaagcggucuggggaccguggacgucgauuauaagucuuguacaaaaggccucuccaucgccgaccuggcaugcgcccaguacuauaacggaauaaugguacuuccaggcguggcugaugccgaaagaauggcaauguacacugggucauugauuggaggcaugguucuggguggguuaaccagugcugccgcgauccccuucagccucgcccugcaggcuaggcuuaauuacguggcacugcagacggacgucuugcaagagaaccagaagauucucgccgcuuccuucaauaaagccaucaacaacauaguggcaucuuuuucgagcguaaaugaugcgaucacacagaccgccgaggcuauucacacugugaccaucgcccugaacaagauucaagacgucguuaaucagcagggaucagcacuaaaccaucugacaucccagcuccggcacaauuuccaagcuaucaguaacucuauacaggccauuuaugaucgccuggacccuccacaggcagaccagcaaguggauagacuuaucacuggcagguuggccgcucugaaugcguuugugagccaggucuuaaacaaauacaccgaagugcgugguucccggcgacucgcccagcagaagaucaaugaguguguuaagucacaaucuaacagauauggcuucugcgggaauggaacacauauuuuuagcaucguaaacagugcacccgacggccugcuuuuccugcacacggugcuacucccgaccgauuacaaaaaugucaaggcuugguccgggauuuguguggacggaauauauggcuacguucugaggcagccuaacuuggugcuguauagcgauaauggugucuuucgcgugacuucucggaucauguuccagccaagauuacccguacucucagacuuuguccaaauuuacaacugcaacgugacauucguuaauaucuccaggguggaacugcacaccgucauuccugauuacguggacguuaacaaaacucuucaggaguuugcccagaaucugcccaaguaugugaaaccaaacuucgauuugacaccuuuuaaucucaccuaccugaaccuaaguagcgaacugaagcagcuugaggccaagacggcuagucucuuccaaacuaccgucgagcugcagggguugaucgaccagauaaauucuacauauguggaucugaaauuacucaaccgcuucgaaaauugaggacuaguuauaagacugacuagcccgaugggccucccaacgggcccuccuccccuccuugcaccgagauuaauaaaaaaaaaaaaaaaaaaaaaaaaaaaaaaaaaaaaaaaaaaaaaaaaaaaaaaaaaaaaaaaaugcaucccccccccccccccccccccccccccccccaaaggcucuuuucagagccaccagaauu

SEQ ID NO: 15200 - RNA, 4174 nt, Artificial Sequence
  HCoV/NL63/RPTEC/2004__AFV53148.1 spike protein mRNA human (variant)
aggagaaagcuuaccaugaagcuguuccucauccuucugguguugcccuuagccagcugcuuuuucaccuguaacuccaaugcuaaccugucuaugcuacagcucggcgucccugacaauucaaguacaauuguuacugggcugcuuccaacgcacugguuuugcgcaaaccaaagcaccuccguguacucugccaauggauucuuuuauauagauguagguaaccauagaucggcguucgcucugcacacaggcuacuaugacgccaaucaguacuauaucuacgugacuaacgagauuggguugaaugcaucagucacccucaaaaucuguaaguuuagcaggaacacaaccuucgauuuucugaguaaugccuccucuagcuucgacugcauugugaaccugcucuuuacugaacaguuaggagcuccgcugggcaucacaauauccggugagaccguucggcuucauuuguauaaugugacgcgcacuuucuacguccccgcagccuacaaacugaccaagcuaucagugaaauguuauuuuaacuacaguugcguauucagcguugugaaugcuacagucacugugaacgugaccacacacaacgggcgagucguuaauuauaccgugugugaugacugcaacggauacacggauaauaucuucucuguacagcaagacggccguauuccuaacggcuuuccauucaauaacugguuucuccugacuaauggguccacacuuguggauggagucucaagacuguaucagcccuugaggcucaccugucuguggccugugccagguuuaaagagcaguacuggcuucguuuacuuuaacgccacagggucugacgugaauugcaacggauaucagcauaauuccgucguggauguaaugcgguacaaccugaauuucagcgcgaacucgcucgacaaucuuaagucuggcguuaucguguuuaaaacccugcaguacgaugucuuguucuauuguuccaacucaaguagcggugugcuagacacgaccauucccuuugggccuuccucucaaccauacuauugcuucaucaacagcacaauaaauacuacccacgucucaacauuugugggcauucugccgcccacuguucgcgaaaucgugguagcaagaaccggacaguucuacauuaacggcuuuaaguauuucgaccucggguucaucgaggccgucaauuuuaacgugacaaccgcuagugccacugauuucuggacgguugcauuugcuacauucguggacguccuggugaauguauccgccaccaacauccagaaucuucuguacugcgauagcccuuuugaaaaauugcagugugagcaccuccaauucggacugcaggacgguuuuuauucugcgaacuucuuagaugacaaugugcugccagagacuuacguugcccuacccauuuacuaucagcauaccgauauaaacuuuacagcaaccgcuucauucggcgggaguugcuacgucuguaagccucaccaagugaauaucagccucaacggaaauacuuccgugugcgucaggacaucucauuuuucgauucgguauaucuacaaccgcguuaaaagcggcuccccaggugacucaaguuggcacauauaucugaagucugggacgugucccuucagcuuuuccaaacuuaauaacuuccagaaguucaagaccauuugcuuuucaacuguggaagugccgggcagcuguaacuucccuuuggaggccacauggcacuacaccucuuauacaaucguaggagcucuguacgucacuugguccgaaggcaauaguaucaccggggugcccuacccaguuagcgguauucgagaguuuucuaaccucgugcugaauaacugcacgaaauauaauaucuacgauuaugucggaaccggcauuauaagauccucaaaccagagucuugccgggggaaucacauacgugagcaauucgggcaaccuguuggguuucaagaauguuuccacugggaacauuuuuaucgugaccccuuguaaucagcccgaccaaguagcagucuaucagcagucuaucauuggcgccaugacagcugugaacgagagcagguacggacuccagaaucuguuacaacugccaaacuucuauuacgugucaaauggcgggaacaacugcacuaccgcggucaugacguacaguaauuuuggaauaugugcagaugguucccuaauccccguucggccucguaacucuagcgacaauggcauuuccgccaucauuacagcuaaccucucaaucccaagcaauuggaccacuucggugcagguagaauaucugcagauaacaucuaccccgaucguggucgacugcgccacuuacgugugcaacgggaauccccgcuguaaaaaccuuuugaagcaguauaccuccgcaugcaaaacaauugaggaugcccugagacucagcgcucaucuggaaacgaaugacguuucgucaauguuaaccuucgauucuaacgccuuuagucuggcaaaugugacuuccuucggagacuacaaccuuagcucugucuugccucaaaggaauauccggagcucccgaauugcgggccgcucagcucucgaggaucugcuauuuaguaaggugguuacaagcggucuggggaccguggacgucgauuauaagucuuguacaaaaggccucuccaucgccgaccuggcaugcgcccaguacuauaacggaauaaugguacuuccaggcguggcugaugccgaaagaauggcaauguacacugggucauugauuggaggcaugguucuggguggguuaaccagugcugccgcgauccccuucagccucgcccugcaggcuaggcuuaauuacguggcacugcagacggacgucuugcaagagaaccagaagauucucgccgcuuccuucaauaaagccaucaacaacauaguggcaucuuuuucgagcguaaaugaugcgaucacacagaccgccgaggcuauucacacugugaccaucgcccugaacaagauucaagacgucguuaaucagcagggaucagcacuaaaccaucugacaucccagcuccggcacaauuuccaagcuaucaguaacucuauacaggccauuuaugaucgccuggacccuccacaggcagaccagcaaguggauagacuuaucacuggcagguuggccgcucugaaugcguuugugagccaggucuuaaacaaauacaccgaagugcgugguucccggcgacucgcccagcagaagaucaaugaguguguuaagucacaaucuaacagauauggcuucugcgggaauggaacacauauuuuuagcaucguaaacagugcacccgacggccugcuuuuccugcacacggugcuacucccgaccgauuacaaaaaugucaaggcuugguccgggauuuguguggacggaauauauggcuacguucugaggcagccuaacuuggugcuguauagcgauaauggugucuuucgcgugacuucucggaucauguuccagccaagauuacccguacucucagacuuuguccaaauuuacaacugcaacgugacauucguuaauaucuccaggguggaacugcacaccgucauuccugauuacguggacguuaacaaaacucuucaggaguuugcccagaaucugcccaaguaugugaaaccaaacuucgauuugacaccuuuuaaucucaccuaccugaaccuaaguagcgaacugaagcagcuugaggccaagacggcuagucucuuccaaacuaccgucgagcugcagggguugaucgaccagauaaauucuacauauguggaucugaaauuacucaaccgcuucgaaaauggaggcuacauccccgaggcaccacgagacggucaggccuauguacggaaggauggcgaaugggugcugcuuuccaccuuuugaggacuaguuauaagacugacuagcccgaugggccucccaacgggcccuccuccccuccuugcaccgagauuaauaaaaaaaaaaaaaaaaaaaaaaaaaaaaaaaaaaaaaaaaaaaaaaaaaaaaaaaaaaaaaaaaugcaucccccccccccccccccccccccccccccccaaaggcucuuuucagagccaccagaauu

SEQ ID NO: 15201 - RNA, 3988 nt, Artificial Sequence
  Bat SARS-like CoV/WIV1__AGZ48828.1 spike protein mRNA human (1-1256)
aggagaaagcuuaccaugaagcugcucgugcuugucuucgccacccugguuagcuccuacacaaucgagaaaugcuuggacuuugaugacagaacucccccugcuaacacgcaguucuuaucuucacacaggggcguguauuacccagaugacauuuuucggaguaauguacugcaucuagugcaagaucacuuccucccguuugacagcaacgucacccgcuucauaacauuugggcugaauuucgauaaccccaucauuccuuuuaaggacggaaucuauuucgcagccacugaaaaauccaaugugauucgagguuggguuuuuggcucuaccaugaacaauaagucgcagucagugaucauaaugaacaauagcacaaaccuugucauccgugcguguaauuucgagcugugcgauaacccauuuuucgugguauugaaaaguaauaacacccagauucccuccuacaucuucaauaacgcuuuuaacuguacuuucgaauauguuucuaaggacuuuaaucucgaucugggggagaagccuggaaacuucaaagaccugagagaauuuguguucaggaauaaggauggcuuucuccaugucuacagcgguuaucagccaauuuccgccgcaucaggguuacccacaggauucaacgcccugaaaccuaucuuuaagcuaccauugggcauaaauauuaccaacuuccggacgcugcuaacugcuuuuccgccccgcccugacuacuggggcaccagugcagccgcuuacuucgugggguaucucaaaccaacaacuuuuaugcugaaguacgacgagaauggaaccaucacagaugccguggacugcagccaaaacccccuugcggagcugaaguguucugucaaauccuucgaaauugauaaggguaucuaucagaccucaaauuucagaguugcaccuagcaaagaggugguaagguuuccaaacaucacgaauuugugccccuucggcgaaguguuuaacgccacuacauucccgagugucuacgcuugggagcggaagcgcauuucuaauuguguggccgacuauuccguucucuacaacagcaccucguuuucuacuuucaaaugcuaugggguguccgcaacaaagcugaaugauuuauguuuuucaaacgucuacgcugacaguuucgugguaaaaggagaugacguucgacagauagccccuggccagaccggugugaucgcggauuacaacuauaagcugcccgacgauuuuacggggugcguccucgccuggaauaccagaaacauugacgcaacacaaacuggaaauuacaacuauaaguacaggagccuucggcacggcaaacugcguccauucgagcgcgacaucuccaaugugccuuuuucucccgauggcaagccauguacacccccugcuuucaacugcuauuggccauugaaugacuacggguuuuauauaaccaacggaauugguuaccagccguacagagucgugguucuuagcuucgaacugcucaaugcccccgcuacugugugcggcccuaaacugucaaccgaucuuaucaagaaccaguguguaaauuucaacuuuaaugggcugacaggaaccggcgucuugacuccaaguuccaaaagguuccagcccuuucaacaguucggucgggacgugagcgauuuuacggacucuguucgagauccuaagacaucagagauccucgacauuaguccaugcagcuucgggggcguguccgucaucacccccggaacuaacaccucuucggaaguggccguacuguaucaggaugugaauuguacagacguuccggucgcaauucaugccgaucaauuaaccccuagcuggcgcgugcacuccacuggcaacaacguguuucagacacaggcugggugccugauaggagcggagcacgucgacacgucauacgaaugugauaucccaauuggugcaggcaucugcgccaguuaucauaccguuucuagccuaagauccacuucacaaaagagcaucguggcuuacacaaugucucucggggccgacuccaguauugcauauagcaauaacaccauagccauccccacaaauuucucuauuuccaucacuaccgaggugaugccuguaucaauggcuaaaacgagugucgacuguaacauguacauuugcggagauagcaccgagugugccaaucugcuuuugcaguauggcucguuuugcacacagcugaacagggcacucuccgguaucgcgguggaacaggaccggaauacucgcgagguuuucgcucaggugaagcaaauguacaaaacccccacacugaaggauuuugggggcuucaacuucucucagauacuuccagacccucugaaacccacuaagagauccuuuaucgaagaucuucucuucaauaaggucacccuggccgacgcaggauuuaugaaacaguacggcgaguguuuaggggauauuaacgccagggaccugaucugcgcucagaaguucaauggacuaacggugcucccaccgcugcuuacagaugacaugauugccgcauauaccgcugccuugguuucagguacugcgacagccggcuggaccuuuggggcuggagcagcccugcaaaucccuuucgcuaugcagauggccuaccguuuuaacggcauaggugugacucagaauguacucuaugaaaaccagaaacaaauugcaaaucaguucaacaaggcgaucagucagauucaagagucccugaccacaacgucuaccgccuuagggaaacugcaggaugucgugaaccagaaugcucaggcccuuaacacuuuggugaagcaacucagcuccaauuuuggcgcaaucucaagcguccugaacgacauacuaagucggcuggauaagguugaggcugaagugcagaucgaccgacucauuacaggaagacugcagucucuucagaccuacguaacacaacaguugaucagggccgcagagauucgcgccuccgcuaaucuggcggccacuaaaaugagcgaaugcguguuaggccagucgaagcgggucgacuucugugggaaaggauaucaccucaugucauuuccccaggcagcuccacauggcgugguuuuccugcacgugaccuacguccccucucaagagagaaacuuuacgacagccccugccaucugccacgaagguaaggcuuauuucccaagggaggggguguucguuuuuaauggaaccaguugguucauaacucagcgcaacuuuuucagcccccagauuaucaccacagauaauacuuuugugagcggcucuugugacgucguaaucgguauuaucaacaauaccguguacgauccucuucaaccggagcuggacagcuucaaagaagaguuggauaaguacuuuaaaaaccauacauccccagacguugaucucggcgacauuucagggauaaaugcaaguguggucaacauccagaaggaaauugaucgacugaaugagguggccaagaaccuaaaugagagccugaucgaccuccaggaacugggaaaauaugagcaguacauuaaguggcccugguauguauggcuuggcuucaucgcgggguugauagcuaucgugauggucacgauucuguuaugcuguaugaccucuugcuguuccugccucaaaggagccuguucaugcggcaguuguugcaaguuugaugaagacgacagcgagccuguucugaaaggugugaaguugcacuacacuugaggacuaguuauaagacugacuagcccgaugggccucccaacgggcccuccuccccuccuugcaccgagauuaauaaaaaaaaaaaaaaaaaaaaaaaaaaaaaaaaaaaaaaaaaaaaaaaaaaaaaaaaaaaaaaaaugcaucccccccccccccccccccccccccccccccaaaggcucuuuucagagccaccagaauu

SEQ ID NO: 15202 - RNA, 3988 nt, Artificial Sequence
  Bat SARS-like CoV/WIV1__AGZ48828.1 spike protein mRNA human (1-1256)(K969P_V970P)
aggagaaagcuuaccaugaagcugcucgugcuugucuucgccacccugguuagcuccuacacaaucgagaaaugcuuggacuuugaugacagaacucccccugcuaacacgcaguucuuaucuucacacaggggcguguauuacccagaugacauuuuucggaguaauguacugcaucuagugcaagaucacuuccucccguuugacagcaacgucacccgcuucauaacauuugggcugaauuucgauaaccccaucauuccuuuuaaggacggaaucuauuucgcagccacugaaaaauccaaugugauucgagguuggguuuuuggcucuaccaugaacaauaagucgcagucagugaucauaaugaacaauagcacaaaccuugucauccgugcguguaauuucgagcugugcgauaacccauuuuucgugguauugaaaaguaauaacacccagauucccuccuacaucuucaauaacgcuuuuaacuguacuuucgaauauguuucuaaggacuuuaaucucgaucugggggagaagccuggaaacuucaaagaccugagagaauuuguguucaggaauaaggauggcuuucuccaugucuacagcgguuaucagccaauuuccgccgcaucaggguuacccacaggauucaacgcccugaaaccuaucuuuaaacuuccauugggcauaaauauuaccaacuuccggacgcugcuaacugcuuuuccgccccgcccugacuacuggggcaccagugcagccgcuuacuucgugggguaucucaaaccaacaacuuuuaugcugaaguacgacgagaauggaaccaucacagaugccguggacugcagccaaaacccccuugcggagcugaaguguucugucaaauccuucgaaauugauaaggguaucuaucagaccucaaauuucagaguugcaccuagcaaagaggugguaagguuuccaaacaucacgaauuugugccccuucggcgaaguguuuaacgccacuacauucccgagugucuacgcuugggagcggaagcgcauuucuaauuguguggccgacuauuccguucucuacaacagcaccucguuuucuacuuucaaaugcuaugggguguccgcaacaaagcugaaugauuuauguuuuucaaacgucuacgcugacaguuucgugguaaaaggagaugacguucgacagauagccccuggccagaccggugugaucgcggauuacaacuauaagcugcccgacgauuuuacggggugcguccucgccuggaauaccagaaacauugacgcaacacaaacuggaaauuacaacuauaaguacaggagccuucggcacggcaaacugcguccauucgagcgcgacaucuccaaugugccuuuuucucccgauggcaagccauguacacccccugcuuucaacugcuauuggccauugaaugacuacggguuuuauauaaccaacggaauugguuaccagccguacagagucgugguuuugagcuucgaacugcucaaugcccccgcuacugugugcggcccuaaacugucaaccgaucuuaucaagaaccaguguguaaauuucaacuuuaaugggcugacaggaaccggcgucuugacuccaaguuccaaaagguuccagcccuuucaacaguucggucgggacgugagcgauuuuacggacucuguucgagauccuaagacaucagagauccucgacauuaguccaugcagcuucgggggcguguccgucaucacccccggaacuaacaccucuucggaaguggccguacuguaucaggaugugaauuguacagacguuccggucgcaauucaugccgaucaauuaaccccuagcuggcgcgugcacuccacuggcaacaacguguuucagacacaggcugggugccugauaggagcggagcacgucgacacgucauacgaaugugauaucccaauuggugcaggcaucugcgccaguuaucauaccguuucuagccuaagauccacuucacaaaagagcaucguggcuuacacaaugucucucggggccgacuccaguauugcauauagcaauaacaccauagccauccccacaaauuucucuauuuccaucacuaccgaggugaugccuguaucaauggcuaaaacgagugucgacuguaacauguacauuugcggagauagcaccgagugugccaaucugcuuuugcaguauggcucguuuugcacacagcugaacagggcacucuccgguaucgcgguggaacaggaccggaauacucgcgagguuuucgcucaggugaagcaaauguacaaaacccccacacugaaggauuuugggggcuucaacuucucucagauacuuccagacccucugaaacccacuaagaggagcuuuaucgaagaucuacucuucaauaaggucacccuggccgacgcaggauuuaugaaacaguacggcgaguguuuaggggauauuaacgccagagaccugaucugcgcucagaaguucaauggacuaacggugcucccaccgcugcuuacagaugacaugauugccgcauauaccgcugccuugguuucagguacugcgacagccggcuggaccuuuggggcuggagcagcccugcaaaucccuuucgcuaugcagauggccuaccguuuuaacggcauaggugugacucagaauguacucuaugaaaaccagaaacaaauugcaaaucaguucaacaaggcgaucagucagauucaagagucccugaccacaacgucuaccgccuuagggaaacugcaggaugucgugaaccagaaugcucaggcccuuaacacuuuggugaagcaacucagcuccaauuuuggcgcaaucucaagcguccugaacgacauacuaagucggcuggaucccccagaggcugaaguucagaucgaccgacucauuacaggaagacugcagucucuucagaccuacgugacacaacaguugaucagggccgcagagauucgcgccuccgcuaaucuggcggccacuaagaugagcgaaugcguauuaggccagucgaaacggguggacuucugugggaagggauaucaccucaugucauuuccccaggcagcuccucauggcgucguguuccugcacguuaccuacgugccaucucaagagagaaacuuuacgacagcccccgccaucugccacgaagguaaggcuuauuucccuagggagggggucuucguguuuaauggaaccaguugguucauaacucagcgcaacuuuuucuccccgcagauuaucaccacagauaauacuuuuguuagcggcucuugugacguggucaucgguauuaucaacaauaccguauacgauccacuucaacccgagcuggacagcuucaaggaagaguuggauaaauacuuuaagaaccauacauccccugacguggaucucggcgacauuucagggauaaaugcaaguguugugaacauccagaaagaaauugaucgacugaaugaggucgccaagaaccuaaaugagagccugaucgaccuccaggaacugggaaaguaugagcaguacauuaaauggccaugguauguguggcuuggcuucaucgcgggguugauagcuaucguaauggugacgauucuguuaugcuguaugaccucuugcuguuccugccucaagggagccuguucaugcggcaguuguugcaaauuugaugaagacgacagcgagcccguccugaaggguguuaaacuucacuacacuugaggacuaguuauaagacugacuagcccgaugggccucccaacgggcccuccuccccuccuugcaccgagauuaauaaaaaaaaaaaaaaaaaaaaaaaaaaaaaaaaaaaaaaaaaaaaaaaaaaaaaaaaaaaaaaaaugcaucccccccccccccccccccccccccccccccaaaggcucuuuucagagccaccagaauu

SEQ ID NO: 15203 - RNA, 3793 nt, Artificial Sequence
  Bat SARS-like CoV/WIV1__AGZ48828.1 spike protein mRNA human (variant)
aggagaaagcuuaccaugaagcugcucgugcuugucuucgccacccugguuagcuccuacacaaucgagaaaugcuuggacuuugaugacagaacucccccugcuaacacgcaguucuuaucuucacacaggggcguguauuacccagaugacauuuuucggaguaauguacugcaucuagugcaagaucacuuccucccguuugacagcaacgucacccgcuucauaacauuugggcugaauuucgauaaccccaucauuccuuuuaaggacggaaucuauuucgcagccacugaaaaauccaaugugauucgagguuggguuuuuggcucuaccaugaacaauaagucgcagucagugaucauaaugaacaauagcacaaaccuugucauccgugcguguaauuucgagcugugcgauaacccauuuuucgugguauugaaaaguaauaacacccagauucccuccuacaucuucaauaacgcuuuuaacuguacuuucgaauauguuucuaaggacuuuaaucucgaucugggggagaagccuggaaacuucaaagaccugagagaauuuguguucaggaauaaggauggcuuucuccaugucuacagcgguuaucagccaauuuccgccgcaucaggguuacccacaggauucaacgcccugaaaccuaucuuuaaacuuccauugggcauaaauauuaccaacuuccggacgcugcuaacugcuuuuccgccccgcccugacuacuggggcaccagugcagccgcuuacuucgugggguaucucaaaccaacaacuuuuaugcugaaguacgacgagaauggaaccaucacagaugccguggacugcagccaaaacccccuugcggagcugaaguguucugucaaauccuucgaaauugauaaggguaucuaucagaccucaaauuucagaguugcaccuagcaaagaggugguaagguuuccaaacaucacgaauuugugccccuucggcgaaguguuuaacgccacuacauucccgagugucuacgcuugggagcggaagcgcauuucuaauuguguggccgacuauuccguucucuacaacagcaccucguuuucuacuuucaaaugcuaugggguguccgcaacaaagcugaaugauuuauguuuuucaaacgucuacgcugacaguuucgugguaaaaggagaugacguucgacagauagccccuggccagaccggugugaucgcggauuacaacuauaagcugcccgacgauuuuacggggugcguccucgccuggaauaccagaaacauugacgcaacacaaacuggaaauuacaacuauaaguacaggagccuucggcacggcaaacugcguccauucgagcgcgacaucuccaaugugccuuuuucucccgauggcaagccauguacacccccugcuuucaacugcuauuggccauugaaugacuacggguuuuauauaaccaacggaauugguuaccagccguacagagucgugguuuugagcuucgaacugcucaaugcccccgcuacugugugcggcccuaaacugucaaccgaucuuaucaagaaccaguguguaaauuucaacuuuaaugggcugacaggaaccggcgucuugacuccaaguuccaaaagguuccagcccuuucaacaguucggucgggacgugagcgauuuuacggacucuguucgagauccuaagacaucagagauccucgacauuaguccaugcagcuucgggggcguguccgucaucacccccggaacuaacaccucuucggaaguggccguacuguaucaggaugugaauuguacagacguuccggucgcaauucaugccgaucaauuaaccccuagcuggcgcgugcacuccacuggcaacaacguguuucagacacaggcugggugccugauaggagcggagcacgucgacacgucauacgaaugugauaucccaauuggugcaggcaucugcgccaguuaucauaccguuucuagccuaagauccacuucacaaaagagcaucguggcuuacacaaugucucucggggccgacuccaguauugcauauagcaauaacaccauagccauccccacaaauuucucuauuuccaucacuaccgaggugaugccuguaucaauggcuaaaacgagugucgacuguaacauguacauuugcggagauagcaccgagugugccaaucugcuuuugcaguauggcucguuuugcacacagcugaacagggcacucuccgguaucgcgguggaacaggaccggaauacucgcgagguuuucgcucaggugaagcaaauguacaaaacccccacacugaaggauuuugggggcuucaacuucucucagauacuuccagacccucugaaacccacuaagaggagcuuuaucgaagaucuacucuucaauaaggucacccuggccgacgcaggauuuaugaaacaguacggcgaguguuuaggggauauuaacgccagagaccugaucugcgcucagaaguucaauggacuaacggugcucccaccgcugcuuacagaugacaugauugccgcauauaccgcugccuugguuucagguacugcgacagccggcuggaccuuuggggcuggagcagcccugcaaaucccuuucgcuaugcagauggccuaccguuuuaacggcauaggugugacucagaauguacucuaugaaaaccagaaacaaauugcaaaucaguucaacaaggcgaucagucagauucaagagucccugaccacaacgucuaccgccuuagggaaacugcaggaugucgugaaccagaaugcucaggcccuuaacacuuuggugaagcaacucagcuccaauuuuggcgcaaucucaagcguccugaacgacauacuaagucggcuggaucccccagaggcugaaguucagaucgaccgacucauuacaggaagacugcagucucuucagaccuacgugacacaacaguugaucagggccgcagagauucgcgccuccgcuaaucuggcggccacuaagaugagcgaaugcguauuaggccagucgaaacggguggacuucugugggaagggauaucaccucaugucauuuccccaggcagcuccucauggcgucguguuccugcacguuaccuacgugccaucucaagagagaaacuuuacgacagcccccgccaucugccacgaagguaaggcuuauuucccuagggagggggucuucguguuuaauggaaccaguugguucauaacucagcgcaacuuuuucuccccgcagauuaucaccacagauaauacuuuuguuagcggcucuugugacguggucaucgguauuaucaacaauaccguauacgauccacuucaacccgagcuggacagcuucaaggaagaguuggauaaauacuuuaagaaccauacauccccugacguggaucucggcgacauuucagggauaaaugcaaguguugugaacauccagaaagaaauugaucgacugaaugaggucgccaagaaccuaaaugagagccugaucgaccuccaggaacugggaaaguaugagcagugaggacuaguuauaagacugacuagcccgaugggccucccaacgggcccuccuccccuccuugcaccgagauuaauaaaaaaaaaaaaaaaaaaaaaaaaaaaaaaaaaaaaaaaaaaaaaaaaaaaaaaaaaaaaaaaaugcaucccccccccccccccccccccccccccccccaaaggcucuuuucagagccaccagaauu

SEQ ID NO: 15204 - RNA, 3874 nt, Artificial Sequence
  Bat SARS-like CoV/WIV1__AGZ48828.1 spike protein mRNA human (variant)
aggagaaagcuuaccaugaagcugcucgugcuugucuucgccacccugguuagcuccuacacaaucgagaaaugcuuggacuuugaugacagaacucccccugcuaacacgcaguucuuaucuucacacaggggcguguauuacccagaugacauuuuucggaguaauguacugcaucuagugcaagaucacuuccucccguuugacagcaacgucacccgcuucauaacauuugggcugaauuucgauaaccccaucauuccuuuuaaggacggaaucuauuucgcagccacugaaaaauccaaugugauucgagguuggguuuuuggcucuaccaugaacaauaagucgcagucagugaucauaaugaacaauagcacaaaccuugucauccgugcguguaauuucgagcugugcgauaacccauuuuucgugguauugaaaaguaauaacacccagauucccuccuacaucuucaauaacgcuuuuaacuguacuuucgaauauguuucuaaggacuuuaaucucgaucugggggagaagccuggaaacuucaaagaccugagagaauuuguguucaggaauaaggauggcuuucuccaugucuacagcgguuaucagccaauuuccgccgcaucaggguuacccacaggauucaacgcccugaaaccuaucuuuaaacuuccauugggcauaaauauuaccaacuuccggacgcugcuaacugcuuuuccgccccgcccugacuacuggggcaccagugcagccgcuuacuucgugggguaucucaaaccaacaacuuuuaugcugaaguacgacgagaauggaaccaucacagaugccguggacugcagccaaaacccccuugcggagcugaaguguucugucaaauccuucgaaauugauaaggguaucuaucagaccucaaauuucagaguugcaccuagcaaagaggugguaagguuuccaaacaucacgaauuugugccccuucggcgaaguguuuaacgccacuacauucccgagugucuacgcuugggagcggaagcgcauuucuaauuguguggccgacuauuccguucucuacaacagcaccucguuuucuacuuucaaaugcuaugggguguccgcaacaaagcugaaugauuuauguuuuucaaacgucuacgcugacaguuucgugguaaaaggagaugacguucgacagauagccccuggccagaccggugugaucgcggauuacaacuauaagcugcccgacgauuuuacggggugcguccucgccuggaauaccagaaacauugacgcaacacaaacuggaaauuacaacuauaaguacaggagccuucggcacggcaaacugcguccauucgagcgcgacaucuccaaugugccuuuuucucccgauggcaagccauguacacccccugcuuucaacugcuauuggccauugaaugacuacggguuuuauauaaccaacggaauugguuaccagccguacagagucgugguuuugagcuucgaacugcucaaugcccccgcuacugugugcggcccuaaacugucaaccgaucuuaucaagaaccaguguguaaauuucaacuuuaaugggcugacaggaaccggcgucuugacuccaaguuccaaaagguuccagcccuuucaacaguucggucgggacgugagcgauuuuacggacucuguucgagauccuaagacaucagagauccucgacauuaguccaugcagcuucgggggcguguccgucaucacccccggaacuaacaccucuucggaaguggccguacuguaucaggaugugaauuguacagacguuccggucgcaauucaugccgaucaauuaaccccuagcuggcgcgugcacuccacuggcaacaacguguuucagacacaggcugggugccugauaggagcggagcacgucgacacgucauacgaaugugauaucccaauuggugcaggcaucugcgccaguuaucauaccguuucuagccuaagauccacuucacaaaagagcaucguggcuuacacaaugucucucggggccgacuccaguauugcauauagcaauaacaccauagccauccccacaaauuucucuauuuccaucacuaccgaggugaugccuguaucaauggcuaaaacgagugucgacuguaacauguacauuugcggagauagcaccgagugugccaaucugcuuuugcaauauggcucguuuugcacacagcugaacagggcacucuccgguaucgcgguggaacaggaccggaauacucgcgagguuuucgcucaggugaagcaaauguacaaaacccccacacugaaggauuuugggggcuucaacuucucucagauacuuccagacccucugaaacccacuaagaggagcuuuaucgaagaucuacucuucaauaaggucacccuggccgacgcaggauuuaugaaacaguacggcgaguguuuaggggauauuaacgccagagaccugaucugcgcucagaaguucaauggacuaacggugcucccaccgcugcuuacagaugacaugauugccgcauauaccgcugccuugguuucagguacugcgacagccggcuggaccuuuggggcuggagcagcccugcaaaucccuuucgcuaugcagauggccuaccguuuuaacggcauaggugugacucagaauguacucuaugaaaaccagaaacaaauugcaaaucaguucaacaaggcgaucagucagauucaagagucccugaccacaacgucuaccgccuuagggaaacugcaggaugucgugaaccagaaugcucaggcccuuaacacuuuggugaagcaacucagcuccaauuuuggcgcaaucucaagcguccugaacgacauacuaagucggcuggaucccccagaggcugaaguucagaucgaccgacucauuacaggaagacugcagucucuucagaccuacgugacacaacaguugaucagggccgcagagauucgcgccuccgcuaaucuggcggccacuaagaugagcgaaugcguauuaggccagucgaaacggguggacuucugugggaagggauaucaccucaugucauuuccccaggcagcuccucauggcgucguguuccugcacguuaccuacgugccaucucaagagagaaacuuuacgacagcccccgccaucugccacgaagguaaggcuuauuucccuagggagggggucuucguguuuaauggaaccaguugguucauaacucagcgcaacuuuuucuccccgcagauuaucaccacagauaauacuuuuguuagcggcucuugugacguggucaucgguauuaucaacaauaccguauacgauccacuucaacccgagcuggacagcuucaaggaagaguuggauaaauacuuuaagaaccauacauccccugacguggaucucggcgacauuucagggauaaaugcaaguguugugaacauccagaaagaaauugaucgacugaaugaggucgccaagaaccuaaaugagagccugaucgaccuccaggaacugggaaaguaugagcagggcggguacauuccagaagcgccccgggauggacaggcuuaugugcguaaagacggcgaguggguacuuuugucuacguucugaggacuaguuauaagacugacuagcccgaugggccucccaacgggcccuccuccccuccuugcaccgagauuaauaaaaaaaaaaaaaaaaaaaaaaaaaaaaaaaaaaaaaaaaaaaaaaaaaaaaaaaaaaaaaaaaugcaucccccccccccccccccccccccccccccccaaaggcucuuuucagagccaccagaauu

SEQ ID NO: 15205 - RNA, 4042 nt, Artificial Sequence
  BatCoV/HKU9-1 BF_005I__YP_001039971.1 spike protein mRNA human (1-1274)
aggagaaagcuuaccaugcugcucauccuugugcugggcgucagcuuggccgcugcauccagacccgagugcuucaacccuagguuuaccuuaacaccacugaaucacacucuaaacuacacgucuauuaaggccaaaguuucaaaugugcuccugccggaccccuauauagcguacagugggcagacccuucggcaaaaccuguucauggcugauaugagcaauacaaucuuguauccuguaacuccacccgccaacggagcaaaugguggcuuuauuuacaacaccuccaucauuccugugucugccggacucuucgucaauacauggauguaucgccagccagcuucgucacgagcauacugucaggaacccuuugggguggccuucggcgacaccuuugagaacgaucguaucgcuauacugaucauggccccugacaaucuggguagcuggagugcgguugcaccaagaaaccagacuaauauuuaucucuuagugugcuccaacgccacacuguguaucaauccgggguucaacagguggggacccgcuggcucuuuuauugccccugaugcacuugucgaccauagcaacuccugcuucgugaauaacaccuuuucaguaaauaucaguacgagccggauaucuuuggcuuuccuguuuaaggauggcgaccuacucauuuaccacuccggguggcugccaacuucaaacuucgaacauggauucagccgcgguagucaccccaugaccuacuuuaugucucuuccuguuggcgggaaucugccaagagcccaauucuuucaguccaucgugaggagcaacgcgauugauaaaggagacggcauguguacaaauuucgaugucaacuugcauguggcccaccucaucaaucgggaccuguuagugucguauuuuaacaaugguucugucgcaaacgcugccgauugcgcugacuccgccgcagaggaacuguacuguguuacugggucauucgaucccccgaccggaguguauccucucagucgcuaccgagcccagguagcuggcuuugugagagucacacagaggggcagcuauugcacgcccccauacuccgugcuucaagacccuccccagccaguuguguggcggcguuauaugcuguacgacugugucuucgauuuuaccgugguaguugacucuuugcccacucaccagcuacagugcuacggggugagcccucgcagacuggcgucaauguguuauggaagugucacacucgaugugaugaggaucaaugagacccaucugaacaaucuuuucaaccgggucccagacacuuuuucccuguacaacuaugcauugccggauaauuucuacgguugccuccacgccuuuuaucugaacagcacagcucccuacgccguggcaaaucgauucccuauuaagccaggcgggcgccaaucuaacucagccuucauagacaccguuaucaaugcugcccauuauagucccuuuagcuacguguacggauuagcaguaauuacgcugaaaccugcggcuggcuccaagcuagucugcccaguggccaacgauaccguugugaucacagacagauguguccaguauaaucucuacgguuauacugggaccggcgugcugucuaagaacacaucgcuuguaauacccgauggaaaaguguucacugcaagcuccaccggcacaauuaucgggguuucaaucaauaguaccacuuacucuauuaugccgugcgucacggugccugugagcgucggauaucacccaaacuuugagagggccuugcuguucaauggucucuccuguucacagcggagccgcgcuguuacagaacccgugucugugcugugguccgccagugcaaccgcucaagacgccuuugacacuccuagcggcugcguagucaacguggagcuuagaaauaccacaaucguuaacaccugugcgaugcccauuggaaauucucugugcuucauaaacggguccaucgccacugcuaacgcagauucauugccaaggcuccagcuggugaauuacgacccuuuauaugauaacaguacagccacgcccaugaccccagucuacugggugaagguuccgacuaauuuuacacugagcgcuaccgaagaguacauucagacaacugccccuaaaaucaccaucgacugugcacguuaucuaugcggcgauucgucccggugucucaacgugcugcuucacuacgguacguucugcaaugacauuaacaaggcguugucucgaguaagcaccauacuggauucagcccuccugaguuuagucaaagagcuguccaucaauacaagagacgaagugacuaccuuuucuuucgauggggacuauaacuuuacaggccuuaugggauguuugggccccaauugcggggcuacuaccuacaggagcgccuucuccgaucuccuguaugacaaggugcgcauuacggauccaggauuuaugcagucauaccaaaagugcaucgacagccagugggguggcaguauucgggaccuacuguguacacagaccuauaacgggaucgcaguccugcccccuauaguuucuccagcuaugcaggcccucuacacuucccuuuuggugggagcaguagccagcucgggcuacacauucgguaucaccucagcuggggugauucccuucgcgacucaacugcaguuuagauuaaauggcaucggagucaccacacaggugcucguugagaaccagaaacugauugccucuaguuucaauaacgcacuugugaauauccaaaagggcuuuacggaaaccuccauagcucugagcaaaaugcaggaugucauuaaccagcaugccgcccaguugcacacucucgugguucaacuggggaacucuuucggagcuaucagcuccucaauuaaugagaucuuuaguaggcuagaaggccuggcagccaacgcggagguggaccgccucauaaauggucgaaugaugguccugaacacauauguaacccagcuuuugauccaggcuagcgaggccaaggcacaaaaugcccuggcugcacagaaaauuucugaaugcgugaaggcccaguccuuacggaacgauuucugugggaauggaacacauguucucucaaucccucagcuggcgccgaacggcgugcuuuuuauucacuacgcuuauacuccaaccgaguacgccuucguccaaacgagugcaggucugugccauaauggcacaggguaugcuccccgucagggaauguuugugcuaccuaacaauaccaacauguggcacuucacuaccaugcaguuuuacaauccaguaaacaucagcgccuccaauacacaggugcucacuucuuguucggucaacuauaccagcguuaauuacacagugcuggaacccucagugccuggcgacuacgauuuccaaaaagaguucgacaaguuuuauaagaacuuguccacgauauucaacaauaccuuuaacccgaaugauuucaacuuuaguacugucgacgugacagcccagauuaaaucucugcacgauguuguaaaucaguuaaaccagagcuucaucgaccucaagaaacugaauguguacgaaaagaccaucaaauggcccugguaugucuggcuugcaaugauugcugggaucgugggacugguuuuggccgugauuaugcucaugugcaugacuaacuguugcuccuguuuuaagggcaugugcgauuguagaaggugcugcgguucauacgacucuuaugaugacgucuacccagcggugcgcguaaauaagaaacggacagucugaggacuaguuauaagacugacuagcccgaugggccucccaacgggcccuccuccccuccuugcaccgagauuaauaaaaaaaaaaaaaaaaaaaaaaaaaaaaaaaaaaaaaaaaaaaaaaaaaaaaaaaaaaaaaaaaugcaucccccccccccccccccccccccccccccccaaaggcucuuuucagagccaccagaauu

SEQ ID NO: 15206 - RNA, 4042 nt, Artificial Sequence
  BatCoV/HKU9-1 BF_005I__YP_001039971.1 spike protein mRNA human (1-1274)(G983P_L984P)
aggagaaagcuuaccaugcugcucauccuugugcugggcgucagcuuggccgcugcauccagacccgagugcuucaacccuagguuuaccuuaacaccacugaaucacacucuaaacuacacgucuauuaaggccaaaguuucaaaugugcuccugccggaccccuauauagcguacagugggcagacccuucggcaaaaccuguucauggcugauaugagcaauacaaucuuguauccuguaacuccacccgccaacggagcaaaugguggcuuuauuuacaacaccuccaucauuccugugucugccggacucuucgucaauacauggauguaucgccagccagcuucgucacgagcauacugucaggaacccuuugggguggccuucggcgacaccuuugagaacgaucguaucgcuauacugaucauggccccugacaaucuggguagcuggagugcgguugcaccaagaaaccagacuaauauuuaucucuuagugugcuccaacgccacacuguguaucaauccgggguucaacagguggggacccgcuggcucuuuuauugccccugaugcacuugucgaccauagcaacuccugcuucgugaauaacaccuuuucaguaaauaucaguacgagccggauaucuuuggcuuuccuguuuaaggauggcgaccuacucauuuaccacuccggguggcugccaacuucaaacuucgaacauggauucagccgcgguagucaccccaugaccuacuuuaugucucuuccuguuggcgggaaucugccaagagcccaauucuuucaguccaucgugaggagcaacgcgauugauaaaggagacggcauguguacaaauuucgaugucaacuugcauguggcccaccucaucaaucgggaccuguuagugucguauuuuaacaaugguucugucgcaaacgcugccgauugcgcugacuccgccgcagaggaacuguacuguguuacugggucauucgaucccccgaccggaguguauccucucagucgcuaccgagcccagguagcuggcuuugugagagucacacagaggggcagcuauugcacgcccccauacuccgugcuucaagacccuccccagccaguuguguggcggcguuauaugcuguacgacugugucuucgauuuuaccgugguaguugacucuuugcccacucaccagcuacagugcuacggggugagcccucgcagacuggcgucaauguguuauggaagugucacacucgaugugaugaggaucaaugagacccaucugaacaaucuuuucaaccgggucccagacacuuuuucccuguacaacuaugcauugccggauaauuucuacgguugccuccacgccuuuuaucugaacagcacagcucccuacgccguggcaaaucgauucccuauuaagccaggcgggcgccaaucuaacucagccuucauagacaccguuaucaaugcugcccauuauagucccuuuagcuacguguacggauuagcaguaauuacgcugaaaccugcggcuggcuccaagcuagucugcccaguggccaacgauaccguugugaucacagacagauguguccaguauaaucucuacgguuauacugggaccggcgugcugucuaagaacacaucgcuuguaauacccgauggaaaaguguucacugcaagcuccaccggcacaauuaucgggguuucaaucaauaguaccacuuacucuauuaugccgugcgucacggugccugugagcgucggauaucacccaaacuuugagagggccuugcuguucaauggucucuccuguucacagcggagccgcgcuguuacagaacccgugucugugcugugguccgccagugcaaccgcucaagacgccuuugacacuccuagcggcugcguagucaacguggagcuuagaaauaccacaaucguuaacaccugugcgaugcccauuggaaauucucugugcuucauaaacggguccaucgccacugcuaacgcagauucauugccaaggcuccagcuggugaauuacgacccuuuauaugauaacaguacagccacgcccaugaccccagucuacugggugaagguuccgacuaauuuuacacugagcgcuaccgaagaguacauucagacaacugccccuaaaaucaccaucgacugugcacguuaucuaugcggcgauucgucccggugucucaacgugcugcuucacuacgguacguucugcaaugacauuaacaaggcguugucucgaguaagcaccauacuggauucagcccuccugaguuuagucaaagagcuguccaucaauacaagagacgaagugacuaccuuuucuuucgauggggacuauaacuuuacaggccuuaugggauguuugggccccaauugcggggcuacuaccuacaggagcgccuucuccgaucuccuguaugacaaggugcgcauuacggauccaggauuuaugcagucauaccaaaagugcaucgacagccagugggguggcaguauucgggaccuacuguguacacagaccuauaacgggaucgcaguccugcccccuauaguuucuccagcuaugcaggcccucuacacuucccuuuuggugggagcaguagccagcucgggcuacacauucgguaucaccucagcuggggugauucccuucgcgacucaacugcaguuuagauuaaauggcaucggagucaccacacaggugcucguugagaaccagaaacugauugccucuaguuucaauaacgcacuugugaauauccaaaagggcuuuacggaaaccuccauagcucugagcaaaaugcaggaugucauuaaccagcaugccgcccaguugcacacucucgugguucaacuggggaacucuuucggagcuaucagcuccucaauuaaugagaucuuuaguaggcuagaaccuccggcagccaacgcggagguggaccgccugauaaauggccgaaugaugguccucaacacauauguaacccagcugcuuauccaggcuagcgaggccaaggcacaaaaugccuuggcugcacagaaaauuucugaaugcgugaaggcccagucccugcggaacgauuucugugguaaugggacacauguuuuaucaaucccacagcucgcgcccaacggagugcuguuuauucacuacgcuuauacuccuaccgaguacgccuucguccaaacgagugcaggccuuugccauaaugguacaggcuaugccccacgucaggggauguuugugcugcccaacaauaccaacauguggcacuucacuaccaugcaguuuuacaauccuguaaacaucagcgcuuccaauacacaggugcuaacuucuuguucggucaacuauaccagcguuaauuacacagugcucgaaccgucagugcccggagacuacgauuuccaaaaagaguucgacaaguuuuauaagaaccuguccacgauauucaacaauaccuuuaacccaaaugauuucaacuuuaguacugucgacgugacagcccagauuaaaucuuugcacgauguuguaaaucagcugaaccagagcuucaucgacuuaaagaaacucaauguguacgaaaagaccaucaaauggccuugguaugucuggcuggcaaugauugcuggcaucguggggcuuguucuggccgugauuauguugaugugcaugacuaacuguugcuccuguuuuaagggaaugugcgauuguagaaggugcugcggcucauacgacucuuaugaugacgucuaccccgcggugcgcguaaauaagaaacggacagucugaggacuaguuauaagacugacuagcccgaugggccucccaacgggcccuccuccccuccuugcaccgagauuaauaaaaaaaaaaaaaaaaaaaaaaaaaaaaaaaaaaaaaaaaaaaaaaaaaaaaaaaaaaaaaaaaugcaucccccccccccccccccccccccccccccccaaaggcucuuuucagagccaccagaauu

SEQ ID NO: 15207 - RNA, 3841 nt, Artificial Sequence
  BatCoV/HKU9-1 BF_005I__YP_001039971.1 spike protein mRNA human (variant)
aggagaaagcuuaccaugcugcucauccuugugcugggcgucagcuuggccgcugcauccagacccgagugcuucaacccuagguuuaccuuaacaccacugaaucacacucuaaacuacacgucuauuaaggccaaaguuucaaaugugcuccugccggaccccuauauagcguacagugggcagacccuucggcaaaaccuguucauggcugauaugagcaauacaaucuuguauccuguaacuccacccgccaacggagcaaaugguggcuuuauuuacaacaccuccaucauuccugugucugccggacucuucgucaauacauggauguaucgccagccagcuucgucacgagcauacugucaggaacccuuugggguggccuucggcgacaccuuugagaacgaucguaucgcuauacugaucauggccccugacaaucuggguagcuggagugcgguugcaccaagaaaccagacuaauauuuaucucuuagugugcuccaacgccacacuguguaucaauccgggguucaacagguggggacccgcuggcucuuuuauugccccugaugcacuugucgaccauagcaacuccugcuucgugaauaacaccuuuucaguaaauaucaguacgagccggauaucuuuggcuuuccuguuuaaggauggcgaccuacucauuuaccacuccggguggcugccaacuucaaacuucgaacauggauucagccgcgguagucaccccaugaccuacuuuaugucucuuccuguuggcgggaaucugccaagagcccaauucuuucaguccaucgugaggagcaacgcgauugauaaaggagacggcauguguacaaauuucgaugucaacuugcauguggcccaccucaucaaucgggaccuguuagugucguauuuuaacaaugguucugucgcaaacgcugccgauugcgcugacuccgccgcagaggaacuguacuguguuacugggucauucgaucccccgaccggaguguauccucucagucgcuaccgagcccagguagcuggcuuugugagagucacacagaggggcagcuauugcacgcccccauacuccgugcuucaagacccuccccagccaguuguguggcggcguuauaugcuguacgacugugucuucgauuuuaccgugguaguugacucuuugcccacucaccagcuacagugcuacggggugagcccucgcagacuggcgucaauguguuauggaagugucacacucgaugugaugaggaucaaugagacccaucugaacaaucuuuucaaccgggucccagacacuuuuucccuguacaacuaugcauugccggauaauuucuacgguugccuccacgccuuuuaucugaacagcacagcucccuacgccguggcaaaucgauucccuauuaagccaggcgggcgccaaucuaacucagccuucauagacaccguuaucaaugcugcccauuauagucccuuuagcuacguguacggauuagcaguaauuacgcugaaaccugcggcuggcuccaagcuagucugcccaguggccaacgauaccguugugaucacagacagauguguccaguauaaucucuacgguuauacugggaccggcgugcugucuaagaacacaucgcuuguaauacccgauggaaaaguguucacugcaagcuccaccggcacaauuaucgggguuucaaucaauaguaccacuuacucuauuaugccgugcgucacggugccugugagcgucggauaucacccaaacuuugagagggccuugcuguucaauggucucuccuguucacagcggagccgcgcuguuacagaacccgugucugugcugugguccgccagugcaaccgcucaagacgccuuugacacuccuagcggcugcguagucaacguggagcuuagaaauaccacaaucguuaacaccugugcgaugcccauuggaaauucucugugcuucauaaacggguccaucgccacugcuaacgcagauucauugccaaggcuccagcuggugaauuacgacccuuuauaugauaacaguacagccacgcccaugaccccagucuacugggugaagguuccgacuaauuuuacacugagcgcuaccgaagaguacauucagacaacugccccuaaaaucaccaucgacugugcacguuaucuaugcggcgauucgucccggugucucaacgugcugcuucacuacgguacguucugcaaugacauuaacaaggcguugucucgaguaagcaccauacuggauucagcccuccugaguuuagucaaagagcuguccaucaauacaagagacgaagugacuaccuuuucuuucgauggggacuauaacuuuacaggccuuaugggauguuugggccccaauugcggggcuacuaccuacaggagcgccuucuccgaucuccuguaugacaaggugcgcauuacggauccaggauuuaugcagucauaccaaaagugcaucgacagccagugggguggcaguauucgggaccuacuguguacacagaccuauaacgggaucgcaguccugcccccuauaguuucuccagcuaugcaggcccucuacacuucccuuuuggugggagcaguagccagcucgggcuacacauucgguaucaccucagcuggggugauucccuucgcgacucaacugcaguuuagauuaaauggcaucggagucaccacacaggugcucguugagaaccagaaacugauugccucuaguuucaauaacgcacuugugaauauccaaaagggcuuuacggaaaccuccauagcucugagcaaaaugcaggaugucauuaaccagcaugccgcccaguugcacacucucgugguucaacuggggaacucuuucggagcuaucagcuccucaauuaaugagaucuuuaguaggcuagaaccuccggcagccaacgcggagguggaccgccugauaaauggccgaaugaugguccucaacacauauguaacccagcugcuuauccaggcuagcgaggccaaggcacaaaaugccuuggcugcacagaaaauuucugaaugcgugaaggcccagucccugcggaacgauuucugugguaaugggacacauguuuuaucaaucccacagcucgcgcccaacggagugcuguuuauucacuacgcuuauacuccuaccgaguacgccuucguccaaacgagugcaggccuuugccauaaugguacaggcuaugccccacgucaggggauguuugugcugcccaacaauaccaacauguggcacuucacuaccaugcaguuuuacaauccuguaaacaucagcgcuuccaauacacaggugcuaacuucuuguucggucaacuauaccagcguuaauuacacagugcucgaaccgucagugcccggagacuacgauuuccaaaaagaguucgacaaguuuuauaagaaccuguccacgauauucaacaauaccuuuaacccaaaugauuucaacuuuaguacugucgacgugacagcccagauuaaaucuuugcacgauguuguaaaucagcugaaccagagcuucaucgacuuaaagaaacucaauguguacgaaaagugaggacuaguuauaagacugacuagcccgaugggccucccaacgggcccuccuccccuccuugcaccgagauuaauaaaaaaaaaaaaaaaaaaaaaaaaaaaaaaaaaaaaaaaaaaaaaaaaaaaaaaaaaaaaaaaaugcaucccccccccccccccccccccccccccccccaaaggcucuuuucagagccaccagaauu

SEQ ID NO: 15208 - RNA, 3922 nt, Artificial Sequence
  BatCoV/HKU9-1 BF_005I__YP_001039971.1 spike protein mRNA human (variant)
aggagaaagcuuaccaugcugcucauccuugugcugggcgucagcuuggccgcugcauccagacccgagugcuucaacccuagguuuaccuuaacaccacugaaucacacucuaaacuacacgucuauuaaggccaaaguuucaaaugugcuccugccggaccccuauauagcguacagugggcaaacccuucggcaaaaccuguucauggcugauaugagcaauacaaucuuguauccuguaacuccacccgccaacggagcaaaugguggcuuuauuuacaacaccuccaucauuccugugucugccggacucuucgucaauacauggauguaucgccagccagcuucgucacgagcauacugucaggaacccuuugggguggccuucggcgacaccuuugagaacgaucguaucgcuauacugaucauggccccugacaaucuggguagcuggagugcgguugcaccaagaaaccagacuaauauuuaucucuuagugugcuccaacgccacacuguguaucaauccgggguucaacagguggggacccgcuggcucuuuuauugccccugaugcacuugucgaccauagcaacuccugcuucgugaauaacaccuuuucaguaaauaucaguacgagccggauaucuuuggcuuuccuguuuaaggauggcgaccuacucauuuaccacuccggguggcugccaacuucaaacuucgaacauggauucagccgcgguagucaccccaugaccuacuuuaugucucuuccuguuggcgggaaucugccaagagcccaauucuuucaguccaucgugaggagcaacgcgauugauaaaggagacggcauguguacaaauuucgaugucaacuugcauguggcccaccucaucaaucgggaccuguuagugucguauuuuaacaaugguucugucgcaaacgcugccgauugcgcugacuccgccgcagaggaacuguacuguguuacugggucauucgaucccccgaccggaguguauccucucagucgcuaccgagcccagguagcuggcuuugugagagucacacagaggggcagcuauugcacgcccccauacuccgugcuucaagacccuccccagccaguuguguggcggcguuauaugcuguacgacugugucuucgauuuuaccgugguaguugacucuuugcccacucaccagcuacagugcuacggggugagcccucgcagacuggcgucaauguguuauggaagugucacacucgaugugaugaggaucaaugagacccaucugaacaaucuuuucaaccgggucccagacacuuuuucccuguacaacuaugcauugccggauaauuucuacgguugccuccacgccuuuuaucugaacagcacagcucccuacgccguggcaaaucgauucccuauuaagccaggcgggcgccaaucuaacucagccuucauagacaccguuaucaaugcugcccauuauagucccuuuagcuacguguacggauuagcaguaauuacgcugaaaccugcggcuggcuccaagcuagucugcccaguggccaacgauaccguugugaucacagacagauguguccaguauaaucucuacgguuauacugggaccggcgugcugucuaagaacacaucgcuuguaauacccgauggaaaaguguucacugcaagcuccaccggcacaauuaucgggguuucaaucaauaguaccacuuacucuauuaugccgugcgucacggugccugugagcgucggauaucacccaaacuuugagagggccuugcuguucaauggucucuccuguucacagcggagccgcgcuguuacagaacccgugucugugcugugguccgccagugcaaccgcucaagacgccuuugacacuccuagcggcugcguagucaacguggagcuuagaaauaccacaaucguuaacaccugugcgaugcccauuggaaauucucugugcuucauaaacggguccaucgccacugcuaacgcagauucauugccaaggcuccagcuggugaauuacgacccuuuauaugauaacaguacagccacgcccaugaccccagucuacugggugaagguuccgacuaauuuuacacugagcgcuaccgaagaguacauucagacaacugccccuaaaaucaccaucgacugugcacguuaucuaugcggcgauucgucccggugucucaacgugcugcuucacuacgguacguucugcaaugacauuaacaaggcguugucucgaguaagcaccauacuggauucagcccuccugaguuuagucaaagagcuguccaucaauacaagagacgaagugacuaccuuuucuuucgauggggacuauaacuuuacaggccuuaugggauguuugggccccaauugcggggcuacuaccuacaggagcgccuucuccgaucuccuguaugacaaggugcgcauuacggauccaggauuuaugcagucauaccaaaagugcaucgacagccagugggguggcaguauucgggaccuacuguguacacagaccuauaacgggaucgcaguccugcccccuauaguuucuccagcuaugcaggcccucuacacuucccuuuuggugggagcaguagccagcucgggcuacacauucgguaucaccucagcuggggugauucccuucgcgacucaacugcaguuuagauuaaauggcaucggagucaccacacaggugcucguugagaaccagaaacugauugccucuaguuucaauaacgcacuugugaauauccaaaagggcuuuacggaaaccuccauagcucugagcaaaaugcaggaugucauuaaccagcaugccgcccaguugcacacucucgugguucaacuggggaacucuuucggagcuaucagcuccucaauuaaugagaucuuuaguaggcuagaaccuccggcagccaacgcggagguggaccgccugauaaauggccgaaugaugguccucaacacauauguaacccagcugcuuauccaggcuagcgaggccaaggcacaaaaugccuuggcugcacagaaaauuucugaaugcgugaaggcccagucccugcggaacgauuucugugguaaugggacacauguuuuaucaaucccacagcucgcgcccaacggagugcuguuuauucacuacgcuuauacuccuaccgaguacgccuucguccaaacgagugcaggccuuugccauaaugguacaggcuaugccccacgucaggggauguuugugcugcccaacaauaccaacauguggcacuucacuaccaugcaguuuuacaauccuguaaacaucagcgcuuccaauacacaggugcuaacuucuuguucggucaacuauaccagcguuaauuacacagugcucgaaccgucagugcccggagacuacgauuuccaaaaagaguucgacaaguuuuauaagaaccuguccacgauauucaacaauaccuuuaacccaaaugauuucaacuuuaguacugucgacgugacagcccagauuaaaucuuugcacgauguuguaaaucagcugaaccagagcuucaucgacuuaaagaaacucaauguguacgaaaagggcggguauaucccugaggcacccagagauggacaggcuuacgucaggaaagacggcgagugggugcugcuuuccaccuuuugaggacuaguuauaagacugacuagcccgaugggccucccaacgggcccuccuccccuccuugcaccgagauuaauaaaaaaaaaaaaaaaaaaaaaaaaaaaaaaaaaaaaaaaaaaaaaaaaaaaaaaaaaaaaaaaaugcaucccccccccccccccccccccccccccccccaaaggcucuuuucagagccaccagaauu

SEQ ID NO: 15209 - RNA, 3700 nt, Artificial Sequence
  PDCoV/Swine/Thailand/S5011/2015__AMN91621.1 spike protein mRNA human (1-1160)
aggagaaagcuuaccaugcagagagcccugcucaucaugacccuucugugcuuggcuagggcaaaguucgccgacgauuuacuggaccuacucacauuucccggcgcgcaccgguuccugcauaaaccuacucgcaacgauagcauucuuuacucccgagcuaauaacaauuuugacguggggguccugccaggauauccgacgaagaacguuaauuuguucucuccccucaccaacucaacacugccuauaaauggucugcaccguaguuaccaaccacucauguuaaacugucugacuaaaaucaccaaucagacacuuagcauguauuugcagcccuccgagauucagaccuacucuugcggcggggccauggugaaguaucaaacucaugaugcaguaagaaucauucuggaccuaaucgccacagauaggauaucgguggaagucgugggacaggcuggcgagaacuacguuuuuguguguucagaccaguucaauuauaccacggcacuccacaacagcaccuuuuucagucuuaauucccagcuguacugcuuuacuaacaauacauaccuggguaucuugccuccagaucucacugacuucaccgucuaucggacagggcaauuuuacgccaacggauaucuguuaggcacccugcccauuacggugaacuacguacgccucuauagaggccagcuuucugcuaauagcgcccauuucgcgcuggcaaacuugacugauacacuaaucacccugacuaauacaaccauuucccagaucacguacugugacaaaucaguuguggauaguauagccugccagaggagcucucaccaagucgaagacggguuuuauuccgacccuaagucagcugugcgggcccgccagcgaaccauugugacacucccaaagcugccggagcuugaagucguucagcugaacaucagcgcacacauggauuucggagaggcuagauuggacagugugacuauuaaugguaacaccucuuacuguguaacaaaacccuacuucaggcucgagacuaauuuucugugccggggcuguaccaugaacuuacguacagauaccugcuccuucgaccugagcgccgugaauaacgggaugucguuuucucaauucugucuauccacugaaucaggagcgugcgagaugaagaucaucgucacguauguguggaauuaccuccugcgccagagacuuuauguuacagccguggaaggccagacccauacugguaccacaaguguccacgcaaccgauacuagcuccgugauuacagacguaugcacggauuacaccauauaugggguuucuggaacuggcaucauuaaaccuagcgacuugcugcuccauaacggcaucgcuuuuacaucaccaaccggggagcuguacgccuucaagaauauaacaacuggaaaaacccuucaggugcugcccugugagacgccuagucaauugauugucaucaacaauaccguggucggugcuaucacauccagcaacucuacugaaaacaauagguuuaccacaacuauugugaccccaacguucuuuuauucaacaaacgccaccacucucaauugcacaaagcccguucugaguuacggcccgaucagcguguguuccgauggggcaauugccggaaccucuacuuuacagaacacccggccuucgauaguaagccuguacgacggcgagaucgaaauucccuccgcuuucucacuaaguguccagacagaguaucuccaggugcaagcggaacagguuaucguggauugcccacaguacgucuguaaugguaacucucgaugccugcagcuuuuggcacaauauacgagcgccuguuccaauaucgagguggcucugcacucaagcgcccagcucgacucucgcgagauuauauccauguuuaagaccaguacucagagccugcaguuagcaaacaucacaaauuucaaaggggacuacaacuuuucuuccauucugaccucaagaguaggcggaaggagugccaucgaagaucuuuuguucaauaaggugguuacaagcggccucgggacugucgaccaagauuauaaaucgugcucccggaacauggcuauugccgaccugguguguucucaguacuauaauggaaucauggugcuaccuggugucguugaugcagagaagauggcgauguacaccggcagccugacgggggcuaugguguucggaggccucacagccgcagccgcuauacccuuugccaccgcagugcaggcucgccugaacuacguagcccuucaaacuaaugucuugcaggaaaaccagaaaauccuggcggagucauucaaccaggccguggguaauauuaguuuagcucucuccucuguuaacgacgcaauccaacagaccagcgaagcccugaauacaguggcuauugccaucaagaaaauacagacugucgugaaccagcaaggggaggcacuuucccaccugaccgcgcaguugucaaauaacuuucaggccauuagcacaaguauccaggauauuuauaauagacucgaggaaguugaggcuaaccaacagguggacaggcugaucaauggccgucuagccgcacugaacgcuuacguaacgcagcuccugaaucaaaugucucagauacggcagucccgacuuuuggcccagcaaaagaucaacgaaugcgucaagagccagucgccaagauauggauucuguggcaaugggacccauaucuuuucacugacucagacagcacccaacggaauuuucuuuaugcacgccguguuagugccuaauaaauucaccagggucaacgcuucugcggguauuugcguugauaacacucgcggcuacagucuccagccacaacugauccuuuaucaguuuaauaacuccuggcgggugacaccgagaaauauguacgagcccaggcugccucgccaggccgacuucauacagcuaaccgauugcagcguaacguuuuauaacacuaccgcagcuaaucucccaaacauuauccccgacgugaucgaugucaaucaaacagugucugacauuaucgacaaccugccuaccgccacuccaccccagugggauguugggauuuacaauaacacaauauugaaucugaccguggaaaucaacgacuuacaggagcgaagcaagaaucucucccagauugccgaucggcugcaaaacuacaucgacaaucuuaacaauacacuggucgauuuggaguggcucaaccguguggaaacuuaucugaaauggccgugguacauuuggcuagcuaucgcacuggcccuuauagcguucguuaccauccucauuacgaucuuucuguguacaggaugcuguggcgguugcuucggguguugcggcggauguuucggcuuguuuucaaagaaaaagagauauaccgacgaucagccuacuccaaguuucaaguuuaaagaguggugaggacuaguuauaagacugacuagcccgaugggccucccaacgggcccuccuccccuccuugcaccgagauuaauaaaaaaaaaaaaaaaaaaaaaaaaaaaaaaaaaaaaaaaaaaaaaaaaaaaaaaaaaaaaaaaaugcaucccccccccccccccccccccccccccccccaaaggcucuuuucagagccaccagaauu

SEQ ID NO: 15210 - RNA, 3700 nt, Artificial Sequence
  PDCoV/Swine/Thailand/S5011/2015__AMN91621.1 spike protein mRNA human (1-1160)(E855P_V856P)
aggagaaagcuuaccaugcagagagcccugcucaucaugacccuucugugcuuggcuagggcaaaguucgccgacgauuuacuggaccuacucacauuucccggcgcgcaccgguuccugcauaaaccuacucgcaacgauagcauucuuuacucccgagcuaauaacaauuuugacguggggguccugccaggauauccgacgaagaacguuaauuuguucucuccccucaccaacucaacacugccuauaaauggucugcaccguaguuaccaaccacucauguuaaacugucugacuaaaaucaccaaucagacacuuagcauguauuugcagcccuccgagauucagaccuacucuugcggcggggccauggugaaguaucaaacucaugaugcaguaagaaucauucuggaccuaaucgccacagauaggauaucgguggaagucgugggacaggcuggcgagaacuacguuuuuguguguucagaccaguucaauuauaccacggcacuccacaacagcaccuuuuucagucuuaauucccagcuguacugcuuuacuaacaauacauaccuggguaucuugccuccagaucucacugacuucaccgucuaucggacagggcaauuuuacgccaacggauaucuguuaggcacccugcccauuacggugaacuacguacgccucuauagaggccagcuuucugcuaauagcgcccauuucgcgcuggcaaacuugacugauacacuaaucacccugacuaauacaaccauuucccagaucacguacugugacaaaucaguuguggauaguauagccugccagaggagcucucaccaagucgaagacggguuuuauuccgacccuaagucagcugugcgggcccgccagcgaaccauugugacacucccaaagcugccggagcuugaagucguucagcugaacaucagcgcacacauggauuucggagaggcuagauuggacagugugacuauuaaugguaacaccucuuacuguguaacaaaacccuacuucaggcucgagacuaauuuucugugccggggcuguaccaugaacuuacguacagauaccugcuccuucgaccugagcgccgugaauaacgggaugucguuuucucaauucugucuauccacugaaucaggagcgugcgagaugaagaucaucgucacguauguguggaauuaccuccugcgccagagacuuuauguuacagccguggaaggccagacccauacugguaccacaaguguccacgcaaccgauacuagcuccgugauuacagacguaugcacggauuacaccauauaugggguuucuggaacuggcaucauuaaaccuagcgacuugcugcuccauaacggcaucgcuuuuacaucaccaaccggggagcuguacgccuucaagaauauaacaacuggaaaaacccuucaggugcugcccugugagacgccuagucaauugauugucaucaacaauaccguggucggugcuaucacauccagcaacucuacugaaaacaauagguuuaccacaacuauugugaccccaacguucuuuuauucaacaaacgccaccacucucaauugcacaaagcccguucugaguuacggcccgaucagcguguguuccgauggggcaauugccggaaccucuacuuuacagaacacccggccuucgauaguaagccuguacgacggcgagaucgaaauucccuccgcuuucucacuaaguguccagacagaguaucuccaggugcaagcggaacagguuaucguggauugcccacaguacgucuguaaugguaacucucgaugccugcagcuuuuggcacaauauacgagcgccuguuccaauaucgagguggcucugcacucaagcgcccagcucgacucucgcgagauuauauccauguuuaagaccaguacucagagccugcaguuagcaaacaucacaaauuucaaaggggacuacaacuuuucuuccauucugaccucaagaguaggcggaaggagugccaucgaagaucuuuuguucaauaaggugguuacaagcggccucgggacugucgaccaagauuauaaaucgugcucccggaacauggcuauugccgaccugguguguucucaguacuauaauggaaucauggugcuaccuggugucguugaugcagagaagauggcgauguacaccggcagccugacgggggcuaugguguucggaggccucacagccgcagccgcuauacccuuugccaccgcagugcaggcucgccugaacuacguagcccuucaaacuaaugucuugcaggaaaaccagaaaauccuggcggagucauucaaccaggccguggguaauauuaguuuagcucucuccucuguuaacgacgcaauccaacagaccagcgaagcccugaauacaguggcuauugccaucaagaaaauacagacugucgugaaccagcaaggggaggcacuuucccaccugaccgcgcaguugucaaauaacuuucaggccauuagcacaaguauccaggauauuuauaauagacucgagccacccgaagcuaaccaacagguugacaggcugaucaauggccgucuagccgcacugaacgcuuacgugacgcagcuccugaaucaaaugucucagauacggcagucccgacuuuuggcccagcaaaagaucaacgagugcguaaagagccagucgccuagauauggauucuguggcaaugggacccauaucuuuucacugacucagacagcaccaaacggaauuuucuuuaugcacgccgucuuagugccgaauaaauucaccagggugaacgcuucugcggguauuugcgucgauaacacucgcggcuacagucuccagccccaacugauccuuuaucaguuuaauaacuccuggcggguuacaccuagaaauauguacgaaccaaggcugccccgccaggccgacuucauacagcuaaccgauugcagcgugacguuuuauaacacuaccgcagcuaaucucccuaacauuaucccagacguaaucgaugugaaucaaacagucucugacauuaucgacaaccugcccaccgccacuccgccucagugggauguggggauuuacaauaacacaauauugaaucugaccguugagaucaacgacuuacaggaacgaagcaagaaucucucccagauugccgaucggcugcaaaacuacaucgacaaucuuaacaauacacugguggauuuggaguggcucaaccgugucgagacuuaucugaaauggccaugguacauuuggcuagcuaucgcacuggcccuuauagcguucgugaccauccucauuacgaucuuucuguguacaggaugcuguggcgguugcuucggguguugcggcggauguuucggcuuguuuucaaagaaaaagagauauaccgacgaucagcccacuccuaguuucaaguuuaaagaauggugaggacuaguuauaagacugacuagcccgaugggccucccaacgggcccuccuccccuccuugcaccgagauuaauaaaaaaaaaaaaaaaaaaaaaaaaaaaaaaaaaaaaaaaaaaaaaaaaaaaaaaaaaaaaaaaaugcaucccccccccccccccccccccccccccccccaaaggcucuuuucagagccaccagaauu

SEQ ID NO: 15211 - RNA, 3499 nt, Artificial Sequence
  PDCoV/Swine/Thailand/S5011/2015__AMN91621.1 spike protein mRNA human (variant)
aggagaaagcuuaccaugcagagagcccugcucaucaugacccuucugugcuuggcuagggcaaaguucgccgacgauuuacuggaccuacucacauuucccggcgcgcaccgguuccugcauaaaccuacucgcaacgauagcauucuuuacucccgagcuaauaacaauuuugacguggggguccugccaggauauccgacgaagaacguuaauuuguucucuccccucaccaacucaacacugccuauaaauggucugcaccguaguuaccaaccacucauguuaaacugucugacuaaaaucaccaaucagacacuuagcauguauuugcagcccuccgagauucagaccuacucuugcggcggggccauggugaaguaucaaacucaugaugcaguaagaaucauucuggaccuaaucgccacagauaggauaucgguggaagucgugggacaggcuggcgagaacuacguuuuuguguguucagaccaguucaauuauaccacggcacuccacaacagcaccuuuuucagucuuaauucccagcuguacugcuuuacuaacaauacauaccuggguaucuugccuccagaucucacugacuucaccgucuaucggacagggcaauuuuacgccaacggauaucuguuaggcacccugcccauuacggugaacuacguacgccucuauagaggccagcuuucugcuaauagcgcccauuucgcgcuggcaaacuugacugauacacuaaucacccugacuaauacaaccauuucccagaucacguacugugacaaaucaguuguggauaguauagccugccagaggagcucucaccaagucgaagacggguuuuauuccgacccuaagucagcugugcgggcccgccagcgaaccauugugacacucccaaagcugccggagcuugaagucguucagcugaacaucagcgcacacauggauuucggagaggcuagauuggacagugugacuauuaaugguaacaccucuuacuguguaacaaaacccuacuucaggcucgagacuaauuuucugugccggggcuguaccaugaacuuacguacagauaccugcuccuucgaccugagcgccgugaauaacgggaugucguuuucucaauucugucuauccacugaaucaggagcgugcgagaugaagaucaucgucacguauguguggaauuaccuccugcgccagagacuuuauguuacagccguggaaggccagacccauacugguaccacaaguguccacgcaaccgauacuagcuccgugauuacagacguaugcacggauuacaccauauaugggguuucuggaacuggcaucauuaaaccuagcgacuugcugcuccauaacggcaucgcuuuuacaucaccaaccggggagcuguacgccuucaagaauauaacaacuggaaaaacccuucaggugcugcccugugagacgccuagucaauugauugucaucaacaauaccguggucggugcuaucacauccagcaacucuacugaaaacaauagguuuaccacaacuauugugaccccaacguucuuuuauucaacaaacgccaccacucucaauugcacaaagcccguucugaguuacggcccgaucagcguguguuccgauggggcaauugccggaaccucuacuuuacagaacacccggccuucgauaguaagccuguacgacggcgagaucgaaauucccuccgcuuucucacuaaguguccagacagaguaucuccaggugcaagcggaacagguuaucguggauugcccacaguacgucuguaaugguaacucucgaugccugcagcuuuuggcacaauauacgagcgccuguuccaauaucgagguggcucugcacucaagcgcccagcucgacucucgcgagauuauauccauguuuaagaccaguacucagagccugcaguuagcaaacaucacaaauuucaaaggggacuacaacuuuucuuccauucugaccucaagaguaggcggaaggagugccaucgaagaucuuuuguucaauaaggugguuacaagcggccucgggacugucgaccaagauuauaaaucgugcucccggaacauggcuauugccgaccugguguguucucaguacuauaauggaaucauggugcuaccuggugucguugaugcagagaagauggcgauguacaccggcagccugacgggggcuaugguguucggaggccucacagccgcagccgcuauacccuuugccaccgcagugcaggcucgccugaacuacguagcccuucaaacuaaugucuugcaggaaaaccagaaaauccuggcggagucauucaaccaggccguggguaauauuaguuuagcucucuccucuguuaacgacgcaauccaacagaccagcgaagcccugaauacaguggcuauugccaucaagaaaauacagacugucgugaaccagcaaggggaggcacuuucccaccugaccgcgcaguugucaaauaacuuucaggccauuagcacaaguauccaggauauuuauaauagacucgagccacccgaagcuaaccaacagguugacaggcugaucaauggccgucuagccgcacugaacgcuuacgugacgcagcuccugaaucaaaugucucagauacggcagucccgacuuuuggcccagcaaaagaucaacgagugcguaaagagccagucgccuagauauggauucuguggcaaugggacccauaucuuuucacugacucagacagcaccaaacggaauuuucuuuaugcacgccgucuuagugccgaauaaauucaccagggugaacgcuucugcggguauuugcgucgauaacacucgcggcuacagucuccagccccaacugauccuuuaucaguuuaauaacuccuggcggguuacaccuagaaauauguacgaaccaaggcugccccgccaggccgacuucauacagcuaaccgauugcagcgugacguuuuauaacacuaccgcagcuaaucucccuaacauuaucccagacguaaucgaugugaaucaaacagucucugacauuaucgacaaccugcccaccgccacuccgccucagugggauguggggauuuacaauaacacaauauugaaucugaccguugagaucaacgacuuacaggaacgaagcaagaaucucucccagauugccgaucggcugcaaaacuacaucgacaaucuuaacaauacacugguggauuuggaguggcucaaccgugucgagacuugaggacuaguuauaagacugacuagcccgaugggccucccaacgggcccuccuccccuccuugcaccgagauuaauaaaaaaaaaaaaaaaaaaaaaaaaaaaaaaaaaaaaaaaaaaaaaaaaaaaaaaaaaaaaaaaaugcaucccccccccccccccccccccccccccccccaaaggcucuuuucagagccaccagaauu

SEQ ID NO: 15212 - RNA, 3580 nt, Artificial Sequence
  PDCoV/Swine/Thailand/S5011/2015__AMN91621.1 spike protein mRNA human (variant)
aggagaaagcuuaccaugcagagagcccugcucaucaugacccuucugugcuuggcuagggcaaaguucgccgacgauuuacuggaccuacucacauuucccggcgcgcaccgguuccugcauaaaccuacucgcaacgauagcauucuuuacucccgagcuaauaacaauuuugacguggggguccugccaggauauccgacgaagaacguuaauuuguucucuccccucaccaacucaacacugccuauaaauggucugcaccguaguuaccaaccacucauguuaaacugucugacuaaaaucaccaaucagacacuuagcauguauuugcagcccuccgagauucagaccuacucuugcggcggggccauggugaaguaucaaacucaugaugcaguaagaaucauucuggaccuaaucgccacagauaggauaucgguggaagucgugggacaggcuggcgagaacuacguuuuuguguguucagaccaguucaauuauaccacggcacuccacaacagcaccuuuuucagucuuaauucccagcuguacugcuuuacuaacaauacauaccuggguaucuugccuccagaucucacugacuucaccgucuaucggacagggcaauuuuacgccaacggauaucuguuaggcacccugcccauuacggugaacuacguacgccucuauagaggccagcuuucugcuaauagcgcccauuucgcgcuggcaaacuugacugauacacuaaucacccugacuaauacaaccauuucccagaucacguacugugacaaaucaguuguggauaguauagccugccagaggagcucucaccaagucgaagacggguuuuauuccgacccuaagucagcugugcgggcccgccagcgaaccauugugacacucccaaagcugccggagcuugaagucguucagcugaacaucagcgcacacauggauuucggagaggcuagauuggacagugugacuauuaaugguaacaccucuuacuguguaacaaaacccuacuucaggcucgagacuaauuuucugugccggggcuguaccaugaacuuacguacagauaccugcuccuucgaccugagcgccgugaauaacgggaugucguuuucucaauucugucuauccacugaaucaggagcgugcgagaugaagaucaucgucacguauguguggaauuaccuccugcgccagagacuuuauguuacagccguggaaggccagacccauacugguaccacaaguguccacgcaaccgauacuagcuccgugauuacagacguaugcacggauuacaccauauaugggguuucuggaacuggcaucauuaaaccuagcgacuugcugcuccauaacggcaucgcuuuuacaucaccaaccggggagcuguacgccuucaagaauauaacaacuggaaaaacccuucaggugcugcccugugagacgccuagucaauugauugucaucaacaauaccguggucggugcuaucacauccagcaacucuacugaaaacaauagguuuaccacaacuauugugaccccaacguucuuuuauucaacaaacgccaccacucucaauugcacaaagcccguucugaguuacggcccgaucagcguguguuccgauggggcaauugccggaaccucuacuuuacagaacacccggccuucgauaguaagccuguacgacggcgagaucgaaauucccuccgcuuucucacuaaguguccagacagaguaucuccaggugcaagcggaacagguuaucguggauugcccacaguacgucuguaaugguaacucucgaugccugcagcuuuuggcacaauauacgagcgccuguuccaauaucgagguggcucugcacucaagcgcccagcucgacucucgcgagauuauauccauguuuaagaccaguacucagagccugcaguuagcaaacaucacaaauuucaaaggggacuacaacuuuucuuccauucugaccucaagaguaggcggaaggagugccaucgaagaucuuuuguucaauaaggugguuacaagcggccucgggacugucgaccaagauuauaaaucgugcucccggaacauggcuauugccgaccugguguguucucaguacuauaauggaaucauggugcuaccuggugucguugaugcagagaagauggcgauguacaccggcagccugacgggggcuaugguguucggaggccucacagccgcagccgcuauacccuuugccaccgcagugcaggcucgccugaacuacguagcccuucaaacuaaugucuugcaggaaaaccagaaaauccuggcggagucauucaaccaggccguggguaauauuaguuuagcucucuccucuguuaacgacgcaauccaacagaccagcgaagcccugaauacaguggcuauugccaucaagaaaauacagacugucgugaaccagcaaggggaggcacuuucccaccugaccgcgcaguugucaaauaacuuucaggccauuagcacaaguauccaggauauuuauaauagacucgagccacccgaagcuaaccaacagguugacaggcugaucaauggccgucuagccgcacugaacgcuuacgugacgcagcuccugaaucaaaugucucagauacggcagucccgacuuuuggcccagcaaaagaucaacgagugcguaaagagccagucgccuagauauggauucuguggcaaugggacccauaucuuuucacugacucagacagcaccaaacggaauuuucuuuaugcacgccgucuuagugccgaauaaauucaccagggugaacgcuucugcggguauuugcgucgauaacacucgcggcuacagucuccagccccaacugauccuuuaucaguuuaauaacuccuggcggguuacaccuagaaauauguacgaaccaaggcugccccgccaggccgacuucauacagcuaaccgauugcagcgugacguuuuauaacacuaccgcagcuaaucucccuaacauuaucccagacguaaucgaugugaaucaaacagucucugacauuaucgacaaccugcccaccgccacuccgccucagugggauguggggauuuacaauaacacaauauugaaucugaccguugagaucaacgacuuacaggaacgaagcaagaaucucucccagauugccgaucggcugcaaaacuacaucgacaaucuuaacaauacacugguggauuuggaguggcucaaccgugucgagacuggaggcuauauuccagaagcucccagagacggucaggcauacgugaggaaagauggggaguggguucugcuaucaaccuucugaggacuaguuauaagacugacuagcccgaugggccucccaacgggcccuccuccccuccuugcaccgagauuaauaaaaaaaaaaaaaaaaaaaaaaaaaaaaaaaaaaaaaaaaaaaaaaaaaaaaaaaaaaaaaaaaugcaucccccccccccccccccccccccccccccccaaaggcucuuuucagagccaccagaauu

SEQ ID NO: 15213 - RNA, 4378 nt, Artificial Sequence
  PEDV/NPL-PEDv/2013/P10__AHZ94887.1 spike protein mRNA human (1-1386)
aggagaaagcuuaccaugaaaagccugaccuacuucuggcucuuucuucccgugcuguccacauugucuuuaccucaggacgucacuagaugcucagccaacacgaauuucaggcgguuuuucaguaaauuuaacguucaagcuccagcagugguagugcugggcggguaucuaccgaucggagagaaucagggugucaacagcaccugguacugugccggccagcaccccacagcguccggggugcauggaauuuucguuucucacauacgcggcggucauggguuugaaaucggaauuucgcaggagccuuucgauccaucaggcuaucaacucuaccugcacaaggcuacuaauggcaacaccaaugccacagcacgacuucguaucugccaguuucccagcauuaaaacccuggggccuacugccaacaaugacgugacaaccggaagaaacuguuuguucaauaaggcuaucccagcacauaugagugaacacuccgucguggguauaacgugggauaacgacaggguaacuguguuuucugauaaaaucuauuacuucuauuuuaagaaugacuggagccggguugccaccaagugcuacaacuccggcgggugugcuaugcaguacgucuaugagcccacauacuauaugcucaaugugacuucagccggagaagauggcauuaguuaccagccuugcaccgcgaacuguaucgguuaugcagccaacguguucgcuacagagccaaaugggcacauuccggagggauucagcuuuaacaauugguuccugcugucuaacgacuccacccucguccauggcaaaguugugucaaaucaacccuuacugguaaacugccuuuuggccaucccuaagauauacggccuggggcaguuuuucagcuuuaaucagacgauugauggaguguguaacggugcagcuguccagcgcgccccagaagcgcuaagauucaauaucaacgacauuagugugauccucgccgagggcucuaucguucugcacacugcacuugggacaaauuuuuccuucgugugcagcaacucgucuaauccccaucuggcuaccuuugccauuccuuugggagcuacucaagucccauauuacuguuucuuuaaaguggauacauacaacuccaccguauauaaguuccucgccguucugcccccgacggugagggaaauagucaucaccaaauacggcgacguguaugucaaugguuuuggguacuuacaccugggccuccuugaugcagugacaauuaacuucacuggacacggcaccgacgacgauguuucaggguucuggacaaucgccaguacuaacuuuguggacgcucugauagagguacagggaaccgcgauucagcggaucuuguauugcgaugacccugucagccaacuaaagugcucccagguggcauucgaucuggacgaugguuuuuacacaaucucuagccgcaaucuccugucacaugagcagcccauuaguuucguuacccuuccauccuuuaacgaccacagcuucgugaauaucacugucucugccucauuuggcgggcauaguggagcuaaccugauugccagcgauacgacaauaaauggcuucuccucuuuuuguguggacacccgacaguucacuaucucguuguuuuauaacguaaccaauagcuacgguuacguguccaagucacaagauaguaacugcccuuucacacuccagucuguuaaugacuaucugagcuuuuccaaauucugugucucaaccagcuuacuggcaucugccugcacuauugaccuauucggguaccccgaauuuggcuccggagugaaguucacaagucucuauuuucaguucacgaaaggcgagcugaucaccgggacuccaaagccccuugaaggagugacagaugucagcuuuaugaccuuggacguuuguacaaaauacacuaucuaugguuucaagggcgaggggauuauaacccugacgaacucuuccuuucucgcuggaguguacuauaccucagauaguggccagcugcuugccuucaaaaaugugacaagcggugcaguauacucggucacuccuugcuccuuuucugaacaagcggcuuacguggacgaugacaucguuggggugauuagcucacugaguuccucuaccuucaacagcacaagagaguugccaggcuuuuucuaucacuccaaugauggaucaaacuguacugagccgguccucguguacagcaauaucggcguuugcaagagugggucuauuggauaugugcccucccagagcggccagguaaagaucgccccuaccgucacggguaacauaucgaucccaacaaacuucucaaugucuauuaggaccgaauaccugcaguuauauaauacucccgugaguguggacugugcaacauacgucugcaacggaaauucccgguguaaacaacugcuaacccaguauacugccgcuugcaagaccaucgagagcgcccuccagcugucugcacgucuugaaagcguugaggugaacuccauguugacaauuucagaugaagcucugcagcucgccacgaucaguagcuuuaauggggacggcuacaacuucaccaauguacugggugugucugucuacgauccugcgucccgcagagugguucaaaagaggucauuuauagaggacuuacuguucaacaagguggucacuaauggccuugggacaguggaugaggacuauaaacggugcaguaacggacgaagcguugccgacuuggugugugcucaguacuauuccggcgucaugguacucccaggggugguugaugcagaaaagcugcauauguacucugccucgcuaauuggaggcauggugcuggguggguuuaccagcgcugccgcacuccccuucucauaugcgguccaggcccgccugaauuaccuugcuuugcaaacagacgugcugcagagaaaccagcaguuacucgccgaguccuuuaauagugcaaucggaaacauuacuucugcuuucgaaagcguaaaggaggccaucucccaaaccucaaaaggccugaauacgguggcacacgcccuuacaaagguccaggaaguugugaacucucagggugcugcgcugacccaguugacugugcaacuccagcacaacuuucaggccauaagcaguuccaucgaugacauuuauagcaggcuggauauccuaucugcagacgcucaggucgaucggcugauuaccggccgccucucagcccugaaugccuucguggcucaaacacuuacuaaauacaccgagguucaggcauccagaaaguuggcccagcaaaaaguaaacgagugcgugaagagucagagccagagguacggguuuuguggaggcgacggggaacauaucuucucgcugguccaggcggcuccgcaaggauuacucuuucugcacacagugcuuguuccuucugauuucguggacgucauagccauugcaggccugugcgugaaugaugagaucgcccuaacgcuccgugaaccaggucugguauuguucacccaugagcugcagaaccacacugcuacagaguauuuugucuccagccggcgaauguucgaacccagaaagccuaccgugucagacuuuguucagaucgagaguuguguggucacuuacgugaauuuaacaagggaucagcuccccgacguuauuccagacuauaucgaugugaacaaaacccuguacgaaauucuugcaucucugccuaaucgcacggggcccuccuugccacucgacgucuucaacgccacuuaucugaaucuaaccggagagauagcggaucuggaacaacggagcgagucacuuagaaacacaaccgaggaacuccagagucugaucuacaauauuaacaauacuuugguggaccuggagugguuaaacaggguagaaacauauaucaaguggccgugguggguguggcucauuaucuuuauaguucugaucuucgucgugagccuucugguguuuugcuguauuuccaccggcugcugugguugcuguggcugcugcugugcuugcuucucuggguguugccgcggaccucgauugcagcccuacgaggucuuugaaaaaguacacgugcagugaggacuaguuauaagacugacuagcccgaugggccucccaacgggcccuccuccccuccuugcaccgagauuaauaaaaaaaaaaaaaaaaaaaaaaaaaaaaaaaaaaaaaaaaaaaaaaaaaaaaaaaaaaaaaaaaugcaucccccccccccccccccccccccccccccccaaaggcucuuuucagagccaccagaauu

SEQ ID NO: 15214 - RNA, 4378 nt, Artificial Sequence
  PEDV/NPL-PEDv/2013/P10__AHZ94887.1 spike protein mRNA human (1-1386)(I1076P_L1077P)
aggagaaagcuuaccaugaagucucugaccuacuucuggcucuuucuucccgugcuguccacauugucuuuaccucaggacgucacuagaugcucagccaacacgaauuucaggcgguuuuucaguaaauuuaacguucaagcuccagcagugguagugcugggcggguaucuaccgaucggagagaaucagggugucaacagcaccugguacugugccggccagcaccccacagcguccggggugcauggaauuuucguuucucacauacgcggcggucauggguuugaaaucggaauuucgcaggagccuuucgauccaucaggcuaucaacucuaccugcacaaggcuacuaauggcaacaccaaugccacagcacgacuucguaucugccaguuucccagcauuaaaacccuggggccuacugccaacaaugacgugacaaccggaagaaacuguuuguucaauaaggcuaucccagcacauaugagugaacacuccgucguggguauaacgugggauaacgacaggguaacuguuuuuagcgauaaaaucuauuacuucuauuuuaagaaugacuggagccggguggccaccaagugcuacaacuccggcgggugugcuaugcaguacgucuaugagcccacauacuauaugcucaaugugacuucagccggagaagauggcauuaguuaccagccuugcaccgcgaacuguaucgguuaugcagccaacguguucgcuacagagccaaaugggcacauuccggagggauucagcuuuaacaauugguuccugcugucuaacgacuccacccucguccauggcaaaguugugucaaaucaacccuuacugguaaacugccuuuuggccaucccuaagauauacggccuggggcaguuuuucagcuuuaaucagacgauugauggaguguguaacggugcagcuguccagcgcgccccagaagcgcuaagauucaauaucaacgacauuagugugauccucgccgagggcucuaucguucugcacacugcacuugggacaaauuuuuccuucgugugcagcaacucgucuaauccccaucuggcuaccuuugccauuccuuugggagcuacucaagucccauauuacuguuucuuuaaaguggauacauacaacuccaccguauauaaguuccucgccguucugcccccgacggugagggaaauagucaucaccaaauacggcgacguguaugucaaugguuuuggguacuuacaccugggccuccuugaugcagugacaauuaacuucacuggacacggcaccgacgacgauguuucaggguucuggacaaucgccaguacuaacuuuguggacgcucugauagagguacagggaaccgcgauucagcggaucuuguauugcgaugacccugucagccaacuaaagugcucccagguggcauucgaucuggacgaugguuuuuacacaaucucuagccgcaaucuccugucacaugagcagcccauuaguuucguuacccuuccauccuuuaacgaccacagcuucgugaauaucacugucucugccucauuuggcgggcauaguggagcuaaccugauugccagcgauacgacaauaaauggcuucuccucuuuuuguguggacacccgacaguucacuaucucguuguuuuauaacguaaccaauagcuacgguuacguguccaagucacaagauaguaacugcccuuucacacuccagucuguuaaugacuaucugagcuuuuccaaauucugugucucaaccagcuuacuggcaucugccugcacuauugaccuauucggguaccccgaauuuggcuccggagugaaguucacaagucucuauuuucaguucacgaaaggcgagcugaucaccgggacuccaaagccccuugaaggagugacagaugucagcuuuaugaccuuggacguuuguacaaaauacacuaucuaugguuucaagggcgaggggauuauaacccugacgaacucuuccuuucucgcuggaguguacuauaccucagauaguggccagcugcuugccuucaaaaaugugacaagcggugcaguauacucggucacuccuugcuccuuuucugaacaagcggcuuacguggacgaugacaucguuggggugauuagcucacugaguuccucuaccuucaacagcacaagagaguugccaggcuuuuucuaucacuccaaugauggaucaaacuguacugagccgguccucguguacagcaauaucggcguuugcaagagugggucuauuggauaugugcccucccagagcggccagguaaagaucgccccuaccgucacggguaacauaucgaucccaacaaacuucucaaugucuauuaggaccgaauaccugcaguuauauaauacucccgugaguguggacugugcaacauacgucugcaacggaaauucccgguguaaacaacugcuaacccaguauacugccgcuugcaagaccaucgagagcgcccuccagcugucugcacgucuugaaagcguugaggugaacuccauguugacaauuucagaugaagcucugcagcucgccacgaucaguagcuuuaauggggacggcuacaacuucaccaauguacugggugugucugucuacgauccugcgucccgcagagugguucaaaagaggucauuuauagaggacuuacuguucaacaagguggucacuaauggccuugggacaguggaugaggacuauaaacggugcaguaacggacgaagcguugccgacuuggugugugcucaguacuauuccggcgucaugguacucccaggggugguugaugcagaaaagcugcauauguacucugccucgcuaauuggaggcauggugcuggguggguuuaccagcgcugccgcacuccccuucucauaugcgguccaggcccgccugaauuaccuugcuuugcaaacagacgugcugcagagaaaccagcaguuacucgccgaguccuuuaauagugcaaucggaaacauuacuucugcuuucgaaagcguaaaggaggccaucucccaaaccucaaaaggccugaauacgguggcacacgcccuuacaaagguccaggaaguugugaacucucagggugcugcgcugacccaguugacugugcaacuccagcacaacuuucaggccauaagcaguuccaucgaugacauuuauagcaggcuggauccgccuucugcagacgcucaggucgaucggcuaaucaccggccgccugucagcccucaaugccuucguggcucaaacacugacuaaauacaccgagguucaggcauccagaaaacuugcccagcaaaaaguaaacgagugcgugaagagucagagccagagguacggguuuuguggaggcgacggggaacauauuuucucguugguccaggcggcuccacaaggacuguuauuucuccacacagugcugguucccucugauuucguggacgucaucgccauagcaggccuuugcgugaaugaugagauugcccugacgcuacgugaaccuggucucguacuguucacccaugaguugcagaaccacacugcuacagaguauuuugucuccagccggcgaauguucgaacccagaaagccaaccgugucagacuuuguucagaucgagaguuguguggucacuuacgugaaucugacaagggaucaguuaccugacguuauccccgacuauauugaugugaacaaaacccucuacgaaauccuggcaucucuuccaaaucgcacggggccgucccugccuuuggacgucuucaacgccacuuaucucaaucugaccggagagauugcggaucuagaacaacggagcgagucacugagaaacacaaccgaggaacuucagagucucauauacaauaucaacaauacucugguggacuuggaguggcugaacaggguagaaacauauauuaaguggcccuggugggugugguuaaucauuuuuaucguucucauauucgucgugagccugcuuguguuuugcuguaucuccaccggcugcugugguugcuguggcugcugcugugcuugcuucucuggguguugccgcggaccacgacugcagcccuacgaggucuuugaaaaaguacacgugcagugaggacuaguuauaagacugacuagcccgaugggccucccaacgggcccuccuccccuccuugcaccgagauuaauaaaaaaaaaaaaaaaaaaaaaaaaaaaaaaaaaaaaaaaaaaaaaaaaaaaaaaaaaaaaaaaaugcaucccccccccccccccccccccccccccccccaaaggcucuuuucagagccaccagaauu

SEQ ID NO: 15215 - RNA, 4186 nt, Artificial Sequence
  PEDV/NPL-PEDv/2013/P10__AHZ94887.1 spike protein mRNA human (variant)
aggagaaagcuuaccaugaagucucugaccuacuucuggcucuuucuucccgugcuguccacauugucuuuaccucaggacgucacuagaugcucagccaacacgaauuucaggcgguuuuucaguaaauuuaacguucaagcuccagcagugguagugcugggcggguaucuaccgaucggagagaaucagggugucaacagcaccugguacugugccggccagcaccccacagcguccggggugcauggaauuuucguuucucacauacgcggcggucauggguuugaaaucggaauuucgcaggagccuuucgauccaucaggcuaucaacucuaccugcacaaggcuacuaauggcaacaccaaugccacagcacgacuucguaucugccaguuucccagcauuaaaacccuggggccuacugccaacaaugacgugacaaccggaagaaacuguuuguucaauaaggcuaucccagcacauaugagugaacacuccgucguggguauaacgugggauaacgacaggguaacuguuuuuagcgauaaaaucuauuacuucuauuuuaagaaugacuggagccggguggccaccaagugcuacaacuccggcgggugugcuaugcaguacgucuaugagcccacauacuauaugcucaaugugacuucagccggagaagauggcauuaguuaccagccuugcaccgcgaacuguaucgguuaugcagccaacguguucgcuacagagccaaaugggcacauuccggagggauucagcuuuaacaauugguuccugcugucuaacgacuccacccucguccauggcaaaguugugucaaaucaacccuuacugguaaacugccuuuuggccaucccuaagauauacggccuggggcaguuuuucagcuuuaaucagacgauugauggaguguguaacggugcagcuguccagcgcgccccagaagcgcuaagauucaauaucaacgacauuagugugauccucgccgagggcucuaucguucugcacacugcacuugggacaaauuuuuccuucgugugcagcaacucgucuaauccccaucuggcuaccuuugccauuccuuugggagcuacucaagucccauauuacuguuucuuuaaaguggauacauacaacuccaccguauauaaguuccucgccguucugcccccgacggugagggaaauagucaucaccaaauacggcgacguguaugucaaugguuuuggguacuuacaccugggccuccuugaugcagugacaauuaacuucacuggacacggcaccgacgacgauguuucaggguucuggacaaucgccaguacuaacuuuguggacgcucugauagagguacagggaaccgcgauucagcggaucuuguauugcgaugacccugucagccaacuaaagugcucccagguggcauucgaucuggacgaugguuuuuacacaaucucuagccgcaaucuccugucacaugagcagcccauuaguuucguuacccuuccauccuuuaacgaccacagcuucgugaauaucacugucucugccucauuuggcgggcauaguggagcuaaccugauugccagcgauacgacaauaaauggcuucuccucuuuuuguguggacacccgacaguucacuaucucguuguuuuauaacguaaccaauagcuacgguuacguguccaagucacaagauaguaacugcccuuucacacuccagucuguuaaugacuaucugagcuuuuccaaauucugugucucaaccagcuuacuggcaucugccugcacuauugaccuauucggguaccccgaauuuggcuccggagugaaguucacaagucucuauuuucaguucacgaaaggcgagcugaucaccgggacuccaaagccccuugaaggagugacagaugucagcuuuaugaccuuggacguuuguacaaaauacacuaucuaugguuucaagggcgaggggauuauaacccugacgaacucuuccuuucucgcuggaguguacuauaccucagauaguggccagcugcuugccuucaaaaaugugacaagcggugcaguauacucggucacuccuugcuccuuuucugaacaagcggcuuacguggacgaugacaucguuggggugauuagcucacugaguuccucuaccuucaacagcacaagagaguugccaggcuuuuucuaucacuccaaugauggaucaaacuguacugagccgguccucguguacagcaauaucggcguuugcaagagugggucuauuggauaugugcccucccagagcggccagguaaagaucgccccuaccgucacggguaacauaucgaucccaacaaacuucucaaugucuauuaggaccgaauaccugcaguuauauaauacucccgugaguguggacugugcaacauacgucugcaacggaaauucccgguguaaacaacugcuaacccaguauacugccgcuugcaagaccaucgagagcgcccuccagcugucugcacgucuugaaagcguugaggugaacuccauguugacaauuucagaugaagcucugcagcucgccacgaucaguagcuuuaauggggacggcuacaacuucaccaauguacugggugugucugucuacgauccugcgucccgcagagugguucaaaagaggucauuuauagaggacuuacuguucaacaagguggucacuaauggccuugggacaguggaugaggacuauaaacggugcaguaacggacgaagcguugccgacuuggugugugcucaguacuauuccggcgucaugguacucccaggggugguugaugcagaaaagcugcauauguacucugccucgcuaauuggaggcauggugcuggguggguuuaccagcgcugccgcacuccccuucucauaugcgguccaggcccgccugaauuaccuugcuuugcaaacagacgugcugcagagaaaccagcaguuacucgccgaguccuuuaauagugcaaucggaaacauuacuucugcuuucgaaagcguaaaggaggccaucucccaaaccucaaaaggccugaauacgguggcacacgcccuuacaaagguccaggaaguugugaacucucagggugcugcgcugacccaguugacugugcaacuccagcacaacuuucaggccauaagcaguuccaucgaugacauuuauagcaggcuggauccgccuucugcagacgcucaggucgaucggcuaaucaccggccgccugucagcccucaaugccuucguggcucaaacacugacuaaauacaccgagguucaggcauccagaaaacuugcccagcaaaaaguaaacgagugcgugaagagucagagccagagguacggguuuuguggaggcgacggggaacauauuuucucguugguccaggcggcuccacaaggacuguuauuucuccacacagugcugguucccucugauuucguggacgucaucgccauagcaggccuuugcgugaaugaugagauugcccugacgcuacgugaaccuggucucguacuguucacccaugaguugcagaaccacacugcuacagaguauuuugucuccagccggcgaauguucgaacccagaaagccaaccgugucagacuuuguucagaucgagaguuguguggucacuuacgugaaucugacaagggaucaguuaccugacguuauccccgacuauauugaugugaacaaaacccucuacgaaauccuggcaucucuuccaaaucgcacggggccgucccugccuuuggacgucuucaacgccacuuaucucaaucugaccggagagauugcggaucuagaacaacggagcgagucacugagaaacacaaccgaggaacuucagagucucauauacaauaucaacaauacucugguggacuuggaguggcugaacaggguagaaacaugaggacuaguuauaagacugacuagcccgaugggccucccaacgggcccuccuccccuccuugcaccgagauuaauaaaaaaaaaaaaaaaaaaaaaaaaaaaaaaaaaaaaaaaaaaaaaaaaaaaaaaaaaaaaaaaaugcaucccccccccccccccccccccccccccccccaaaggcucuuuucagagccaccagaauu

SEQ ID NO: 15216 - RNA, 4267 nt, Artificial Sequence
  PEDV/NPL-PEDv/2013/P10__AHZ94887.1 spike protein mRNA human (variant)
aggagaaagcuuaccaugaagucucugaccuacuucuggcucuuucuucccgugcuguccacauugucuuuaccucaggacgucacuagaugcucagccaacacgaauuucaggcgguuuuucaguaaauuuaacguucaagcuccagcagugguagugcugggcggguaucuaccgaucggagagaaucagggugucaacagcaccugguacugugccggccagcaccccacagcguccggggugcauggaauuuucguuucucacauacgcggcggucauggguuugaaaucggaauuucgcaggagccuuucgauccaucaggcuaucaacucuaccugcacaaggcuacuaauggcaacaccaaugccacagcacgacuucguaucugccaguuucccagcauuaaaacccuggggccuacugccaacaaugacgugacaaccggaagaaacuguuuguucaauaaggcuaucccagcacauaugagugaacacuccgucguggguauaacgugggauaacgacaggguaacuguuuuuagcgauaaaaucuauuacuucuauuuuaagaaugacuggagccggguggccaccaagugcuacaacuccggcgggugugcuaugcaguacgucuaugagcccacauacuauaugcucaaugugacuucagccggagaagauggcauuaguuaccagccuugcaccgcgaacuguaucgguuaugcagccaacguguucgcuacagagccaaaugggcacauuccggagggauucagcuuuaacaauugguuccugcugucuaacgacuccacccucguccauggcaaaguugugucaaaucaacccuuacugguaaacugccuuuuggccaucccuaagauauacggccuggggcaguuuuucagcuuuaaucagacgauugauggaguguguaacggugcagcuguccagcgcgccccagaagcgcuaagauucaauaucaacgacauuagugugauccucgccgagggcucuaucguucugcacacugcacuugggacaaauuuuuccuucgugugcagcaacucgucuaauccccaucuggcuaccuuugccauuccuuugggagcuacucaagucccauauuacuguuucuuuaaaguggauacauacaacuccaccguauauaaguuccucgccguucugcccccgacggugagggaaauagucaucaccaaauacggcgacguguaugucaaugguuuuggguacuuacaccugggccuccuugaugcagugacaauuaacuucacuggacacggcaccgacgacgauguuucaggguucuggacaaucgccaguacuaacuuuguggacgcucugauagagguacagggaaccgcgauucagcggaucuuguauugcgaugacccugucagccaacuaaagugcucccagguggcauucgaucuggacgaugguuuuuacacaaucucuagccgcaaucuccugucacaugagcagcccauuaguuucguuacccuuccauccuuuaacgaccacagcuucgugaauaucacugucucugccucauuuggcgggcauaguggagcuaaccugauugccagcgauacgacaauaaauggcuucuccucuuuuuguguggacacccgacaguucacuaucucguuguuuuauaacguaaccaauagcuacgguuacguguccaagucacaagauaguaacugcccuuucacacuccagucuguuaaugacuaucugagcuuuuccaaauucugugucucaaccagcuuacuggcaucugccugcacuauugaccuauucggguaccccgaauuuggcuccggagugaaguucacaagucucuauuuucaguucacgaaaggcgagcugaucaccgggacuccaaagccccuugaaggagugacagaugucagcuuuaugaccuuggacguuuguacaaaauacacuaucuaugguuucaagggcgaggggauuauaacccugacgaacucuuccuuucucgcuggaguguacuauaccucagauaguggccagcugcuugccuucaaaaaugugacaagcggugcaguauacucggucacuccuugcuccuuuucugaacaagcggcuuacguggacgaugacaucguuggggugauuagcucacugaguuccucuaccuucaacagcacaagagaguugccaggcuuuuucuaucacuccaaugauggaucaaacuguacugagccgguccucguguacagcaauaucggcguuugcaagagugggucuauuggauaugugcccucccagagcggccagguaaagaucgccccuaccgucacggguaacauaucgaucccaacaaacuucucaaugucuauuaggaccgaauaccugcaguuauauaauacucccgugaguguggacugugcaacauacgucugcaacggaaauucccgguguaaacaacugcuaacccaguauacugccgcuugcaagaccaucgagagcgcccuccagcugucugcacgucuugaaagcguugaggugaacuccauguugacaauuucagaugaagcucugcagcucgccacgaucaguagcuuuaauggggacggcuacaacuucaccaauguacugggugugucugucuacgauccugcgucccgcagagugguucaaaagaggucauuuauagaggacuuacuguucaacaagguggucacuaauggccuugggacaguggaugaggacuauaaacggugcaguaacggacgaagcguugccgacuuggugugugcucaguacuauuccggcgucaugguacucccaggggugguugaugcagaaaagcugcauauguacucugccucgcuaauuggaggcauggugcuggguggguuuaccagcgcugccgcacuccccuucucauaugcgguccaggcccgccugaauuaccuugcuuugcaaacagacgugcugcagagaaaccagcaguuacucgccgaguccuuuaauagugcaaucggaaacauuacuucugcuuucgaaagcguaaaggaggccaucucccaaaccucaaaaggccugaauacgguggcacacgcccuuacaaagguccaggaaguugugaacucucagggugcugcgcugacccaguugacugugcaacuccagcacaacuuucaggccauaagcaguuccaucgaugacauuuauagcaggcuggauccgccuucugcagacgcucaggucgaucggcuaaucaccggccgccugucagcccucaaugccuucguggcucaaacacugacuaaauacaccgagguucaggcauccagaaaacuugcccagcaaaaaguaaacgagugcgugaagagucagagccagagguacggguuuuguggaggcgacggggaacauauuuucucguugguccaggcggcuccacaaggacuguuauuucuccacacagugcugguucccucugauuucguggacgucaucgccauagcaggccuuugcgugaaugaugagauugcccugacgcuacgugaaccuggucucguacuguucacccaugaguugcagaaccacacugcuacagaguauuuugucuccagccggcgaauguucgaacccagaaagccaaccgugucagacuuuguucagaucgagaguuguguggucacuuacgugaaucugacaagggaucaguuaccugacguuauccccgacuauauugaugugaacaaaacccucuacgaaauccuggcaucucuuccaaaucgcacggggccgucccugccuuuggacgucuucaacgccacuuaucucaaucugaccggagagauugcggaucuagaacaacggagcgagucacugagaaacacaaccgaggaacuucagagucucauauacaauaucaacaauacucugguggacuuggaguggcugaacaggguagaaacaggcgguuauauucccgaggcuccacgcgauggccaggccuacgugcgaaaggacggggaauggguuuuacucagcaccuuuugaggacuaguuauaagacugacuagcccgaugggccucccaacgggcccuccuccccuccuugcaccgagauuaauaaaaaaaaaaaaaaaaaaaaaaaaaaaaaaaaaaaaaaaaaaaaaaaaaaaaaaaaaaaaaaaaugcaucccccccccccccccccccccccccccccccaaaggcucuuuucagagccaccagaauu

SEQ ID NO: 15217 - RNA, 4303 nt, Artificial Sequence
  MHV/S__BAK18575.1 spike protein mRNA human (1-1361)
aggagaaagcuuaccaugcuuagcguguucauccucuuucuucccuccugccugggcuacauuggggacuucagauguauaaacuuggucaauaccgauacaucuaacgccucagcuccuaguguuagcacugaggugguagacguguccaagggaaucgguacguauuacgucuuagauaggguguaucugaaugcaacccuacuccugacaggcuacuauccaguugacgggucuaacuaccggaaucuugcccugacuggaaccaacacauugucgcucaauugguauaaaccgcccuuucugucagaauuuaacgauggcauuuuugcgaaggugaaaaaucugaaggcuagccucccuaaagacaguaccuccuacuucccaacuaucgucauugguucuaacuuugugacaaccagcuacacgguaguuuuagagcccuauaaugggaucauaauggccuccaucugccaguacacuauuugucugcuuccuuauaccgauugcaagccaaacacaggaggcaauaaguugaucggcuucuggcacauugaccugaaaucacccguguguauccuaaagcgcaacuuuacuuucaaugucaacgcagauuggcucuacuuucauuucuaucaacaagggggaaccuuuuacgccuauuacgcugacgcagguagugccacaaccuuccuguucagcucuuacauaggcgaugugcuuacgcaguauuuugugcugccuuucgucugcacuccaacaaccacugggguuuucuccccgcaguacugggugacacccuugguaaaacgacaguaucucuucaacuuuaaucagaagggaaccauuacgucagcuguggacugugccagcaguuacaccucugaaaucaaaugcaagacacaguccaugaacccuaauacuggcgucuaugaucugagcgguuacaccgugcagccaguuggguuaguguaucguagagucaggaaccugcccgacugucggauugaggacuggcucgcggcaaagacagugccuucgccacuuaauugggaacgcaaaacuuuccaaaacugcaauuuuaaccugucuuccuugcuaagacugguacaggccggaucacucaguuguagcaauaucgaugcugccaagguuuacggcaugugcuucggcuccaugucuaucgacaaauuugcaauucccaacagcaggcggguggaucugcagcuuggaaauucaggguuccugcagaguuuuaacuacaagauagacacccgcgcuacauccugccaauuguauuacagccucgcccagucuaaugucaccgugaacaaucacaacccgucaaguuggaaccgaagauaugguuucaaugaugucgcgacuuuuggcagggggaaacaugacguggccuacgcagaggcuuguuucacgguuggagccagcuauugcccuugugcuaaccccuccaucgugucuccaugcacaaccggcaagccuaaauucgccaauugucccacugguaccacaaaccgggagugcaauguacuggcauuagggucgaaccuguuuaagugugauugcaccuguaauccaagcccccuaacuacauacgaccuccguugccugcagggccgcuccaugcuuggagucggcgaucacugugaaggguugggagugcuggaggacaagugcgguggcucaaacacgugcaauuguagugccgaugcuuucguugggugggcgaaagacucuugccucagcaacggaagaugucauaucuuuuccaaucugaugcuuaacggcauuaauucagguaccacuugcagcacagaccugcaauugccuaacaccgaaguggucacagggauaugugugaaguaugaucucuacggcauuacuggacagggcguauucaaagaggugaaggcagacuacuauaauucuuggcagaaccuguuauacgauguuaacgggaaucugaacggauuuagggacaucgucaccaauaaaacguaucuaacccgguccugcuacaguggucgagugagcgccgcuuaucaccaggaugccccagagccggcacuccuguaccgcaaccuuaagugugacuauguguucaauaacaauaucuuuagagaagagacacccuugaacuacuucgauucuuaccugggcugcgucguuaaugccgacaacuccacugaacaagcuguggaugccugugaccucaggauggggucaggacugugcgugaauuauaguaccgcacaccgggcgcgcacaagcguaucgacuggcuacaaguuaaccacguuugagccuuucacagucuccauugugaacgauucuguugaaagcgugggugggcuguaugagaugcagaucccaaccaauuuuacuauugcuucacaucaggaguucauacagacaagagcccccaaagucaccaucgacugugcagccuuugugugcggcgauuacacuaccugcaggcaacagcuuguugaauauggaaguuucugugacaacauuaaugcuaucuugggcgaggugaacaaccucaucgacacaaugcagcugcagguagccuccgcacuaauucaaggggucacgcugucuagccgucucgcugauggaauauccggccagaucgacgauauuaauuucucaccucugcuugguugcuuggggagccaguguagugaaggaaccauggccgcgcagggccggucuacuguggaggaccuguuauuugauaaggugaaacucuccgacgucgguuucguugaagccuacaacaauugcacaggcgggcaagaggugcgagaucugcuuuguguacagagcuuuaacggaaucaaggugcugccacccgucuugucggagaaucaggugucaggcuauaccgcuggggcaacagccucuaguauguucccgccuugguccgcugccgcaggaguuccauuuagccucucugugcaauacagaauuaacggccugggugucacuaugaaugugcuaagcgaaaaccagaaaaugaucgcguccgccuucaauaacgcuauaggggccauccaggagggauuugacgcaaccaauucagcucuggccaagauucagaguguugugaacgcaaaugccgaagcucucaacaaucugcuuaaccaauugagcaauagguucggcgcgaucucugccucccugcaggagauuuuaucacgccucgaugcacuggaagcucaggcccagaucgaccggcuuauaaacgguagacugacggcccuaaacgcuuacgucaguaagcaacucagcgauaugacacugauuaaaguauccgcagcccaggcgaucgagaaggugaaugagugcguuaaaucucagucgcccaggauuaacuuuuguggcaaugggaaccacaucuugagccuggugcagaaugcuccuuauggauuauacuuccuccauuuuucauauguccccaccuccuucacuaccgccaacgugaguccaggccugugcauaucuggggaccgcggacuugcaccuaaggccggcuacuucguacaagaugacggugaauggaaauuuacagggagcaauuauuacuaucccgagccaaucacugacaagaacuccguggucaugucaucuugugcuguuaauuacaccaaggcaccggaaguguuccugaacacaagcauuaguaauuugccugauuuuaaagaggagcucgacaagugguucaaaaaccagacguccguggcccccgaucugagccuagacuuugaaaagcugaaugucaccuuccuugaucucucugacgagaugaaccgaauccaggaagcgauuaaaaagcugaaugagucauacaucaacuugaaagaaauaggaacuuaugagauguacgugaaguggccaugguauguuuggcuguuaauuggccucgcugguguagccgugugcguccugcuguuuuucaucuguugcugcacaggcuguggguccugcuguuuuaagaaaugcggaaacuguugcgaugaguacggcgggcaccaagacaguaucgugauucacaauaucagcucgcaugaagauugaggacuaguuauaagacugacuagcccgaugggccucccaacgggcccuccuccccuccuugcaccgagauuaauaaaaaaaaaaaaaaaaaaaaaaaaaaaaaaaaaaaaaaaaaaaaaaaaaaaaaaaaaaaaaaaaugcaucccccccccccccccccccccccccccccccaaaggcucuuuucagagccaccagaauu

SEQ ID NO: 15218 - RNA, 4303 nt, Artificial Sequence
  MHV/S__BAK18575.1 spike protein mRNA human (1-1361)(A1073P_L1074P)
aggagaaagcuuaccaugcugagcguguucauccucuuucuucccuccugccugggcuacauuggggacuucagauguauaaacuuggucaauaccgauacaucuaacgccucagcuccuaguguuagcacugaggugguagacguguccaagggaaucgguacguauuacgucuuagauaggguguaucugaaugcaacccuacuccugacaggcuacuauccaguugacgggucuaacuaccggaaucuugcccugacuggaaccaacacauugucgcucaauugguauaaaccgcccuuucugucagaauuuaacgauggcauuuuugcgaaggugaaaaaucugaaggcuagccucccuaaagacaguaccuccuacuucccaacuaucgucauugguucuaacuuugugacaaccagcuacacgguaguuuuagagcccuauaaugggaucauaauggccuccaucugccaguacacuauuugucugcuuccuuauaccgauugcaagccaaacacaggaggcaauaaguugaucggcuucuggcacauugaccugaaaucacccguguguauccuaaagcgcaacuuuacuuucaaugucaacgcagauuggcucuacuuucauuucuaucaacaagggggaaccuuuuacgccuauuacgcugacgcagguagugccacaaccuuccuguucagcucuuacauaggcgaugugcuuacgcaguauuuugugcugccuuucgucugcacuccaacaaccacugggguuuucuccccgcaguacugggugacacccuugguaaaacgacaguaucucuucaacuuuaaucagaagggaaccauuacgucagcuguggacugugccagcaguuacaccucugaaaucaaaugcaagacacaguccaugaacccuaauacuggcgucuaugaucugagcgguuacaccgugcagccaguuggguuaguguaucguagagucaggaaccugcccgacugucggauugaggacuggcucgcggcaaagacagugccuucgccacuuaauugggaacgcaaaacuuuccaaaacugcaauuuuaaccugucuuccuugcuaagacugguacaggccggaucacucaguuguagcaauaucgaugcugccaagguuuacggcaugugcuucggcuccaugucuaucgacaaauuugcaauucccaacagcaggcggguggaucugcagcuuggaaauucaggguuccugcagaguuuuaacuacaagauagacacccgcgcuacauccugccaauuguauuacagccucgcccagucuaaugucaccgugaacaaucacaacccgucaaguuggaaccgaagauaugguuucaaugaugucgcgacuuuuggcagggggaaacaugacguggccuacgcagaggcuuguuucacgguuggagccagcuauugcccuugugcuaaccccuccaucgugucuccaugcacaaccggcaagccuaaauucgccaauugucccacugguaccacaaaccgggagugcaauguacuggcauuagggucgaaccuguuuaagugugauugcaccuguaauccaagcccccuaacuacauacgaccuccguugccugcagggccgcuccaugcuuggagucggcgaucacugugaaggguugggagugcuggaggacaagugcgguggcucaaacacgugcaauuguagugccgaugcuuucguugggugggcgaaagacucuugccucagcaacggaagaugucauaucuuuuccaaucugaugcuuaacggcauuaauucagguaccacuugcagcacagaccugcaauugccuaacaccgaaguggucacagggauaugugugaaguaugaucucuacggcauuacuggacagggcguauucaaagaggugaaggcagacuacuauaauucuuggcagaaccuguuauacgauguuaacgggaaucugaacggauuuagggacaucgucaccaauaaaacguaucuaacccgguccugcuacaguggucgagugagcgccgcuuaucaccaggaugccccagagccggcacuccuguaccgcaaccuuaagugugacuauguguucaauaacaauaucuuuagagaagagacacccuugaacuacuucgauucuuaccugggcugcgucguuaaugccgacaacuccacugaacaagcuguggaugccugugaccucaggauggggucaggacugugcgugaauuauaguaccgcacaccgggcgcgcacaagcguaucgacuggcuacaaguuaaccacguuugagccuuucacagucuccauugugaacgauucuguugaaagcgugggugggcuguaugagaugcagaucccaaccaauuuuacuauugcuucacaucaggaguucauacagacaagagcccccaaagucaccaucgacugugcagccuuugugugcggcgauuacacuaccugcaggcaacagcuuguugaauauggaaguuucugugacaacauuaaugcuaucuugggcgaggugaacaaccucaucgacacaaugcagcugcagguagccuccgcacuaauucaaggggucacgcugucuagccgucucgcugauggaauauccggccagaucgacgauauuaauuucucaccucugcuugguugcuuggggagccaguguagugaaggaaccauggccgcgcagggccggucuacuguggaggaccuguuauuugauaaggugaaacucuccgacgucgguuucguugaagccuacaacaauugcacaggcgggcaagaggugcgagaucugcuuuguguacagagcuuuaacggaaucaaggugcugccacccgucuugucggagaaucaggugucaggcuauaccgcuggggcaacagccucuaguauguucccgccuugguccgcugccgcaggaguuccauuuagccucucugugcaauacagaauuaacggccugggugucacuaugaaugugcuaagcgaaaaccagaaaaugaucgcguccgccuucaauaacgcuauaggggccauccaggagggauuugacgcaaccaauucagcucuggccaagauucagaguguugugaacgcaaaugccgaagcucucaacaaucugcuuaaccaauugagcaauagguucggcgcgaucucugccucccugcaggagauuuuaucacgccucgaucccccugaagcacaggcucagaucgaccggcugauaaacgguagacuuacggcccugaacgccuacgucaguaagcaacuaagcgauaugacacucauuaaaguauccgcugcacaggccaucgagaaggugaaugagugcguuaaaucucagucgcccaggauuaacuuuuguggcaaugggaaccacauccugagcuuggugcagaaugcgccauauggacuguacuucuuacauuuuucauaugucccuaccuccuucacuaccgcuaacgugagucccggccucugcauaucuggggaccgcggacuggccccaaaggcaggcuacuucguacaagaugacggugaauggaaauuuacagggagcaauuauuacuauccggagccuaucacugacaagaacuccguggucaugucaucuugugccguuaauuacaccaaggcucccgaaguguuccuuaacacaagcauuaguaaucugccagauuuuaaagaggaguuggacaagugguucaaaaaccagacguccguggcacccgaucucagccuggacuuugaaaagcuaaaugucaccuuccuggaucuuucugacgagaugaaccgaauccaggaagccauuaaaaagcucaaugagucauacaucaaccugaaagaaauaggaacuuaugagauguacgugaaguggccuugguauguuugguugcugauuggcuuagcggguguagcugugugcguccuccuguuuuucaucuguugcugcacaggcuguggguccugcuguuuuaagaaaugcggaaacuguugcgaugaguacggcgggcaccaagacaguaucgugauucacaauaucagcucgcaugaagauugaggacuaguuauaagacugacuagcccgaugggccucccaacgggcccuccuccccuccuugcaccgagauuaauaaaaaaaaaaaaaaaaaaaaaaaaaaaaaaaaaaaaaaaaaaaaaaaaaaaaaaaaaaaaaaaaugcaucccccccccccccccccccccccccccccccaaaggcucuuuucagagccaccagaauu

SEQ ID NO: 15219 - RNA, 4111 nt, Artificial Sequence
  MHV/S__BAK18575.1 spike protein mRNA human (variant)
aggagaaagcuuaccaugcugagcguguucauccucuuucuucccuccugccugggcuacauuggggacuucagauguauaaacuuggucaauaccgauacaucuaacgccucagcuccuaguguuagcacugaggugguagacguguccaagggaaucgguacguauuacgucuuagauaggguguaucugaaugcaacccuacuccugacaggcuacuauccaguugacgggucuaacuaccggaaucuugcccugacuggaaccaacacauugucgcucaauugguauaaaccgcccuuucugucagaauuuaacgauggcauuuuugcgaaggugaaaaaucugaaggcuagccucccuaaagacaguaccuccuacuucccaacuaucgucauugguucuaacuuugugacaaccagcuacacgguaguuuuagagcccuauaaugggaucauaauggccuccaucugccaguacacuauuugucugcuuccuuauaccgauugcaagccaaacacaggaggcaauaaguugaucggcuucuggcacauugaccugaaaucacccguguguauccuaaagcgcaacuuuacuuucaaugucaacgcagauuggcucuacuuucauuucuaucaacaagggggaaccuuuuacgccuauuacgcugacgcagguagugccacaaccuuccuguucagcucuuacauaggcgaugugcuuacgcaguauuuugugcugccuuucgucugcacuccaacaaccacugggguuuucuccccgcaguacugggugacacccuugguaaaacgacaguaucucuucaacuuuaaucagaagggaaccauuacgucagcuguggacugugccagcaguuacaccucugaaaucaaaugcaagacacaguccaugaacccuaauacuggcgucuaugaucugagcgguuacaccgugcagccaguuggguuaguguaucguagagucaggaaccugcccgacugucggauugaggacuggcucgcggcaaagacagugccuucgccacuuaauugggaacgcaaaacuuuccaaaacugcaauuuuaaccugucuuccuugcuaagacugguacaggccggaucacucaguuguagcaauaucgaugcugccaagguuuacggcaugugcuucggcuccaugucuaucgacaaauuugcaauucccaacagcaggcggguggaucugcagcuuggaaauucaggguuccugcagaguuuuaacuacaagauagacacccgcgcuacauccugccaauuguauuacagccucgcccagucuaaugucaccgugaacaaucacaacccgucaaguuggaaccgaagauaugguuucaaugaugucgcgacuuuuggcagggggaaacaugacguggccuacgcagaggcuuguuucacgguuggagccagcuauugcccuugugcuaaccccuccaucgugucuccaugcacaaccggcaagccuaaauucgccaauugucccacugguaccacaaaccgggagugcaauguacuggcauuagggucgaaccuguuuaagugugauugcaccuguaauccaagcccccuaacuacauacgaccuccguugccugcagggccgcuccaugcuuggagucggcgaucacugugaaggguugggagugcuggaggacaagugcgguggcucaaacacgugcaauuguagugccgaugcuuucguugggugggcgaaagacucuugccucagcaacggaagaugucauaucuuuuccaaucugaugcuuaacggcauuaauucagguaccacuugcagcacagaccugcaauugccuaacaccgaaguggucacagggauaugugugaaguaugaucucuacggcauuacuggacagggcguauucaaagaggugaaggcagacuacuauaauucuuggcagaaccuguuauacgauguuaacgggaaucugaacggauuuagggacaucgucaccaauaaaacguaucuaacccgguccugcuacaguggucgagugagcgccgcuuaucaccaggaugccccagagccggcacuccuguaccgcaaccuuaagugugacuauguguucaauaacaauaucuuuagagaagagacacccuugaacuacuucgauucuuaccugggcugcgucguuaaugccgacaacuccacugaacaagcuguggaugccugugaccucaggauggggucaggacugugcgugaauuauaguaccgcacaccgggcgcgcacaagcguaucgacuggcuacaaguuaaccacguuugagccuuucacagucuccauugugaacgauucuguugaaagcgugggugggcuguaugagaugcagaucccaaccaauuuuacuauugcuucacaucaggaguucauacagacaagagcccccaaagucaccaucgacugugcagccuuugugugcggcgauuacacuaccugcaggcaacagcuuguugaauauggaaguuucugugacaacauuaaugcuaucuugggcgaggugaacaaccucaucgacacaaugcagcugcagguagccuccgcacuaauucaaggggucacgcugucuagccgucucgcugauggaauauccggccagaucgacgauauuaauuucucaccucugcuugguugcuuggggagccaguguagugaaggaaccauggccgcgcagggccggucuacuguggaggaccuguuauuugauaaggugaaacucuccgacgucgguuucguugaagccuacaacaauugcacaggcgggcaagaggugcgagaucugcuuuguguacagagcuuuaacggaaucaaggugcugccacccgucuugucggagaaucaggugucaggcuauaccgcuggggcaacagccucuaguauguucccgccuugguccgcugccgcaggaguuccauuuagccucucugugcaauacagaauuaacggccugggugucacuaugaaugugcuaagcgaaaaccagaaaaugaucgcguccgccuucaauaacgcuauaggggccauccaggagggauuugacgcaaccaauucagcucuggccaagauucagaguguugugaacgcaaaugccgaagcucucaacaaucugcuuaaccaauugagcaauagguucggcgcgaucucugccucccugcaggagauuuuaucacgccucgaucccccugaagcacaggcucagaucgaccggcugauaaacgguagacuuacggcccugaacgccuacgucaguaagcaacuaagcgauaugacacucauuaaaguauccgcugcacaggccaucgagaaggugaaugagugcguuaaaucucagucgcccaggauuaacuuuuguggcaaugggaaccacauccugagcuuggugcagaaugcgccauauggacuguacuucuuacauuuuucauaugucccuaccuccuucacuaccgcuaacgugagucccggccucugcauaucuggggaccgcggacuggccccaaaggcaggcuacuucguacaagaugacggugaauggaaauuuacagggagcaauuauuacuauccggagccuaucacugacaagaacuccguggucaugucaucuugugccguuaauuacaccaaggcucccgaaguguuccuuaacacaagcauuaguaaucugccagauuuuaaagaggaguuggacaagugguucaaaaaccagacguccguggcacccgaucucagccuggacuuugaaaagcuaaaugucaccuuccuggaucuuucugacgagaugaaccgaauccaggaagccauuaaaaagcucaaugagucauacaucaaccugaaagaaauaggaacuuaugagaugugaggacuaguuauaagacugacuagcccgaugggccucccaacgggcccuccuccccuccuugcaccgagauuaauaaaaaaaaaaaaaaaaaaaaaaaaaaaaaaaaaaaaaaaaaaaaaaaaaaaaaaaaaaaaaaaaugcaucccccccccccccccccccccccccccccccaaaggcucuuuucagagccaccagaauu

SEQ ID NO: 15220 - RNA, 4192 nt, Artificial Sequence
  MHV/S__BAK18575.1 spike protein mRNA human (variant)
aggagaaagcuuaccaugcugagcguguucauccucuuucuucccuccugccugggcuacauuggggacuucagauguauaaacuuggucaauaccgauacaucuaacgccucagcuccuaguguuagcacugaggugguagacguguccaagggaaucgguacguauuacgucuuagauaggguguaucugaaugcaacccuacuccugacaggcuacuauccaguugacgggucuaacuaccggaaucuugcccugacuggaaccaacacauugucgcucaauugguauaaaccgcccuuucugucagaauuuaacgauggcauuuuugcgaaggugaaaaaucugaaggcuagccucccuaaagacaguaccuccuacuucccaacuaucgucauugguucuaacuuugugacaaccagcuacacgguaguuuuagagcccuauaaugggaucauaauggccuccaucugccaguacacuauuugucugcuuccuuauaccgauugcaagccaaacacaggaggcaauaaguugaucggcuucuggcacauugaccugaaaucacccguguguauccuaaagcgcaacuuuacuuucaaugucaacgcagauuggcucuacuuucauuucuaucaacaagggggaaccuuuuacgccuauuacgcugacgcagguagugccacaaccuuccuguucagcucuuacauaggcgaugugcuuacgcaguauuuugugcugccuuucgucugcacuccaacaaccacugggguuuucuccccgcaguacugggugacacccuugguaaaacgacaauaucucuucaacuuuaaucagaagggaaccauuacgucagcuguggacugugccagcaguuacaccucugaaaucaaaugcaagacacaguccaugaacccuaauacuggcgucuaugaucugagcgguuacaccgugcagccaguuggguuaguguaucguagagucaggaaccugcccgacugucggauugaggacuggcucgcggcaaagacagugccuucgccacuuaauugggaacgcaaaacuuuccaaaacugcaauuuuaaccugucuuccuugcuaagacugguacaggccggaucacucaguuguagcaauaucgaugcugccaagguuuacggcaugugcuucggcuccaugucuaucgacaaauuugcaauucccaacagcaggcggguggaucugcagcuuggaaauucaggguuccugcagaguuuuaacuacaagauagacacccgcgcuacauccugccaauuguauuacagccucgcccagucuaaugucaccgugaacaaucacaacccgucaaguuggaaccgaagauaugguuucaaugaugucgcgacuuuuggcagggggaaacaugacguggccuacgcagaggcuuguuucacgguuggagccagcuauugcccuugugcuaaccccuccaucgugucuccaugcacaaccggcaagccuaaauucgccaauugucccacugguaccacaaaccgggagugcaauguacuggcauuagggucgaaccuguuuaagugugauugcaccuguaauccaagcccccuaacuacauacgaccuccguugccugcagggccgcuccaugcuuggagucggcgaucacugugaaggguugggagugcuggaggacaagugcgguggcucaaacacgugcaauuguagugccgaugcuuucguugggugggcgaaagacucuugccucagcaacggaagaugucauaucuuuuccaaucugaugcuuaacggcauuaauucagguaccacuugcagcacagaccugcaauugccuaacaccgaaguggucacagggauaugugugaaguaugaucucuacggcauuacuggacagggcguauucaaagaggugaaggcagacuacuauaauucuuggcagaaccuguuauacgauguuaacgggaaucugaacggauuuagggacaucgucaccaauaaaacguaucuaacccgguccugcuacaguggucgagugagcgccgcuuaucaccaggaugccccagagccggcacuccuguaccgcaaccuuaagugugacuauguguucaauaacaauaucuuuagagaagagacacccuugaacuacuucgauucuuaccugggcugcgucguuaaugccgacaacuccacugaacaagcuguggaugccugugaccucaggauggggucaggacugugcgugaauuauaguaccgcacaccgggcgcgcacaagcguaucgacuggcuacaaguuaaccacguuugagccuuucacagucuccauugugaacgauucuguugaaagcgugggugggcuguaugagaugcagaucccaaccaauuuuacuauugcuucacaucaggaguucauacagacaagagcccccaaagucaccaucgacugugcagccuuugugugcggcgauuacacuaccugcaggcaacagcuuguugaauauggaaguuucugugacaacauuaaugcuaucuugggcgaggugaacaaccucaucgacacaaugcagcugcagguagccuccgcacuaauucaaggggucacgcugucuagccgucucgcugauggaauauccggccagaucgacgauauuaauuucucaccucugcuugguugcuuggggagccaguguagugaaggaaccauggccgcgcagggccggucuacuguggaggaccuguuauuugauaaggugaaacucuccgacgucgguuucguugaagccuacaacaauugcacaggcgggcaagaggugcgagaucugcuuuguguacagagcuuuaacggaaucaaggugcugccacccgucuugucggagaaucaggugucaggcuauaccgcuggggcaacagccucuaguauguucccgccuugguccgcugccgcaggaguuccauuuagccucucugugcaauacagaauuaacggccugggugucacuaugaaugugcuaagcgaaaaccagaaaaugaucgcguccgccuucaauaacgcuauaggggccauccaggagggauuugacgcaaccaauucagcucuggccaagauucagaguguugugaacgcaaaugccgaagcucucaacaaucugcuuaaccaauugagcaauagguucggcgcgaucucugccucccugcaggagauuuuaucacgccucgaucccccugaagcacaggcucagaucgaccggcugauaaacgguagacuuacggcccugaacgccuacgucaguaagcaacuaagcgauaugacacucauuaaaguauccgcugcacaggccaucgagaaggugaaugagugcguuaaaucucagucgcccaggauuaacuuuuguggcaaugggaaccacauccugagcuuggugcagaaugcgccauauggacuguacuucuuacauuuuucauaugucccuaccuccuucacuaccgcuaacgugagucccggccucugcauaucuggggaccgcggacuggccccaaaggcaggcuacuucguacaagaugacggugaauggaaauuuacagggagcaauuauuacuauccggagccuaucacugacaagaacuccguggucaugucaucuugugccguuaauuacaccaaggcucccgaaguguuccuuaacacaagcauuaguaaucugccagauuuuaaagaggaguuggacaagugguucaaaaaccagacguccguggcacccgaucucagccuggacuuugaaaagcuaaaugucaccuuccuggaucuuucugacgagaugaaccgaauccaggaagccauuaaaaagcucaaugagucauacaucaaccugaaagaaauaggaacuuaugagaugggcgguuacauuccugaggcgccacgggauggccaggcuuaugugcguaaggacggggaauggguuuugcuguccacauuuugaggacuaguuauaagacugacuagcccgaugggccucccaacgggcccuccuccccuccuugcaccgagauuaauaaaaaaaaaaaaaaaaaaaaaaaaaaaaaaaaaaaaaaaaaaaaaaaaaaaaaaaaaaaaaaaaugcaucccccccccccccccccccccccccccccccaaaggcucuuuucagagccaccagaauu

SEQ ID NO: 15221-22728 - skipped (7508 entries)

SEQ ID NO: 22729 - DNA, 23 bp, Artificial Sequence
  Primer 2019-nCoV_sgE-forward
cgatctcttgtagatctgttctc

SEQ ID NO: 22730 - DNA, 22 bp, Artificial Sequence
  Primer 2019-nCoV_sgE-reverse
atattgcagcagtacgcacaca

SEQ ID NO: 22731 - DNA, 26 bp, Artificial Sequence
  Primer 2019-nCoV_sgE-probe
acactagccatccttactgcgcttcg

SEQ ID NO: 22732 - protein, 1273 aa, Artificial Sequence
  SARS-CoV-2/Wuhan/WIV05/2019__EPI_ISL_402128 spike protein (1-1273)(K986P_V987P_F817P_A892P_A899P_A942P)
MFVFLVLLPLVSSQCVNLTTRTQLPPAYTNSFTRGVYYPDKVFRSSVLHSTQDLFLPFFSNVTWFHAIHVSGTNGTKRFDNPVLPFNDGVYFASTEKSNIIRGWIFGTTLDSKTQSLLIVNNATNVVIKVCEFQFCNDPFLGVYYHKNNKSWMESEFRVYSSANNCTFEYVSQPFLMDLEGKQGNFKNLREFVFKNIDGYFKIYSKHTPINLVRDLPQGFSALEPLVDLPIGINITRFQTLLALHRSYLTPGDSSSGWTAGAAAYYVGYLQPRTFLLKYNENGTITDAVDCALDPLSETKCTLKSFTVEKGIYQTSNFRVQPTESIVRFPNITNLCPFGEVFNATRFASVYAWNRKRISNCVADYSVLYNSASFSTFKCYGVSPTKLNDLCFTNVYADSFVIRGDEVRQIAPGQTGKIADYNYKLPDDFTGCVIAWNSNNLDSKVGGNYNYLYRLFRKSNLKPFERDISTEIYQAGSTPCNGVEGFNCYFPLQSYGFQPTNGVGYQPYRVVVLSFELLHAPATVCGPKKSTNLVKNKCVNFNFNGLTGTGVLTESNKKFLPFQQFGRDIADTTDAVRDPQTLEILDITPCSFGGVSVITPGTNTSNQVAVLYQDVNCTEVPVAIHADQLTPTWRVYSTGSNVFQTRAGCLIGAEHVNNSYECDIPIGAGICASYQTQTNSPRRARSVASQSIIAYTMSLGAENSVAYSNNSIAIPTNFTISVTTEILPVSMTKTSVDCTMYICGDSTECSNLLLQYGSFCTQLNRALTGIAVEQDKNTQEVFAQVKQIYKTPPIKDFGGFNFSQILPDPSKPSKRSPIEDLLFNKVTLADAGFIKQYGDCLGDIAARDLICAQKFNGLTVLPPLLTDEMIAQYTSALLAGTITSGWTFGAGPALQIPFPMQMAYRFNGIGVTQNVLYENQKLIANQFNSAIGKIQDSLSSTPSALGKLQDVVNQNAQALNTLVKQLSSNFGAISSVLNDILSRLDPPEAEVQIDRLITGRLQSLQTYVTQQLIRAAEIRASANLAATKMSECVLGQSKRVDFCGKGYHLMSFPQSAPHGVVFLHVTYVPAQEKNFTTAPAICHDGKAHFPREGVFVSNGTHWFVTQRNFYEPQIITTDNTFVSGNCDVVIGIVNNTVYDPLQPELDSFKEELDKYFKNHTSPDVDLGDISGINASVVNIQKEIDRLNEVAKNLNESLIDLQELGKYEQYIKWPWYIWLGFIAGLIAIVMVTIMLCCMTSCCSCLKGCCSCGSCCKFDEDDSEPVLKGVKLHYT

SEQ ID NO: 22733 - protein, 383 aa, Artificial Sequence
  SARS-CoV-2/Wuhan/WIV05/2019__EPI_ISL_402128 spike protein (1-15,334-528) Ferritin construct
MFVFLVLLPLVSSQCNLCPFGEVFNATRFASVYAWNRKRISNCVADYSVLYNSASFSTFKCYGVSPTKLNDLCFTNVYADSFVIRGDEVRQIAPGQTGKIADYNYKLPDDFTGCVIAWNSNNLDSKVGGNYNYLYRLFRKSNLKPFERDISTEIYQAGSTPCNGVEGFNCYFPLQSYGFQPTNGVGYQPYRVVVLSFELLHAPATVCGPKGGGGSGGGGSDIIKLLNEQVNKEMQSSNLYMSMSSWCYTHSLDGAGLFLFDHAAEEYEHAKKLIIFLNENNVPVQLTSISAPEHKFEGLTQIFQKAYEHEQHISESINNIVDHAIKSKDHATFNFLQWYVAEQHEEEVLFKDILDKIELIGNENHGLYLADQYVKGIAKSRKS

SEQ ID NO: 22734 - protein, 249 aa, Artificial Sequence
  SARS-CoV-2/Wuhan/WIV05/2019__EPI_ISL_402128 spike protein (334-528) Foldon construct
MPMGSLQPLATLYLLGMLVASVLANLCPFGEVFNATRFASVYAWNRKRISNCVADYSVLYNSASFSTFKCYGVSPTKLNDLCFTNVYADSFVIRGDEVRQIAPGQTGKIADYNYKLPDDFTGCVIAWNSNNLDSKVGGNYNYLYRLFRKSNLKPFERDISTEIYQAGSTPCNGVEGFNCYFPLQSYGFQPTNGVGYQPYRVVVLSFELLHAPATVCGPKGSGGYIPEAPRDGQAYVRKDGEWVLLSTFL

SEQ ID NO: 22735 - protein, 375 aa, Artificial Sequence
  SARS-CoV-2/Wuhan/WIV05/2019__EPI_ISL_402128 spike protein (1-15,334-528) LumSynth construct
MFVFLVLLPLVSSQCNLCPFGEVFNATRFASVYAWNRKRISNCVADYSVLYNSASFSTFKCYGVSPTKLNDLCFTNVYADSFVIRGDEVRQIAPGQTGKIADYNYKLPDDFTGCVIAWNSNNLDSKVGGNYNYLYRLFRKSNLKPFERDISTEIYQAGSTPCNGVEGFNCYFPLQSYGFQPTNGVGYQPYRVVVLSFELLHAPATVCGPKGGGGSGGGGSGGQIYEGKLTAEGLRFGIVASRFNHALVDRLVEGAIDAIVRHGGREEDITLVRVPGSWEIPVAAGELARKEDIDAVIAIGVLIRGATPHFDYIASEVSKGLADLSLELRKPITFGVITADTLEQAIERAGTKHGNKGWEAALSAIEMANLFKSLR

SEQ ID NO: 22736 - protein, 362 aa, Artificial Sequence
  SARS-CoV-2/Wuhan/WIV05/2019__EPI_ISL_402128 spike protein (334-528) LumSynth construct
MQIYEGKLTAEGLRFGIVASRFNHALVDRLVEGAIDAIVRHGGREEDITLVRVPGSWEIPVAAGELARKEDIDAVIAIGVLIRGATPHFDYIASEVSKGLADLSLELRKPITFGVITADTLEQAIERAGTKHGNKGWEAALSAIEMANLFKSLRGGGGSGGGGSGGGNLCPFGEVFNATRFASVYAWNRKRISNCVADYSVLYNSASFSTFKCYGVSPTKLNDLCFTNVYADSFVIRGDEVRQIAPGQTGKIADYNYKLPDDFTGCVIAWNSNNLDSKVGGNYNYLYRLFRKSNLKPFERDISTEIYQAGSTPCNGVEGFNCYFPLQSYGFQPTNGVGYQPYRVVVLSFELLHAPATVCGPK

SEQ ID NO: 22737 - protein, 1273 aa, Artificial Sequence; identical to SEQ ID NO: 9
  SARS-CoV-2/Wuhan/WIV05/2019__EPI_ISL_402128 spike protein (1-1273)(D614G)

SEQ ID NO: 22738 - protein, 1273 aa, Artificial Sequence; identical to SEQ ID NO: 18
  SARS-CoV-2/Wuhan/WIV05/2019__EPI_ISL_402128 spike protein (1-1273)(K986P_V987P_ D614G)

SEQ ID NO: 22739 - protein, 1273 aa, Artificial Sequence
  SARS-CoV-2/Wuhan/WIV05/2019__EPI_ISL_402128 spike protein (1-1273)(A222V_D614G)
MFVFLVLLPLVSSQCVNLTTRTQLPPAYTNSFTRGVYYPDKVFRSSVLHSTQDLFLPFFSNVTWFHAIHVSGTNGTKRFDNPVLPFNDGVYFASTEKSNIIRGWIFGTTLDSKTQSLLIVNNATNVVIKVCEFQFCNDPFLGVYYHKNNKSWMESEFRVYSSANNCTFEYVSQPFLMDLEGKQGNFKNLREFVFKNIDGYFKIYSKHTPINLVRDLPQGFSVLEPLVDLPIGINITRFQTLLALHRSYLTPGDSSSGWTAGAAAYYVGYLQPRTFLLKYNENGTITDAVDCALDPLSETKCTLKSFTVEKGIYQTSNFRVQPTESIVRFPNITNLCPFGEVFNATRFASVYAWNRKRISNCVADYSVLYNSASFSTFKCYGVSPTKLNDLCFTNVYADSFVIRGDEVRQIAPGQTGKIADYNYKLPDDFTGCVIAWNSNNLDSKVGGNYNYLYRLFRKSNLKPFERDISTEIYQAGSTPCNGVEGFNCYFPLQSYGFQPTNGVGYQPYRVVVLSFELLHAPATVCGPKKSTNLVKNKCVNFNFNGLTGTGVLTESNKKFLPFQQFGRDIADTTDAVRDPQTLEILDITPCSFGGVSVITPGTNTSNQVAVLYQGVNCTEVPVAIHADQLTPTWRVYSTGSNVFQTRAGCLIGAEHVNNSYECDIPIGAGICASYQTQTNSPRRARSVASQSIIAYTMSLGAENSVAYSNNSIAIPTNFTISVTTEILPVSMTKTSVDCTMYICGDSTECSNLLLQYGSFCTQLNRALTGIAVEQDKNTQEVFAQVKQIYKTPPIKDFGGFNFSQILPDPSKPSKRSFIEDLLFNKVTLADAGFIKQYGDCLGDIAARDLICAQKFNGLTVLPPLLTDEMIAQYTSALLAGTITSGWTFGAGAALQIPFAMQMAYRFNGIGVTQNVLYENQKLIANQFNSAIGKIQDSLSSTASALGKLQDVVNQNAQALNTLVKQLSSNFGAISSVLNDILSRLDKVEAEVQIDRLITGRLQSLQTYVTQQLIRAAEIRASANLAATKMSECVLGQSKRVDFCGKGYHLMSFPQSAPHGVVFLHVTYVPAQEKNFTTAPAICHDGKAHFPREGVFVSNGTHWFVTQRNFYEPQIITTDNTFVSGNCDVVIGIVNNTVYDPLQPELDSFKEELDKYFKNHTSPDVDLGDISGINASVVNIQKEIDRLNEVAKNLNESLIDLQELGKYEQYIKWPWYIWLGFIAGLIAIVMVTIMLCCMTSCCSCLKGCCSCGSCCKFDEDDSEPVLKGVKLHYT

SEQ ID NO: 22740 - protein, 1273 aa, Artificial Sequence
  SARS-CoV-2/Wuhan/WIV05/2019__EPI_ISL_402128 spike protein (1-1273)(K986P_V987P_A222V_D614G)
MFVFLVLLPLVSSQCVNLTTRTQLPPAYTNSFTRGVYYPDKVFRSSVLHSTQDLFLPFFSNVTWFHAIHVSGTNGTKRFDNPVLPFNDGVYFASTEKSNIIRGWIFGTTLDSKTQSLLIVNNATNVVIKVCEFQFCNDPFLGVYYHKNNKSWMESEFRVYSSANNCTFEYVSQPFLMDLEGKQGNFKNLREFVFKNIDGYFKIYSKHTPINLVRDLPQGFSVLEPLVDLPIGINITRFQTLLALHRSYLTPGDSSSGWTAGAAAYYVGYLQPRTFLLKYNENGTITDAVDCALDPLSETKCTLKSFTVEKGIYQTSNFRVQPTESIVRFPNITNLCPFGEVFNATRFASVYAWNRKRISNCVADYSVLYNSASFSTFKCYGVSPTKLNDLCFTNVYADSFVIRGDEVRQIAPGQTGKIADYNYKLPDDFTGCVIAWNSNNLDSKVGGNYNYLYRLFRKSNLKPFERDISTEIYQAGSTPCNGVEGFNCYFPLQSYGFQPTNGVGYQPYRVVVLSFELLHAPATVCGPKKSTNLVKNKCVNFNFNGLTGTGVLTESNKKFLPFQQFGRDIADTTDAVRDPQTLEILDITPCSFGGVSVITPGTNTSNQVAVLYQGVNCTEVPVAIHADQLTPTWRVYSTGSNVFQTRAGCLIGAEHVNNSYECDIPIGAGICASYQTQTNSPRRARSVASQSIIAYTMSLGAENSVAYSNNSIAIPTNFTISVTTEILPVSMTKTSVDCTMYICGDSTECSNLLLQYGSFCTQLNRALTGIAVEQDKNTQEVFAQVKQIYKTPPIKDFGGFNFSQILPDPSKPSKRSFIEDLLFNKVTLADAGFIKQYGDCLGDIAARDLICAQKFNGLTVLPPLLTDEMIAQYTSALLAGTITSGWTFGAGAALQIPFAMQMAYRFNGIGVTQNVLYENQKLIANQFNSAIGKIQDSLSSTASALGKLQDVVNQNAQALNTLVKQLSSNFGAISSVLNDILSRLDPPEAEVQIDRLITGRLQSLQTYVTQQLIRAAEIRASANLAATKMSECVLGQSKRVDFCGKGYHLMSFPQSAPHGVVFLHVTYVPAQEKNFTTAPAICHDGKAHFPREGVFVSNGTHWFVTQRNFYEPQIITTDNTFVSGNCDVVIGIVNNTVYDPLQPELDSFKEELDKYFKNHTSPDVDLGDISGINASVVNIQKEIDRLNEVAKNLNESLIDLQELGKYEQYIKWPWYIWLGFIAGLIAIVMVTIMLCCMTSCCSCLKGCCSCGSCCKFDEDDSEPVLKGVKLHYT

SEQ ID NO: 22741 - protein, 1273 aa, Artificial Sequence
  SARS-CoV-2/Wuhan/WIV05/2019__EPI_ISL_402128 spike protein (1-1273)(N439K_D614G)
MFVFLVLLPLVSSQCVNLTTRTQLPPAYTNSFTRGVYYPDKVFRSSVLHSTQDLFLPFFSNVTWFHAIHVSGTNGTKRFDNPVLPFNDGVYFASTEKSNIIRGWIFGTTLDSKTQSLLIVNNATNVVIKVCEFQFCNDPFLGVYYHKNNKSWMESEFRVYSSANNCTFEYVSQPFLMDLEGKQGNFKNLREFVFKNIDGYFKIYSKHTPINLVRDLPQGFSALEPLVDLPIGINITRFQTLLALHRSYLTPGDSSSGWTAGAAAYYVGYLQPRTFLLKYNENGTITDAVDCALDPLSETKCTLKSFTVEKGIYQTSNFRVQPTESIVRFPNITNLCPFGEVFNATRFASVYAWNRKRISNCVADYSVLYNSASFSTFKCYGVSPTKLNDLCFTNVYADSFVIRGDEVRQIAPGQTGKIADYNYKLPDDFTGCVIAWNSKNLDSKVGGNYNYLYRLFRKSNLKPFERDISTEIYQAGSTPCNGVEGFNCYFPLQSYGFQPTNGVGYQPYRVVVLSFELLHAPATVCGPKKSTNLVKNKCVNFNFNGLTGTGVLTESNKKFLPFQQFGRDIADTTDAVRDPQTLEILDITPCSFGGVSVITPGTNTSNQVAVLYQGVNCTEVPVAIHADQLTPTWRVYSTGSNVFQTRAGCLIGAEHVNNSYECDIPIGAGICASYQTQTNSPRRARSVASQSIIAYTMSLGAENSVAYSNNSIAIPTNFTISVTTEILPVSMTKTSVDCTMYICGDSTECSNLLLQYGSFCTQLNRALTGIAVEQDKNTQEVFAQVKQIYKTPPIKDFGGFNFSQILPDPSKPSKRSFIEDLLFNKVTLADAGFIKQYGDCLGDIAARDLICAQKFNGLTVLPPLLTDEMIAQYTSALLAGTITSGWTFGAGAALQIPFAMQMAYRFNGIGVTQNVLYENQKLIANQFNSAIGKIQDSLSSTASALGKLQDVVNQNAQALNTLVKQLSSNFGAISSVLNDILSRLDKVEAEVQIDRLITGRLQSLQTYVTQQLIRAAEIRASANLAATKMSECVLGQSKRVDFCGKGYHLMSFPQSAPHGVVFLHVTYVPAQEKNFTTAPAICHDGKAHFPREGVFVSNGTHWFVTQRNFYEPQIITTDNTFVSGNCDVVIGIVNNTVYDPLQPELDSFKEELDKYFKNHTSPDVDLGDISGINASVVNIQKEIDRLNEVAKNLNESLIDLQELGKYEQYIKWPWYIWLGFIAGLIAIVMVTIMLCCMTSCCSCLKGCCSCGSCCKFDEDDSEPVLKGVKLHYT

SEQ ID NO: 22742 - protein, 1273 aa, Artificial Sequence
  SARS-CoV-2/Wuhan/WIV05/2019__EPI_ISL_402128 spike protein (1-1273)(K986P_V987P_N439K_D614G)
MFVFLVLLPLVSSQCVNLTTRTQLPPAYTNSFTRGVYYPDKVFRSSVLHSTQDLFLPFFSNVTWFHAIHVSGTNGTKRFDNPVLPFNDGVYFASTEKSNIIRGWIFGTTLDSKTQSLLIVNNATNVVIKVCEFQFCNDPFLGVYYHKNNKSWMESEFRVYSSANNCTFEYVSQPFLMDLEGKQGNFKNLREFVFKNIDGYFKIYSKHTPINLVRDLPQGFSALEPLVDLPIGINITRFQTLLALHRSYLTPGDSSSGWTAGAAAYYVGYLQPRTFLLKYNENGTITDAVDCALDPLSETKCTLKSFTVEKGIYQTSNFRVQPTESIVRFPNITNLCPFGEVFNATRFASVYAWNRKRISNCVADYSVLYNSASFSTFKCYGVSPTKLNDLCFTNVYADSFVIRGDEVRQIAPGQTGKIADYNYKLPDDFTGCVIAWNSKNLDSKVGGNYNYLYRLFRKSNLKPFERDISTEIYQAGSTPCNGVEGFNCYFPLQSYGFQPTNGVGYQPYRVVVLSFELLHAPATVCGPKKSTNLVKNKCVNFNFNGLTGTGVLTESNKKFLPFQQFGRDIADTTDAVRDPQTLEILDITPCSFGGVSVITPGTNTSNQVAVLYQGVNCTEVPVAIHADQLTPTWRVYSTGSNVFQTRAGCLIGAEHVNNSYECDIPIGAGICASYQTQTNSPRRARSVASQSIIAYTMSLGAENSVAYSNNSIAIPTNFTISVTTEILPVSMTKTSVDCTMYICGDSTECSNLLLQYGSFCTQLNRALTGIAVEQDKNTQEVFAQVKQIYKTPPIKDFGGFNFSQILPDPSKPSKRSFIEDLLFNKVTLADAGFIKQYGDCLGDIAARDLICAQKFNGLTVLPPLLTDEMIAQYTSALLAGTITSGWTFGAGAALQIPFAMQMAYRFNGIGVTQNVLYENQKLIANQFNSAIGKIQDSLSSTASALGKLQDVVNQNAQALNTLVKQLSSNFGAISSVLNDILSRLDPPEAEVQIDRLITGRLQSLQTYVTQQLIRAAEIRASANLAATKMSECVLGQSKRVDFCGKGYHLMSFPQSAPHGVVFLHVTYVPAQEKNFTTAPAICHDGKAHFPREGVFVSNGTHWFVTQRNFYEPQIITTDNTFVSGNCDVVIGIVNNTVYDPLQPELDSFKEELDKYFKNHTSPDVDLGDISGINASVVNIQKEIDRLNEVAKNLNESLIDLQELGKYEQYIKWPWYIWLGFIAGLIAIVMVTIMLCCMTSCCSCLKGCCSCGSCCKFDEDDSEPVLKGVKLHYT

SEQ ID NO: 22743 - protein, 1273 aa, Artificial Sequence
  SARS-CoV-2/Wuhan/WIV05/2019__EPI_ISL_402128 spike protein (1-1273)(S477N_D614G)
MFVFLVLLPLVSSQCVNLTTRTQLPPAYTNSFTRGVYYPDKVFRSSVLHSTQDLFLPFFSNVTWFHAIHVSGTNGTKRFDNPVLPFNDGVYFASTEKSNIIRGWIFGTTLDSKTQSLLIVNNATNVVIKVCEFQFCNDPFLGVYYHKNNKSWMESEFRVYSSANNCTFEYVSQPFLMDLEGKQGNFKNLREFVFKNIDGYFKIYSKHTPINLVRDLPQGFSALEPLVDLPIGINITRFQTLLALHRSYLTPGDSSSGWTAGAAAYYVGYLQPRTFLLKYNENGTITDAVDCALDPLSETKCTLKSFTVEKGIYQTSNFRVQPTESIVRFPNITNLCPFGEVFNATRFASVYAWNRKRISNCVADYSVLYNSASFSTFKCYGVSPTKLNDLCFTNVYADSFVIRGDEVRQIAPGQTGKIADYNYKLPDDFTGCVIAWNSNNLDSKVGGNYNYLYRLFRKSNLKPFERDISTEIYQAGNTPCNGVEGFNCYFPLQSYGFQPTNGVGYQPYRVVVLSFELLHAPATVCGPKKSTNLVKNKCVNFNFNGLTGTGVLTESNKKFLPFQQFGRDIADTTDAVRDPQTLEILDITPCSFGGVSVITPGTNTSNQVAVLYQGVNCTEVPVAIHADQLTPTWRVYSTGSNVFQTRAGCLIGAEHVNNSYECDIPIGAGICASYQTQTNSPRRARSVASQSIIAYTMSLGAENSVAYSNNSIAIPTNFTISVTTEILPVSMTKTSVDCTMYICGDSTECSNLLLQYGSFCTQLNRALTGIAVEQDKNTQEVFAQVKQIYKTPPIKDFGGFNFSQILPDPSKPSKRSFIEDLLFNKVTLADAGFIKQYGDCLGDIAARDLICAQKFNGLTVLPPLLTDEMIAQYTSALLAGTITSGWTFGAGAALQIPFAMQMAYRFNGIGVTQNVLYENQKLIANQFNSAIGKIQDSLSSTASALGKLQDVVNQNAQALNTLVKQLSSNFGAISSVLNDILSRLDKVEAEVQIDRLITGRLQSLQTYVTQQLIRAAEIRASANLAATKMSECVLGQSKRVDFCGKGYHLMSFPQSAPHGVVFLHVTYVPAQEKNFTTAPAICHDGKAHFPREGVFVSNGTHWFVTQRNFYEPQIITTDNTFVSGNCDVVIGIVNNTVYDPLQPELDSFKEELDKYFKNHTSPDVDLGDISGINASVVNIQKEIDRLNEVAKNLNESLIDLQELGKYEQYIKWPWYIWLGFIAGLIAIVMVTIMLCCMTSCCSCLKGCCSCGSCCKFDEDDSEPVLKGVKLHYT

SEQ ID NO: 22744 - protein, 1273 aa, Artificial Sequence
  SARS-CoV-2/Wuhan/WIV05/2019__EPI_ISL_402128 spike protein (1-1273)(K986P_V987P_S477N_D614G)
MFVFLVLLPLVSSQCVNLTTRTQLPPAYTNSFTRGVYYPDKVFRSSVLHSTQDLFLPFFSNVTWFHAIHVSGTNGTKRFDNPVLPFNDGVYFASTEKSNIIRGWIFGTTLDSKTQSLLIVNNATNVVIKVCEFQFCNDPFLGVYYHKNNKSWMESEFRVYSSANNCTFEYVSQPFLMDLEGKQGNFKNLREFVFKNIDGYFKIYSKHTPINLVRDLPQGFSALEPLVDLPIGINITRFQTLLALHRSYLTPGDSSSGWTAGAAAYYVGYLQPRTFLLKYNENGTITDAVDCALDPLSETKCTLKSFTVEKGIYQTSNFRVQPTESIVRFPNITNLCPFGEVFNATRFASVYAWNRKRISNCVADYSVLYNSASFSTFKCYGVSPTKLNDLCFTNVYADSFVIRGDEVRQIAPGQTGKIADYNYKLPDDFTGCVIAWNSNNLDSKVGGNYNYLYRLFRKSNLKPFERDISTEIYQAGNTPCNGVEGFNCYFPLQSYGFQPTNGVGYQPYRVVVLSFELLHAPATVCGPKKSTNLVKNKCVNFNFNGLTGTGVLTESNKKFLPFQQFGRDIADTTDAVRDPQTLEILDITPCSFGGVSVITPGTNTSNQVAVLYQGVNCTEVPVAIHADQLTPTWRVYSTGSNVFQTRAGCLIGAEHVNNSYECDIPIGAGICASYQTQTNSPRRARSVASQSIIAYTMSLGAENSVAYSNNSIAIPTNFTISVTTEILPVSMTKTSVDCTMYICGDSTECSNLLLQYGSFCTQLNRALTGIAVEQDKNTQEVFAQVKQIYKTPPIKDFGGFNFSQILPDPSKPSKRSFIEDLLFNKVTLADAGFIKQYGDCLGDIAARDLICAQKFNGLTVLPPLLTDEMIAQYTSALLAGTITSGWTFGAGAALQIPFAMQMAYRFNGIGVTQNVLYENQKLIANQFNSAIGKIQDSLSSTASALGKLQDVVNQNAQALNTLVKQLSSNFGAISSVLNDILSRLDPPEAEVQIDRLITGRLQSLQTYVTQQLIRAAEIRASANLAATKMSECVLGQSKRVDFCGKGYHLMSFPQSAPHGVVFLHVTYVPAQEKNFTTAPAICHDGKAHFPREGVFVSNGTHWFVTQRNFYEPQIITTDNTFVSGNCDVVIGIVNNTVYDPLQPELDSFKEELDKYFKNHTSPDVDLGDISGINASVVNIQKEIDRLNEVAKNLNESLIDLQELGKYEQYIKWPWYIWLGFIAGLIAIVMVTIMLCCMTSCCSCLKGCCSCGSCCKFDEDDSEPVLKGVKLHYT

SEQ ID NO: 22745 - protein, 1273 aa, Artificial Sequence
  SARS-CoV-2/Wuhan/WIV05/2019__EPI_ISL_402128 spike protein (1-1273)(N501Y_D614G)
MFVFLVLLPLVSSQCVNLTTRTQLPPAYTNSFTRGVYYPDKVFRSSVLHSTQDLFLPFFSNVTWFHAIHVSGTNGTKRFDNPVLPFNDGVYFASTEKSNIIRGWIFGTTLDSKTQSLLIVNNATNVVIKVCEFQFCNDPFLGVYYHKNNKSWMESEFRVYSSANNCTFEYVSQPFLMDLEGKQGNFKNLREFVFKNIDGYFKIYSKHTPINLVRDLPQGFSALEPLVDLPIGINITRFQTLLALHRSYLTPGDSSSGWTAGAAAYYVGYLQPRTFLLKYNENGTITDAVDCALDPLSETKCTLKSFTVEKGIYQTSNFRVQPTESIVRFPNITNLCPFGEVFNATRFASVYAWNRKRISNCVADYSVLYNSASFSTFKCYGVSPTKLNDLCFTNVYADSFVIRGDEVRQIAPGQTGKIADYNYKLPDDFTGCVIAWNSNNLDSKVGGNYNYLYRLFRKSNLKPFERDISTEIYQAGSTPCNGVEGFNCYFPLQSYGFQPTYGVGYQPYRVVVLSFELLHAPATVCGPKKSTNLVKNKCVNFNFNGLTGTGVLTESNKKFLPFQQFGRDIADTTDAVRDPQTLEILDITPCSFGGVSVITPGTNTSNQVAVLYQGVNCTEVPVAIHADQLTPTWRVYSTGSNVFQTRAGCLIGAEHVNNSYECDIPIGAGICASYQTQTNSPRRARSVASQSIIAYTMSLGAENSVAYSNNSIAIPTNFTISVTTEILPVSMTKTSVDCTMYICGDSTECSNLLLQYGSFCTQLNRALTGIAVEQDKNTQEVFAQVKQIYKTPPIKDFGGFNFSQILPDPSKPSKRSFIEDLLFNKVTLADAGFIKQYGDCLGDIAARDLICAQKFNGLTVLPPLLTDEMIAQYTSALLAGTITSGWTFGAGAALQIPFAMQMAYRFNGIGVTQNVLYENQKLIANQFNSAIGKIQDSLSSTASALGKLQDVVNQNAQALNTLVKQLSSNFGAISSVLNDILSRLDKVEAEVQIDRLITGRLQSLQTYVTQQLIRAAEIRASANLAATKMSECVLGQSKRVDFCGKGYHLMSFPQSAPHGVVFLHVTYVPAQEKNFTTAPAICHDGKAHFPREGVFVSNGTHWFVTQRNFYEPQIITTDNTFVSGNCDVVIGIVNNTVYDPLQPELDSFKEELDKYFKNHTSPDVDLGDISGINASVVNIQKEIDRLNEVAKNLNESLIDLQELGKYEQYIKWPWYIWLGFIAGLIAIVMVTIMLCCMTSCCSCLKGCCSCGSCCKFDEDDSEPVLKGVKLHYT

SEQ ID NO: 22746 - protein, 1273 aa, Artificial Sequence
  SARS-CoV-2/Wuhan/WIV05/2019__EPI_ISL_402128 spike protein (1-1273)(K986P_V987P_N501Y_D614G)
MFVFLVLLPLVSSQCVNLTTRTQLPPAYTNSFTRGVYYPDKVFRSSVLHSTQDLFLPFFSNVTWFHAIHVSGTNGTKRFDNPVLPFNDGVYFASTEKSNIIRGWIFGTTLDSKTQSLLIVNNATNVVIKVCEFQFCNDPFLGVYYHKNNKSWMESEFRVYSSANNCTFEYVSQPFLMDLEGKQGNFKNLREFVFKNIDGYFKIYSKHTPINLVRDLPQGFSALEPLVDLPIGINITRFQTLLALHRSYLTPGDSSSGWTAGAAAYYVGYLQPRTFLLKYNENGTITDAVDCALDPLSETKCTLKSFTVEKGIYQTSNFRVQPTESIVRFPNITNLCPFGEVFNATRFASVYAWNRKRISNCVADYSVLYNSASFSTFKCYGVSPTKLNDLCFTNVYADSFVIRGDEVRQIAPGQTGKIADYNYKLPDDFTGCVIAWNSNNLDSKVGGNYNYLYRLFRKSNLKPFERDISTEIYQAGSTPCNGVEGFNCYFPLQSYGFQPTYGVGYQPYRVVVLSFELLHAPATVCGPKKSTNLVKNKCVNFNFNGLTGTGVLTESNKKFLPFQQFGRDIADTTDAVRDPQTLEILDITPCSFGGVSVITPGTNTSNQVAVLYQGVNCTEVPVAIHADQLTPTWRVYSTGSNVFQTRAGCLIGAEHVNNSYECDIPIGAGICASYQTQTNSPRRARSVASQSIIAYTMSLGAENSVAYSNNSIAIPTNFTISVTTEILPVSMTKTSVDCTMYICGDSTECSNLLLQYGSFCTQLNRALTGIAVEQDKNTQEVFAQVKQIYKTPPIKDFGGFNFSQILPDPSKPSKRSFIEDLLFNKVTLADAGFIKQYGDCLGDIAARDLICAQKFNGLTVLPPLLTDEMIAQYTSALLAGTITSGWTFGAGAALQIPFAMQMAYRFNGIGVTQNVLYENQKLIANQFNSAIGKIQDSLSSTASALGKLQDVVNQNAQALNTLVKQLSSNFGAISSVLNDILSRLDPPEAEVQIDRLITGRLQSLQTYVTQQLIRAAEIRASANLAATKMSECVLGQSKRVDFCGKGYHLMSFPQSAPHGVVFLHVTYVPAQEKNFTTAPAICHDGKAHFPREGVFVSNGTHWFVTQRNFYEPQIITTDNTFVSGNCDVVIGIVNNTVYDPLQPELDSFKEELDKYFKNHTSPDVDLGDISGINASVVNIQKEIDRLNEVAKNLNESLIDLQELGKYEQYIKWPWYIWLGFIAGLIAIVMVTIMLCCMTSCCSCLKGCCSCGSCCKFDEDDSEPVLKGVKLHYT

SEQ ID NO: 22747 - protein, 1271 aa, Artificial Sequence
  SARS-CoV-2/Wuhan/WIV05/2019__EPI_ISL_402128 spike protein (1-1273)(H69del_V70del_D614G)
MFVFLVLLPLVSSQCVNLTTRTQLPPAYTNSFTRGVYYPDKVFRSSVLHSTQDLFLPFFSNVTWFHAISGTNGTKRFDNPVLPFNDGVYFASTEKSNIIRGWIFGTTLDSKTQSLLIVNNATNVVIKVCEFQFCNDPFLGVYYHKNNKSWMESEFRVYSSANNCTFEYVSQPFLMDLEGKQGNFKNLREFVFKNIDGYFKIYSKHTPINLVRDLPQGFSALEPLVDLPIGINITRFQTLLALHRSYLTPGDSSSGWTAGAAAYYVGYLQPRTFLLKYNENGTITDAVDCALDPLSETKCTLKSFTVEKGIYQTSNFRVQPTESIVRFPNITNLCPFGEVFNATRFASVYAWNRKRISNCVADYSVLYNSASFSTFKCYGVSPTKLNDLCFTNVYADSFVIRGDEVRQIAPGQTGKIADYNYKLPDDFTGCVIAWNSNNLDSKVGGNYNYLYRLFRKSNLKPFERDISTEIYQAGSTPCNGVEGFNCYFPLQSYGFQPTNGVGYQPYRVVVLSFELLHAPATVCGPKKSTNLVKNKCVNFNFNGLTGTGVLTESNKKFLPFQQFGRDIADTTDAVRDPQTLEILDITPCSFGGVSVITPGTNTSNQVAVLYQGVNCTEVPVAIHADQLTPTWRVYSTGSNVFQTRAGCLIGAEHVNNSYECDIPIGAGICASYQTQTNSPRRARSVASQSIIAYTMSLGAENSVAYSNNSIAIPTNFTISVTTEILPVSMTKTSVDCTMYICGDSTECSNLLLQYGSFCTQLNRALTGIAVEQDKNTQEVFAQVKQIYKTPPIKDFGGFNFSQILPDPSKPSKRSFIEDLLFNKVTLADAGFIKQYGDCLGDIAARDLICAQKFNGLTVLPPLLTDEMIAQYTSALLAGTITSGWTFGAGAALQIPFAMQMAYRFNGIGVTQNVLYENQKLIANQFNSAIGKIQDSLSSTASALGKLQDVVNQNAQALNTLVKQLSSNFGAISSVLNDILSRLDKVEAEVQIDRLITGRLQSLQTYVTQQLIRAAEIRASANLAATKMSECVLGQSKRVDFCGKGYHLMSFPQSAPHGVVFLHVTYVPAQEKNFTTAPAICHDGKAHFPREGVFVSNGTHWFVTQRNFYEPQIITTDNTFVSGNCDVVIGIVNNTVYDPLQPELDSFKEELDKYFKNHTSPDVDLGDISGINASVVNIQKEIDRLNEVAKNLNESLIDLQELGKYEQYIKWPWYIWLGFIAGLIAIVMVTIMLCCMTSCCSCLKGCCSCGSCCKFDEDDSEPVLKGVKLHYT

SEQ ID NO: 22748 - protein, 1271 aa, Artificial Sequence
  SARS-CoV-2/Wuhan/WIV05/2019__EPI_ISL_402128 spike protein (1-1273)(K986P_V987P_H69del_V70del_D614G)
MFVFLVLLPLVSSQCVNLTTRTQLPPAYTNSFTRGVYYPDKVFRSSVLHSTQDLFLPFFSNVTWFHAISGTNGTKRFDNPVLPFNDGVYFASTEKSNIIRGWIFGTTLDSKTQSLLIVNNATNVVIKVCEFQFCNDPFLGVYYHKNNKSWMESEFRVYSSANNCTFEYVSQPFLMDLEGKQGNFKNLREFVFKNIDGYFKIYSKHTPINLVRDLPQGFSALEPLVDLPIGINITRFQTLLALHRSYLTPGDSSSGWTAGAAAYYVGYLQPRTFLLKYNENGTITDAVDCALDPLSETKCTLKSFTVEKGIYQTSNFRVQPTESIVRFPNITNLCPFGEVFNATRFASVYAWNRKRISNCVADYSVLYNSASFSTFKCYGVSPTKLNDLCFTNVYADSFVIRGDEVRQIAPGQTGKIADYNYKLPDDFTGCVIAWNSNNLDSKVGGNYNYLYRLFRKSNLKPFERDISTEIYQAGSTPCNGVEGFNCYFPLQSYGFQPTNGVGYQPYRVVVLSFELLHAPATVCGPKKSTNLVKNKCVNFNFNGLTGTGVLTESNKKFLPFQQFGRDIADTTDAVRDPQTLEILDITPCSFGGVSVITPGTNTSNQVAVLYQGVNCTEVPVAIHADQLTPTWRVYSTGSNVFQTRAGCLIGAEHVNNSYECDIPIGAGICASYQTQTNSPRRARSVASQSIIAYTMSLGAENSVAYSNNSIAIPTNFTISVTTEILPVSMTKTSVDCTMYICGDSTECSNLLLQYGSFCTQLNRALTGIAVEQDKNTQEVFAQVKQIYKTPPIKDFGGFNFSQILPDPSKPSKRSFIEDLLFNKVTLADAGFIKQYGDCLGDIAARDLICAQKFNGLTVLPPLLTDEMIAQYTSALLAGTITSGWTFGAGAALQIPFAMQMAYRFNGIGVTQNVLYENQKLIANQFNSAIGKIQDSLSSTASALGKLQDVVNQNAQALNTLVKQLSSNFGAISSVLNDILSRLDPPEAEVQIDRLITGRLQSLQTYVTQQLIRAAEIRASANLAATKMSECVLGQSKRVDFCGKGYHLMSFPQSAPHGVVFLHVTYVPAQEKNFTTAPAICHDGKAHFPREGVFVSNGTHWFVTQRNFYEPQIITTDNTFVSGNCDVVIGIVNNTVYDPLQPELDSFKEELDKYFKNHTSPDVDLGDISGINASVVNIQKEIDRLNEVAKNLNESLIDLQELGKYEQYIKWPWYIWLGFIAGLIAIVMVTIMLCCMTSCCSCLKGCCSCGSCCKFDEDDSEPVLKGVKLHYT

SEQ ID NO: 22749 - protein, 1273 aa, Artificial Sequence
  SARS-CoV-2/Wuhan/WIV05/2019__EPI_ISL_402128 spike protein (1-1273)(Y453F_D614G)
MFVFLVLLPLVSSQCVNLTTRTQLPPAYTNSFTRGVYYPDKVFRSSVLHSTQDLFLPFFSNVTWFHAIHVSGTNGTKRFDNPVLPFNDGVYFASTEKSNIIRGWIFGTTLDSKTQSLLIVNNATNVVIKVCEFQFCNDPFLGVYYHKNNKSWMESEFRVYSSANNCTFEYVSQPFLMDLEGKQGNFKNLREFVFKNIDGYFKIYSKHTPINLVRDLPQGFSALEPLVDLPIGINITRFQTLLALHRSYLTPGDSSSGWTAGAAAYYVGYLQPRTFLLKYNENGTITDAVDCALDPLSETKCTLKSFTVEKGIYQTSNFRVQPTESIVRFPNITNLCPFGEVFNATRFASVYAWNRKRISNCVADYSVLYNSASFSTFKCYGVSPTKLNDLCFTNVYADSFVIRGDEVRQIAPGQTGKIADYNYKLPDDFTGCVIAWNSNNLDSKVGGNYNYLFRLFRKSNLKPFERDISTEIYQAGSTPCNGVEGFNCYFPLQSYGFQPTNGVGYQPYRVVVLSFELLHAPATVCGPKKSTNLVKNKCVNFNFNGLTGTGVLTESNKKFLPFQQFGRDIADTTDAVRDPQTLEILDITPCSFGGVSVITPGTNTSNQVAVLYQGVNCTEVPVAIHADQLTPTWRVYSTGSNVFQTRAGCLIGAEHVNNSYECDIPIGAGICASYQTQTNSPRRARSVASQSIIAYTMSLGAENSVAYSNNSIAIPTNFTISVTTEILPVSMTKTSVDCTMYICGDSTECSNLLLQYGSFCTQLNRALTGIAVEQDKNTQEVFAQVKQIYKTPPIKDFGGFNFSQILPDPSKPSKRSFIEDLLFNKVTLADAGFIKQYGDCLGDIAARDLICAQKFNGLTVLPPLLTDEMIAQYTSALLAGTITSGWTFGAGAALQIPFAMQMAYRFNGIGVTQNVLYENQKLIANQFNSAIGKIQDSLSSTASALGKLQDVVNQNAQALNTLVKQLSSNFGAISSVLNDILSRLDKVEAEVQIDRLITGRLQSLQTYVTQQLIRAAEIRASANLAATKMSECVLGQSKRVDFCGKGYHLMSFPQSAPHGVVFLHVTYVPAQEKNFTTAPAICHDGKAHFPREGVFVSNGTHWFVTQRNFYEPQIITTDNTFVSGNCDVVIGIVNNTVYDPLQPELDSFKEELDKYFKNHTSPDVDLGDISGINASVVNIQKEIDRLNEVAKNLNESLIDLQELGKYEQYIKWPWYIWLGFIAGLIAIVMVTIMLCCMTSCCSCLKGCCSCGSCCKFDEDDSEPVLKGVKLHYT

SEQ ID NO: 22750 - protein, 1273 aa, Artificial Sequence
  SARS-CoV-2/Wuhan/WIV05/2019__EPI_ISL_402128 spike protein (1-1273)(K986P_V987P_Y453F_D614G)
MFVFLVLLPLVSSQCVNLTTRTQLPPAYTNSFTRGVYYPDKVFRSSVLHSTQDLFLPFFSNVTWFHAIHVSGTNGTKRFDNPVLPFNDGVYFASTEKSNIIRGWIFGTTLDSKTQSLLIVNNATNVVIKVCEFQFCNDPFLGVYYHKNNKSWMESEFRVYSSANNCTFEYVSQPFLMDLEGKQGNFKNLREFVFKNIDGYFKIYSKHTPINLVRDLPQGFSALEPLVDLPIGINITRFQTLLALHRSYLTPGDSSSGWTAGAAAYYVGYLQPRTFLLKYNENGTITDAVDCALDPLSETKCTLKSFTVEKGIYQTSNFRVQPTESIVRFPNITNLCPFGEVFNATRFASVYAWNRKRISNCVADYSVLYNSASFSTFKCYGVSPTKLNDLCFTNVYADSFVIRGDEVRQIAPGQTGKIADYNYKLPDDFTGCVIAWNSNNLDSKVGGNYNYLFRLFRKSNLKPFERDISTEIYQAGSTPCNGVEGFNCYFPLQSYGFQPTNGVGYQPYRVVVLSFELLHAPATVCGPKKSTNLVKNKCVNFNFNGLTGTGVLTESNKKFLPFQQFGRDIADTTDAVRDPQTLEILDITPCSFGGVSVITPGTNTSNQVAVLYQGVNCTEVPVAIHADQLTPTWRVYSTGSNVFQTRAGCLIGAEHVNNSYECDIPIGAGICASYQTQTNSPRRARSVASQSIIAYTMSLGAENSVAYSNNSIAIPTNFTISVTTEILPVSMTKTSVDCTMYICGDSTECSNLLLQYGSFCTQLNRALTGIAVEQDKNTQEVFAQVKQIYKTPPIKDFGGFNFSQILPDPSKPSKRSFIEDLLFNKVTLADAGFIKQYGDCLGDIAARDLICAQKFNGLTVLPPLLTDEMIAQYTSALLAGTITSGWTFGAGAALQIPFAMQMAYRFNGIGVTQNVLYENQKLIANQFNSAIGKIQDSLSSTASALGKLQDVVNQNAQALNTLVKQLSSNFGAISSVLNDILSRLDPPEAEVQIDRLITGRLQSLQTYVTQQLIRAAEIRASANLAATKMSECVLGQSKRVDFCGKGYHLMSFPQSAPHGVVFLHVTYVPAQEKNFTTAPAICHDGKAHFPREGVFVSNGTHWFVTQRNFYEPQIITTDNTFVSGNCDVVIGIVNNTVYDPLQPELDSFKEELDKYFKNHTSPDVDLGDISGINASVVNIQKEIDRLNEVAKNLNESLIDLQELGKYEQYIKWPWYIWLGFIAGLIAIVMVTIMLCCMTSCCSCLKGCCSCGSCCKFDEDDSEPVLKGVKLHYT

SEQ ID NO: 22751 - protein, 1273 aa, Artificial Sequence
  SARS-CoV-2/Wuhan/WIV05/2019__EPI_ISL_402128 spike protein (1-1273)(D614G_I692V)
MFVFLVLLPLVSSQCVNLTTRTQLPPAYTNSFTRGVYYPDKVFRSSVLHSTQDLFLPFFSNVTWFHAIHVSGTNGTKRFDNPVLPFNDGVYFASTEKSNIIRGWIFGTTLDSKTQSLLIVNNATNVVIKVCEFQFCNDPFLGVYYHKNNKSWMESEFRVYSSANNCTFEYVSQPFLMDLEGKQGNFKNLREFVFKNIDGYFKIYSKHTPINLVRDLPQGFSALEPLVDLPIGINITRFQTLLALHRSYLTPGDSSSGWTAGAAAYYVGYLQPRTFLLKYNENGTITDAVDCALDPLSETKCTLKSFTVEKGIYQTSNFRVQPTESIVRFPNITNLCPFGEVFNATRFASVYAWNRKRISNCVADYSVLYNSASFSTFKCYGVSPTKLNDLCFTNVYADSFVIRGDEVRQIAPGQTGKIADYNYKLPDDFTGCVIAWNSNNLDSKVGGNYNYLYRLFRKSNLKPFERDISTEIYQAGSTPCNGVEGFNCYFPLQSYGFQPTNGVGYQPYRVVVLSFELLHAPATVCGPKKSTNLVKNKCVNFNFNGLTGTGVLTESNKKFLPFQQFGRDIADTTDAVRDPQTLEILDITPCSFGGVSVITPGTNTSNQVAVLYQGVNCTEVPVAIHADQLTPTWRVYSTGSNVFQTRAGCLIGAEHVNNSYECDIPIGAGICASYQTQTNSPRRARSVASQSVIAYTMSLGAENSVAYSNNSIAIPTNFTISVTTEILPVSMTKTSVDCTMYICGDSTECSNLLLQYGSFCTQLNRALTGIAVEQDKNTQEVFAQVKQIYKTPPIKDFGGFNFSQILPDPSKPSKRSFIEDLLFNKVTLADAGFIKQYGDCLGDIAARDLICAQKFNGLTVLPPLLTDEMIAQYTSALLAGTITSGWTFGAGAALQIPFAMQMAYRFNGIGVTQNVLYENQKLIANQFNSAIGKIQDSLSSTASALGKLQDVVNQNAQALNTLVKQLSSNFGAISSVLNDILSRLDKVEAEVQIDRLITGRLQSLQTYVTQQLIRAAEIRASANLAATKMSECVLGQSKRVDFCGKGYHLMSFPQSAPHGVVFLHVTYVPAQEKNFTTAPAICHDGKAHFPREGVFVSNGTHWFVTQRNFYEPQIITTDNTFVSGNCDVVIGIVNNTVYDPLQPELDSFKEELDKYFKNHTSPDVDLGDISGINASVVNIQKEIDRLNEVAKNLNESLIDLQELGKYEQYIKWPWYIWLGFIAGLIAIVMVTIMLCCMTSCCSCLKGCCSCGSCCKFDEDDSEPVLKGVKLHYT

SEQ ID NO: 22752 - protein, 1273 aa, Artificial Sequence
  SARS-CoV-2/Wuhan/WIV05/2019__EPI_ISL_402128 spike protein (1-1273)(K986P_V987P_D614G_I692V)
MFVFLVLLPLVSSQCVNLTTRTQLPPAYTNSFTRGVYYPDKVFRSSVLHSTQDLFLPFFSNVTWFHAIHVSGTNGTKRFDNPVLPFNDGVYFASTEKSNIIRGWIFGTTLDSKTQSLLIVNNATNVVIKVCEFQFCNDPFLGVYYHKNNKSWMESEFRVYSSANNCTFEYVSQPFLMDLEGKQGNFKNLREFVFKNIDGYFKIYSKHTPINLVRDLPQGFSALEPLVDLPIGINITRFQTLLALHRSYLTPGDSSSGWTAGAAAYYVGYLQPRTFLLKYNENGTITDAVDCALDPLSETKCTLKSFTVEKGIYQTSNFRVQPTESIVRFPNITNLCPFGEVFNATRFASVYAWNRKRISNCVADYSVLYNSASFSTFKCYGVSPTKLNDLCFTNVYADSFVIRGDEVRQIAPGQTGKIADYNYKLPDDFTGCVIAWNSNNLDSKVGGNYNYLYRLFRKSNLKPFERDISTEIYQAGSTPCNGVEGFNCYFPLQSYGFQPTNGVGYQPYRVVVLSFELLHAPATVCGPKKSTNLVKNKCVNFNFNGLTGTGVLTESNKKFLPFQQFGRDIADTTDAVRDPQTLEILDITPCSFGGVSVITPGTNTSNQVAVLYQGVNCTEVPVAIHADQLTPTWRVYSTGSNVFQTRAGCLIGAEHVNNSYECDIPIGAGICASYQTQTNSPRRARSVASQSVIAYTMSLGAENSVAYSNNSIAIPTNFTISVTTEILPVSMTKTSVDCTMYICGDSTECSNLLLQYGSFCTQLNRALTGIAVEQDKNTQEVFAQVKQIYKTPPIKDFGGFNFSQILPDPSKPSKRSFIEDLLFNKVTLADAGFIKQYGDCLGDIAARDLICAQKFNGLTVLPPLLTDEMIAQYTSALLAGTITSGWTFGAGAALQIPFAMQMAYRFNGIGVTQNVLYENQKLIANQFNSAIGKIQDSLSSTASALGKLQDVVNQNAQALNTLVKQLSSNFGAISSVLNDILSRLDPPEAEVQIDRLITGRLQSLQTYVTQQLIRAAEIRASANLAATKMSECVLGQSKRVDFCGKGYHLMSFPQSAPHGVVFLHVTYVPAQEKNFTTAPAICHDGKAHFPREGVFVSNGTHWFVTQRNFYEPQIITTDNTFVSGNCDVVIGIVNNTVYDPLQPELDSFKEELDKYFKNHTSPDVDLGDISGINASVVNIQKEIDRLNEVAKNLNESLIDLQELGKYEQYIKWPWYIWLGFIAGLIAIVMVTIMLCCMTSCCSCLKGCCSCGSCCKFDEDDSEPVLKGVKLHYT

SEQ ID NO: 22753 - protein, 1273 aa, Artificial Sequence; identical to SEQ ID NO: 327
  SARS-CoV-2/Wuhan/WIV05/2019__EPI_ISL_402128 spike protein (1-1273)(D614G_M1229I)

SEQ ID NO: 22754 - protein, 1273 aa, Artificial Sequence; identical to SEQ ID NO: 394
  SARS-CoV-2/Wuhan/WIV05/2019__EPI_ISL_402128 spike protein (1-1273)(K986P_V987P_D614G_M1229I)

SEQ ID NO: 22755 - protein, 1271 aa, Artificial Sequence
  SARS-CoV-2/Wuhan/WIV05/2019__EPI_ISL_402128 spike protein (1-1273)(H69del_V70del_A222V_Y453F_S477N_D614G_I692V)
MFVFLVLLPLVSSQCVNLTTRTQLPPAYTNSFTRGVYYPDKVFRSSVLHSTQDLFLPFFSNVTWFHAISGTNGTKRFDNPVLPFNDGVYFASTEKSNIIRGWIFGTTLDSKTQSLLIVNNATNVVIKVCEFQFCNDPFLGVYYHKNNKSWMESEFRVYSSANNCTFEYVSQPFLMDLEGKQGNFKNLREFVFKNIDGYFKIYSKHTPINLVRDLPQGFSVLEPLVDLPIGINITRFQTLLALHRSYLTPGDSSSGWTAGAAAYYVGYLQPRTFLLKYNENGTITDAVDCALDPLSETKCTLKSFTVEKGIYQTSNFRVQPTESIVRFPNITNLCPFGEVFNATRFASVYAWNRKRISNCVADYSVLYNSASFSTFKCYGVSPTKLNDLCFTNVYADSFVIRGDEVRQIAPGQTGKIADYNYKLPDDFTGCVIAWNSNNLDSKVGGNYNYLFRLFRKSNLKPFERDISTEIYQAGNTPCNGVEGFNCYFPLQSYGFQPTNGVGYQPYRVVVLSFELLHAPATVCGPKKSTNLVKNKCVNFNFNGLTGTGVLTESNKKFLPFQQFGRDIADTTDAVRDPQTLEILDITPCSFGGVSVITPGTNTSNQVAVLYQGVNCTEVPVAIHADQLTPTWRVYSTGSNVFQTRAGCLIGAEHVNNSYECDIPIGAGICASYQTQTNSPRRARSVASQSVIAYTMSLGAENSVAYSNNSIAIPTNFTISVTTEILPVSMTKTSVDCTMYICGDSTECSNLLLQYGSFCTQLNRALTGIAVEQDKNTQEVFAQVKQIYKTPPIKDFGGFNFSQILPDPSKPSKRSFIEDLLFNKVTLADAGFIKQYGDCLGDIAARDLICAQKFNGLTVLPPLLTDEMIAQYTSALLAGTITSGWTFGAGAALQIPFAMQMAYRFNGIGVTQNVLYENQKLIANQFNSAIGKIQDSLSSTASALGKLQDVVNQNAQALNTLVKQLSSNFGAISSVLNDILSRLDKVEAEVQIDRLITGRLQSLQTYVTQQLIRAAEIRASANLAATKMSECVLGQSKRVDFCGKGYHLMSFPQSAPHGVVFLHVTYVPAQEKNFTTAPAICHDGKAHFPREGVFVSNGTHWFVTQRNFYEPQIITTDNTFVSGNCDVVIGIVNNTVYDPLQPELDSFKEELDKYFKNHTSPDVDLGDISGINASVVNIQKEIDRLNEVAKNLNESLIDLQELGKYEQYIKWPWYIWLGFIAGLIAIVMVTIMLCCMTSCCSCLKGCCSCGSCCKFDEDDSEPVLKGVKLHYT

SEQ ID NO: 22756 - protein, 1271 aa, Artificial Sequence
  SARS-CoV-2/Wuhan/WIV05/2019__EPI_ISL_402128 spike protein (1-1273)(K986P_V987P_H69del_V70del_A222V_Y453F_S477N_D614G_I692V)
MFVFLVLLPLVSSQCVNLTTRTQLPPAYTNSFTRGVYYPDKVFRSSVLHSTQDLFLPFFSNVTWFHAISGTNGTKRFDNPVLPFNDGVYFASTEKSNIIRGWIFGTTLDSKTQSLLIVNNATNVVIKVCEFQFCNDPFLGVYYHKNNKSWMESEFRVYSSANNCTFEYVSQPFLMDLEGKQGNFKNLREFVFKNIDGYFKIYSKHTPINLVRDLPQGFSVLEPLVDLPIGINITRFQTLLALHRSYLTPGDSSSGWTAGAAAYYVGYLQPRTFLLKYNENGTITDAVDCALDPLSETKCTLKSFTVEKGIYQTSNFRVQPTESIVRFPNITNLCPFGEVFNATRFASVYAWNRKRISNCVADYSVLYNSASFSTFKCYGVSPTKLNDLCFTNVYADSFVIRGDEVRQIAPGQTGKIADYNYKLPDDFTGCVIAWNSNNLDSKVGGNYNYLFRLFRKSNLKPFERDISTEIYQAGNTPCNGVEGFNCYFPLQSYGFQPTNGVGYQPYRVVVLSFELLHAPATVCGPKKSTNLVKNKCVNFNFNGLTGTGVLTESNKKFLPFQQFGRDIADTTDAVRDPQTLEILDITPCSFGGVSVITPGTNTSNQVAVLYQGVNCTEVPVAIHADQLTPTWRVYSTGSNVFQTRAGCLIGAEHVNNSYECDIPIGAGICASYQTQTNSPRRARSVASQSVIAYTMSLGAENSVAYSNNSIAIPTNFTISVTTEILPVSMTKTSVDCTMYICGDSTECSNLLLQYGSFCTQLNRALTGIAVEQDKNTQEVFAQVKQIYKTPPIKDFGGFNFSQILPDPSKPSKRSFIEDLLFNKVTLADAGFIKQYGDCLGDIAARDLICAQKFNGLTVLPPLLTDEMIAQYTSALLAGTITSGWTFGAGAALQIPFAMQMAYRFNGIGVTQNVLYENQKLIANQFNSAIGKIQDSLSSTASALGKLQDVVNQNAQALNTLVKQLSSNFGAISSVLNDILSRLDPPEAEVQIDRLITGRLQSLQTYVTQQLIRAAEIRASANLAATKMSECVLGQSKRVDFCGKGYHLMSFPQSAPHGVVFLHVTYVPAQEKNFTTAPAICHDGKAHFPREGVFVSNGTHWFVTQRNFYEPQIITTDNTFVSGNCDVVIGIVNNTVYDPLQPELDSFKEELDKYFKNHTSPDVDLGDISGINASVVNIQKEIDRLNEVAKNLNESLIDLQELGKYEQYIKWPWYIWLGFIAGLIAIVMVTIMLCCMTSCCSCLKGCCSCGSCCKFDEDDSEPVLKGVKLHYT

SEQ ID NO: 22757 - protein, 1271 aa, Artificial Sequence
  SARS-CoV-2/Wuhan/WIV05/2019__EPI_ISL_402128 spike protein (1-1273)(H69del_V70del_Y453F_D614G_I692V_M1229I)
MFVFLVLLPLVSSQCVNLTTRTQLPPAYTNSFTRGVYYPDKVFRSSVLHSTQDLFLPFFSNVTWFHAISGTNGTKRFDNPVLPFNDGVYFASTEKSNIIRGWIFGTTLDSKTQSLLIVNNATNVVIKVCEFQFCNDPFLGVYYHKNNKSWMESEFRVYSSANNCTFEYVSQPFLMDLEGKQGNFKNLREFVFKNIDGYFKIYSKHTPINLVRDLPQGFSALEPLVDLPIGINITRFQTLLALHRSYLTPGDSSSGWTAGAAAYYVGYLQPRTFLLKYNENGTITDAVDCALDPLSETKCTLKSFTVEKGIYQTSNFRVQPTESIVRFPNITNLCPFGEVFNATRFASVYAWNRKRISNCVADYSVLYNSASFSTFKCYGVSPTKLNDLCFTNVYADSFVIRGDEVRQIAPGQTGKIADYNYKLPDDFTGCVIAWNSNNLDSKVGGNYNYLFRLFRKSNLKPFERDISTEIYQAGSTPCNGVEGFNCYFPLQSYGFQPTNGVGYQPYRVVVLSFELLHAPATVCGPKKSTNLVKNKCVNFNFNGLTGTGVLTESNKKFLPFQQFGRDIADTTDAVRDPQTLEILDITPCSFGGVSVITPGTNTSNQVAVLYQGVNCTEVPVAIHADQLTPTWRVYSTGSNVFQTRAGCLIGAEHVNNSYECDIPIGAGICASYQTQTNSPRRARSVASQSVIAYTMSLGAENSVAYSNNSIAIPTNFTISVTTEILPVSMTKTSVDCTMYICGDSTECSNLLLQYGSFCTQLNRALTGIAVEQDKNTQEVFAQVKQIYKTPPIKDFGGFNFSQILPDPSKPSKRSFIEDLLFNKVTLADAGFIKQYGDCLGDIAARDLICAQKFNGLTVLPPLLTDEMIAQYTSALLAGTITSGWTFGAGAALQIPFAMQMAYRFNGIGVTQNVLYENQKLIANQFNSAIGKIQDSLSSTASALGKLQDVVNQNAQALNTLVKQLSSNFGAISSVLNDILSRLDKVEAEVQIDRLITGRLQSLQTYVTQQLIRAAEIRASANLAATKMSECVLGQSKRVDFCGKGYHLMSFPQSAPHGVVFLHVTYVPAQEKNFTTAPAICHDGKAHFPREGVFVSNGTHWFVTQRNFYEPQIITTDNTFVSGNCDVVIGIVNNTVYDPLQPELDSFKEELDKYFKNHTSPDVDLGDISGINASVVNIQKEIDRLNEVAKNLNESLIDLQELGKYEQYIKWPWYIWLGFIAGLIAIVIVTIMLCCMTSCCSCLKGCCSCGSCCKFDEDDSEPVLKGVKLHYT

SEQ ID NO: 22758 - protein, 1271 aa, Artificial Sequence
  SARS-CoV-2/Wuhan/WIV05/2019__EPI_ISL_402128 spike protein (1-1273)(K986P_V987P_H69del_V70del_Y453F_D614G_I692V_M1229I)
MFVFLVLLPLVSSQCVNLTTRTQLPPAYTNSFTRGVYYPDKVFRSSVLHSTQDLFLPFFSNVTWFHAISGTNGTKRFDNPVLPFNDGVYFASTEKSNIIRGWIFGTTLDSKTQSLLIVNNATNVVIKVCEFQFCNDPFLGVYYHKNNKSWMESEFRVYSSANNCTFEYVSQPFLMDLEGKQGNFKNLREFVFKNIDGYFKIYSKHTPINLVRDLPQGFSALEPLVDLPIGINITRFQTLLALHRSYLTPGDSSSGWTAGAAAYYVGYLQPRTFLLKYNENGTITDAVDCALDPLSETKCTLKSFTVEKGIYQTSNFRVQPTESIVRFPNITNLCPFGEVFNATRFASVYAWNRKRISNCVADYSVLYNSASFSTFKCYGVSPTKLNDLCFTNVYADSFVIRGDEVRQIAPGQTGKIADYNYKLPDDFTGCVIAWNSNNLDSKVGGNYNYLFRLFRKSNLKPFERDISTEIYQAGSTPCNGVEGFNCYFPLQSYGFQPTNGVGYQPYRVVVLSFELLHAPATVCGPKKSTNLVKNKCVNFNFNGLTGTGVLTESNKKFLPFQQFGRDIADTTDAVRDPQTLEILDITPCSFGGVSVITPGTNTSNQVAVLYQGVNCTEVPVAIHADQLTPTWRVYSTGSNVFQTRAGCLIGAEHVNNSYECDIPIGAGICASYQTQTNSPRRARSVASQSVIAYTMSLGAENSVAYSNNSIAIPTNFTISVTTEILPVSMTKTSVDCTMYICGDSTECSNLLLQYGSFCTQLNRALTGIAVEQDKNTQEVFAQVKQIYKTPPIKDFGGFNFSQILPDPSKPSKRSFIEDLLFNKVTLADAGFIKQYGDCLGDIAARDLICAQKFNGLTVLPPLLTDEMIAQYTSALLAGTITSGWTFGAGAALQIPFAMQMAYRFNGIGVTQNVLYENQKLIANQFNSAIGKIQDSLSSTASALGKLQDVVNQNAQALNTLVKQLSSNFGAISSVLNDILSRLDPPEAEVQIDRLITGRLQSLQTYVTQQLIRAAEIRASANLAATKMSECVLGQSKRVDFCGKGYHLMSFPQSAPHGVVFLHVTYVPAQEKNFTTAPAICHDGKAHFPREGVFVSNGTHWFVTQRNFYEPQIITTDNTFVSGNCDVVIGIVNNTVYDPLQPELDSFKEELDKYFKNHTSPDVDLGDISGINASVVNIQKEIDRLNEVAKNLNESLIDLQELGKYEQYIKWPWYIWLGFIAGLIAIVIVTIMLCCMTSCCSCLKGCCSCGSCCKFDEDDSEPVLKGVKLHYT

SEQ ID NO: 22759 - RNA, 3822 nt, Artificial Sequence
  SARS-CoV-2/Wuhan/WIV05/2019__EPI_ISL_402128 spike protein CDS gc (1-1273)(K986P_V987P_F817P_A892P_A899P_A942P)
auguucguguuccugguccuccugccccuggugagcucccagugcgugaaccucaccacccgcacgcagcugccgcccgccuacaccaacagcuucacccggggcgucuacuaccccgacaagguguuccgcuccagcgugcugcacuccacccaggaccucuuccugcccuucuucagcaacgucacgugguuccacgccauccacguguccgggaccaacggcaccaagcgguucgacaacccggugcugcccuucaacgacggggucuacuucgcgagcaccgagaaguccaacaucauccgcggcuggaucuucgggacgacccucgacagcaagacccagucccugcugaucgugaacaacgccaccaacguggucaucaaggugugcgaguuccaguucugcaacgaccccuuccucggcguguacuaccacaagaacaacaagagcuggauggaguccgaguuccgggucuacagcuccgccaacaacugcacguucgaguacgugagccagcccuuccugauggaccuggagggcaagcaggggaacuucaagaaccuccgcgaguucguguucaagaacaucgacggcuacuucaagaucuacuccaagcacaccccgaucaaccugguccgggaccugccccagggguucagcgcccucgagccccugguggaccugcccaucggcaucaacaucacccgcuuccagacccuccuggcccugcaccgguccuaccucacgccgggggacagcagcuccggcuggaccgcgggcgccgccgccuacuacgugggguaccugcagccccgcaccuuccugcucaaguacaacgagaacggcaccaucacggacgcggucgacugcgcccuggacccccugagcgagaccaagugcacccucaaguccuucaccguggagaaggggaucuaccagacgagcaacuuccgggugcagcccaccgaguccaucguccgcuucccgaacaucaccaaccugugccccuucggcgagguguucaacgccacccgguucgccagcgucuacgccuggaaccgcaagcggaucuccaacugcguggcggacuacagcgugcuguacaacuccgccagcuucuccacguucaagugcuacggcgucagccccaccaagcucaacgaccugugcuucaccaacguguacgccgacuccuucgugauccgcggggacgagguccggcagaucgcccccggccagaccgggaagaucgccgacuacaacuacaagcugccggacgacuucacgggcugcgugaucgcguggaacagcaacaaccucgacuccaaggucgggggcaacuacaacuaccuguaccgccuguuccgcaagagcaaccucaagcccuucgagcgggacaucuccaccgagaucuaccaggccggcagcacccccugcaacgggguggagggcuucaacugcuacuucccccugcaguccuacggguuccagccgaccaacggcgugggguaccagcccuaccggguggucgugcugagcuucgagcuccugcacgcccccgccacggugugcggccccaagaaguccaccaaccuggucaagaacaagugcgugaacuucaacuucaacggccucaccgggaccggcgugcugaccgagagcaacaagaaguuccugccguuccagcaguucgggcgcgacaucgccgacacgaccgacgcgguccgcgacccccagacccuggagauccucgacaucacccccugcagcuucggcgggguguccgugaucacgccgggcaccaacaccagcaaccaggucgccgugcuguaccaggacgugaacugcaccgagguccccguggccauccacgccgaccagcugacgcccaccuggcggguguacuccaccggcagcaacgucuuccagacccgcgccgggugccucaucggcgcggagcacgugaacaacuccuacgagugcgacauccccaucggggccggcaucugcgccagcuaccagacgcagaccaacuccccgcggcgcgcccggagcguggcgucccagagcaucaucgccuacaccaugucccugggcgccgagaacagcgucgccuacuccaacaacagcaucgccauccccaccaacuucacgaucuccgugaccaccgagauccugcccgugagcaugaccaagacgagcgucgacugcaccauguacaucugcggggacuccaccgagugcagcaaccuccugcugcaguacggcuccuucugcacccagcucaaccgcgcgcugacggggaucgccguggagcaggacaagaacacccaggagguguucgcccaggucaagcagaucuacaagacgcccccgaucaaggacuucggcggguucaacuucagccagauccugcccgaccccuccaagcccagcaagcggucccccaucgaggaccuccuguucaacaaggugacccuggccgacgccggcuucaucaagcaguacggcgacugccucggggacaucgcggcccgcgaccugaucugcgcccagaaguucaacggccugaccgugcucccgccccugcugaccgacgagaugaucgcccaguacaccagcgcccuccuggcggggaccaucacguccggcuggaccuucggggccggccccgcccugcagauccccuucccgaugcagauggccuaccgguucaacggcaucggggucacccagaacgugcucuacgagaaccagaagcugaucgccaaccaguucaacagcgccaucggcaagauccaggacucccugagcuccacccccagcgcgcucgggaagcugcaggacguggucaaccagaacgcccaggcccugaacacgcucgugaagcagcuguccagcaacuucggcgccaucuccagcgugcugaacgacauccucucccgccuggacccgcccgaggccgaggugcagaucgaccggcugaucaccgggcgccuccagagccugcagaccuacgugacccagcagcugauccgggcggccgagauccgcgccagcgccaaccucgccgcgaccaagauguccgagugcguccugggccagagcaagcggguggacuucugcggcaagggguaccaccugauguccuucccccagagcgccccgcacggcguggucuuccuccacgugacguacguccccgcccaggagaagaacuucaccaccgcccccgcgaucugccacgacgggaaggcccacuucccccgcgagggcguguucguguccaacgggacccacugguucgucacgcagcggaacuucuacgagccgcagaucaucaccaccgacaacaccuucgugagcggcaacugcgacguggucaucggcaucgugaacaacacgguguacgacccccugcagcccgagcuggacuccuucaaggaggagcucgacaaguacuucaagaaccacaccagccccgacgucgaccugggggacaucuccggcaucaacgccagcguggugaacauccagaaggagaucgaccgccugaacgaggucgccaagaaccucaacgagucccugaucgaccugcaggagcucgggaaguacgagcaguacaucaaguggccgugguacaucuggcugggcuucaucgccggccugaucgcgaucgugauggugaccaucaugcucugcugcaugaccagcugcugcuccugccugaaggggugcugcagcugcggcuccugcugcaaguucgacgaggacgacagcgagcccguccugaagggggugaagcuccacuacacguga

SEQ ID NO: 22760 - RNA, 1152 nt, Artificial Sequence
  SARS-CoV-2/Wuhan/WIV05/2019__EPI_ISL_402128 spike protein CDS gc (1-15,334-528) Ferritin construct
auguucguguuccugguccuccugccccuggugagcucccagugcaaccugugccccuucggcgagguguucaacgccacccgguucgccagcgucuacgccuggaaccgcaagcggaucuccaacugcguggcggacuacagcgugcuguacaacuccgccagcuucuccacguucaagugcuacggcgucagccccaccaagcucaacgaccugugcuucaccaacguguacgccgacuccuucgugauccgcggggacgagguccggcagaucgcccccggccagaccgggaagaucgccgacuacaacuacaagcugccggacgacuucacgggcugcgugaucgcguggaacagcaacaaccucgacuccaaggucgggggcaacuacaacuaccuguaccgccuguuccgcaagagcaaccucaagcccuucgagcgggacaucuccaccgagaucuaccaggccggcagcacccccugcaacgggguggagggcuucaacugcuacuucccccugcaguccuacggguuccagccgaccaacggcgugggguaccagcccuaccggguggucgugcugagcuucgagcuccugcacgcccccgccacggugugcggccccaagggcggggguggaagcggcggggguggaagugacaucaucaagcuccugaacgagcaggucaacaaggagaugcaguccagcaaccuguacauguccaugagcuccuggugcuacacccacagccucgacggcgccgggcuguuccuguucgaccacgccgcggaggaguacgagcacgccaagaagcucaucaucuuccugaacgagaacaacgugcccgugcagcugaccuccaucagcgccccggagcacaaguucgagggccucacgcagaucuuccagaaggccuacgagcacgagcagcacaucuccgagagcaucaacaacaucguggaccacgccaucaaguccaaggaccacgcgaccuucaacuuccugcagugguacgucgccgagcagcacgaggaggaggugcuguucaaggacauccucgacaagaucgagcugaucgggaacgagaaccacggccuguaccucgccgaccaguacgugaaggggaucgccaagagccgcaaguccuga

SEQ ID NO: 22761 - RNA, 750 nt, Artificial Sequence
  SARS-CoV-2/Wuhan/WIV05/2019__EPI_ISL_402128 spike protein CDS gc (334-528) Foldon construct
augcccaugggcagccugcagccgcucgccacccuguaccugcucgggaugcugguggccuccguccuggcgaaccugugccccuucggcgagguguucaacgccacccgguucgccagcgucuacgccuggaaccgcaagcggaucuccaacugcguggcggacuacagcgugcuguacaacuccgccagcuucuccacguucaagugcuacggcgucagccccaccaagcucaacgaccugugcuucaccaacguguacgccgacuccuucgugauccgcggggacgagguccggcagaucgcccccggccagaccgggaagaucgccgacuacaacuacaagcugccggacgacuucacgggcugcgugaucgcguggaacagcaacaaccucgacuccaaggucgggggcaacuacaacuaccuguaccgccuguuccgcaagagcaaccucaagcccuucgagcgggacaucuccaccgagaucuaccaggccggcagcacccccugcaacgggguggagggcuucaacugcuacuucccccugcaguccuacggguuccagccgaccaacggcgugggguaccagcccuaccggguggucgugcugagcuucgagcuccugcacgcccccgccacggugugcggccccaagggcagcggcggguacauccccgaggccccgcgcgacggccaggccuacgugcggaaggacggcgaguggguccugcugagcaccuuccucuga

SEQ ID NO: 22762 - RNA, 1128 nt, Artificial Sequence
  SARS-CoV-2/Wuhan/WIV05/2019__EPI_ISL_402128 spike protein CDS gc (1-15,334-528) LumSynth construct
auguucguguuccugguccuccugccccuggugagcucccagugcaaccugugccccuucggcgagguguucaacgccacccgguucgccagcgucuacgccuggaaccgcaagcggaucuccaacugcguggcggacuacagcgugcuguacaacuccgccagcuucuccacguucaagugcuacggcgucagccccaccaagcucaacgaccugugcuucaccaacguguacgccgacuccuucgugauccgcggggacgagguccggcagaucgcccccggccagaccgggaagaucgccgacuacaacuacaagcugccggacgacuucacgggcugcgugaucgcguggaacagcaacaaccucgacuccaaggucgggggcaacuacaacuaccuguaccgccuguuccgcaagagcaaccucaagcccuucgagcgggacaucuccaccgagaucuaccaggccggcagcacccccugcaacgggguggagggcuucaacugcuacuucccccugcaguccuacggguuccagccgaccaacggcgugggguaccagcccuaccggguggucgugcugagcuucgagcuccugcacgcccccgccacggugugcggccccaagggcggcggcggcuccggaggcggagguagcgggggacagaucuacgagggcaagcugaccgccgaggggcuccgcuucggcaucguggccagccgguucaaccacgcgcuggucgaccgccugguggagggggccaucgacgccaucgugcggcacggcgggcgcgaggaggacaucacccucguccgggugcccggcuccugggagaucccgguggccgccggcgagcuggcccgcaaggaggacaucgacgcggucaucgccaucggggugcugauccggggcgccacgccccacuucgacuacaucgccagcgagguguccaaggggcucgcggaccugagccuggagcuccgcaagcccaucaccuucggcgucaucaccgccgacacccuggagcaggccaucgagcgggccgggacgaagcacggcaacaagggcugggaggccgcgcuguccgccaucgagauggccaaccucuucaagagccugcgcuga

SEQ ID NO: 22763 - RNA, 1089 nt, Artificial Sequence
  SARS-CoV-2/Wuhan/WIV05/2019__EPI_ISL_402128 spike protein CDS gc (334-528) LumSynth construct
augcagaucuacgagggcaagcugaccgccgaggggcuccgcuucggcaucguggccagccgguucaaccacgcgcuggucgaccgccugguggagggggccaucgacgccaucgugcggcacggcgggcgcgaggaggacaucacccucguccgggugcccggcuccugggagaucccgguggccgccggcgagcuggcccgcaaggaggacaucgacgcggucaucgccaucggggugcugauccggggcgccacgccccacuucgacuacaucgccagcgagguguccaaggggcucgcggaccugagccuggagcuccgcaagcccaucaccuucggcgucaucaccgccgacacccuggagcaggccaucgagcgggccgggacgaagcacggcaacaagggcugggaggccgcgcuguccgccaucgagauggccaaccucuucaagagccugcgcggcgggggcgggagcggcgggggcggcuccgggggcgggaaccugugccccuucggcgagguguucaacgccacccgguucgccagcgucuacgccuggaaccgcaagcggaucuccaacugcguggcggacuacagcgugcuguacaacuccgccagcuucuccacguucaagugcuacggcgucagccccaccaagcucaacgaccugugcuucaccaacguguacgccgacuccuucgugauccgcggggacgagguccggcagaucgcccccggccagaccgggaagaucgccgacuacaacuacaagcugccggacgacuucacgggcugcgugaucgcguggaacagcaacaaccucgacuccaaggucgggggcaacuacaacuaccuguaccgccuguuccgcaagagcaaccucaagcccuucgagcgggacaucuccaccgagaucuaccaggccggcagcacccccugcaacgggguggagggcuucaacugcuacuucccccugcaguccuacggguuccagccgaccaacggcgugggguaccagcccuaccggguggucgugcugagcuucgagcuccugcacgcccccgccacggugugcggccccaaguga

SEQ ID NO: 22764 - RNA, 3822 nt, Artificial Sequence
  SARS-CoV-2/Wuhan/WIV05/2019__EPI_ISL_402128 spike protein CDS gc (1-1273)(D614G)
auguucguguuccugguccuccugccccuggugagcucccagugcgugaaccucaccacccgcacgcagcugccgcccgccuacaccaacagcuucacccggggcgucuacuaccccgacaagguguuccgcuccagcgugcugcacuccacccaggaccucuuccugcccuucuucagcaacgucacgugguuccacgccauccacguguccgggaccaacggcaccaagcgguucgacaacccggugcugcccuucaacgacggggucuacuucgcgagcaccgagaaguccaacaucauccgcggcuggaucuucgggacgacccucgacagcaagacccagucccugcugaucgugaacaacgccaccaacguggucaucaaggugugcgaguuccaguucugcaacgaccccuuccucggcguguacuaccacaagaacaacaagagcuggauggaguccgaguuccgggucuacagcuccgccaacaacugcacguucgaguacgugagccagcccuuccugauggaccuggagggcaagcaggggaacuucaagaaccuccgcgaguucguguucaagaacaucgacggcuacuucaagaucuacuccaagcacaccccgaucaaccugguccgggaccugccccagggguucagcgcccucgagccccugguggaccugcccaucggcaucaacaucacccgcuuccagacccuccuggcccugcaccgguccuaccucacgccgggggacagcagcuccggcuggaccgcgggcgccgccgccuacuacgugggguaccugcagccccgcaccuuccugcucaaguacaacgagaacggcaccaucacggacgcggucgacugcgcccuggacccccugagcgagaccaagugcacccucaaguccuucaccguggagaaggggaucuaccagacgagcaacuuccgggugcagcccaccgaguccaucguccgcuucccgaacaucaccaaccugugccccuucggcgagguguucaacgccacccgguucgccagcgucuacgccuggaaccgcaagcggaucuccaacugcguggcggacuacagcgugcuguacaacuccgccagcuucuccacguucaagugcuacggcgucagccccaccaagcucaacgaccugugcuucaccaacguguacgccgacuccuucgugauccgcggggacgagguccggcagaucgcccccggccagaccgggaagaucgccgacuacaacuacaagcugccggacgacuucacgggcugcgugaucgcguggaacagcaacaaccucgacuccaaggucgggggcaacuacaacuaccuguaccgccuguuccgcaagagcaaccucaagcccuucgagcgggacaucuccaccgagaucuaccaggccggcagcacccccugcaacgggguggagggcuucaacugcuacuucccccugcaguccuacggguuccagccgaccaacggcgugggguaccagcccuaccggguggucgugcugagcuucgagcuccugcacgcccccgccacggugugcggccccaagaaguccaccaaccuggucaagaacaagugcgugaacuucaacuucaacggccucaccgggaccggcgugcugaccgagagcaacaagaaguuccugccguuccagcaguucgggcgcgacaucgccgacacgaccgacgcgguccgcgacccccagacccuggagauccucgacaucacccccugcagcuucggcgggguguccgugaucacgccgggcaccaacaccagcaaccaggucgccgugcuguaccagggcgugaacugcaccgagguccccguggccauccacgccgaccagcugacgcccaccuggcggguguacuccaccggcagcaacgucuuccagacccgcgccgggugccucaucggcgcggagcacgugaacaacuccuacgagugcgacauccccaucggggccggcaucugcgccagcuaccagacgcagaccaacuccccgcggcgcgcccggagcguggcgucccagagcaucaucgccuacaccaugucccugggcgccgagaacagcgucgccuacuccaacaacagcaucgccauccccaccaacuucacgaucuccgugaccaccgagauccugcccgugagcaugaccaagacgagcgucgacugcaccauguacaucugcggggacuccaccgagugcagcaaccuccugcugcaguacggcuccuucugcacccagcucaaccgcgcgcugacggggaucgccguggagcaggacaagaacacccaggagguguucgcccaggucaagcagaucuacaagacgcccccgaucaaggacuucggcggguucaacuucagccagauccugcccgaccccuccaagcccagcaagcgguccuucaucgaggaccuccuguucaacaaggugacccuggccgacgccggcuucaucaagcaguacggcgacugccucggggacaucgcggcccgcgaccugaucugcgcccagaaguucaacggccugaccgugcucccgccccugcugaccgacgagaugaucgcccaguacaccagcgcccuccuggcggggaccaucacguccggcuggaccuucggggccggcgccgcccugcagauccccuucgcgaugcagauggccuaccgguucaacggcaucggggucacccagaacgugcucuacgagaaccagaagcugaucgccaaccaguucaacagcgccaucggcaagauccaggacucccugagcuccaccgccagcgcgcucgggaagcugcaggacguggucaaccagaacgcccaggcccugaacacgcucgugaagcagcuguccagcaacuucggcgccaucuccagcgugcugaacgacauccucucccgccuggacaaggucgaggccgaggugcagaucgaccggcugaucaccgggcgccuccagagccugcagaccuacgugacccagcagcugauccgggcggccgagauccgcgccagcgccaaccucgccgcgaccaagauguccgagugcguccugggccagagcaagcggguggacuucugcggcaagggguaccaccugauguccuucccccagagcgccccgcacggcguggucuuccuccacgugacguacguccccgcccaggagaagaacuucaccaccgcccccgcgaucugccacgacgggaaggcccacuucccccgcgagggcguguucguguccaacgggacccacugguucgucacgcagcggaacuucuacgagccgcagaucaucaccaccgacaacaccuucgugagcggcaacugcgacguggucaucggcaucgugaacaacacgguguacgacccccugcagcccgagcuggacuccuucaaggaggagcucgacaaguacuucaagaaccacaccagccccgacgucgaccugggggacaucuccggcaucaacgccagcguggugaacauccagaaggagaucgaccgccugaacgaggucgccaagaaccucaacgagucccugaucgaccugcaggagcucgggaaguacgagcaguacaucaaguggccgugguacaucuggcugggcuucaucgccggccugaucgcgaucgugauggugaccaucaugcucugcugcaugaccagcugcugcuccugccugaaggggugcugcagcugcggcuccugcugcaaguucgacgaggacgacagcgagcccguccugaagggggugaagcuccacuacacguga

SEQ ID NO: 22765 - RNA, 3822 nt, Artificial Sequence
  SARS-CoV-2/Wuhan/WIV05/2019__EPI_ISL_402128 spike protein CDS gc (1-1273)(K986P_V987P_ D614G)
auguucguguuccugguccuccugccccuggugagcucccagugcgugaaccucaccacccgcacgcagcugccgcccgccuacaccaacagcuucacccggggcgucuacuaccccgacaagguguuccgcuccagcgugcugcacuccacccaggaccucuuccugcccuucuucagcaacgucacgugguuccacgccauccacguguccgggaccaacggcaccaagcgguucgacaacccggugcugcccuucaacgacggggucuacuucgcgagcaccgagaaguccaacaucauccgcggcuggaucuucgggacgacccucgacagcaagacccagucccugcugaucgugaacaacgccaccaacguggucaucaaggugugcgaguuccaguucugcaacgaccccuuccucggcguguacuaccacaagaacaacaagagcuggauggaguccgaguuccgggucuacagcuccgccaacaacugcacguucgaguacgugagccagcccuuccugauggaccuggagggcaagcaggggaacuucaagaaccuccgcgaguucguguucaagaacaucgacggcuacuucaagaucuacuccaagcacaccccgaucaaccugguccgggaccugccccagggguucagcgcccucgagccccugguggaccugcccaucggcaucaacaucacccgcuuccagacccuccuggcccugcaccgguccuaccucacgccgggggacagcagcuccggcuggaccgcgggcgccgccgccuacuacgugggguaccugcagccccgcaccuuccugcucaaguacaacgagaacggcaccaucacggacgcggucgacugcgcccuggacccccugagcgagaccaagugcacccucaaguccuucaccguggagaaggggaucuaccagacgagcaacuuccgggugcagcccaccgaguccaucguccgcuucccgaacaucaccaaccugugccccuucggcgagguguucaacgccacccgguucgccagcgucuacgccuggaaccgcaagcggaucuccaacugcguggcggacuacagcgugcuguacaacuccgccagcuucuccacguucaagugcuacggcgucagccccaccaagcucaacgaccugugcuucaccaacguguacgccgacuccuucgugauccgcggggacgagguccggcagaucgcccccggccagaccgggaagaucgccgacuacaacuacaagcugccggacgacuucacgggcugcgugaucgcguggaacagcaacaaccucgacuccaaggucgggggcaacuacaacuaccuguaccgccuguuccgcaagagcaaccucaagcccuucgagcgggacaucuccaccgagaucuaccaggccggcagcacccccugcaacgggguggagggcuucaacugcuacuucccccugcaguccuacggguuccagccgaccaacggcgugggguaccagcccuaccggguggucgugcugagcuucgagcuccugcacgcccccgccacggugugcggccccaagaaguccaccaaccuggucaagaacaagugcgugaacuucaacuucaacggccucaccgggaccggcgugcugaccgagagcaacaagaaguuccugccguuccagcaguucgggcgcgacaucgccgacacgaccgacgcgguccgcgacccccagacccuggagauccucgacaucacccccugcagcuucggcgggguguccgugaucacgccgggcaccaacaccagcaaccaggucgccgugcuguaccagggcgugaacugcaccgagguccccguggccauccacgccgaccagcugacgcccaccuggcggguguacuccaccggcagcaacgucuuccagacccgcgccgggugccucaucggcgcggagcacgugaacaacuccuacgagugcgacauccccaucggggccggcaucugcgccagcuaccagacgcagaccaacuccccgcggcgcgcccggagcguggcgucccagagcaucaucgccuacaccaugucccugggcgccgagaacagcgucgccuacuccaacaacagcaucgccauccccaccaacuucacgaucuccgugaccaccgagauccugcccgugagcaugaccaagacgagcgucgacugcaccauguacaucugcggggacuccaccgagugcagcaaccuccugcugcaguacggcuccuucugcacccagcucaaccgcgcgcugacggggaucgccguggagcaggacaagaacacccaggagguguucgcccaggucaagcagaucuacaagacgcccccgaucaaggacuucggcggguucaacuucagccagauccugcccgaccccuccaagcccagcaagcgguccuucaucgaggaccuccuguucaacaaggugacccuggccgacgccggcuucaucaagcaguacggcgacugccucggggacaucgcggcccgcgaccugaucugcgcccagaaguucaacggccugaccgugcucccgccccugcugaccgacgagaugaucgcccaguacaccagcgcccuccuggcggggaccaucacguccggcuggaccuucggggccggcgccgcccugcagauccccuucgcgaugcagauggccuaccgguucaacggcaucggggucacccagaacgugcucuacgagaaccagaagcugaucgccaaccaguucaacagcgccaucggcaagauccaggacucccugagcuccaccgccagcgcgcucgggaagcugcaggacguggucaaccagaacgcccaggcccugaacacgcucgugaagcagcuguccagcaacuucggcgccaucuccagcgugcugaacgacauccucucccgccuggacccgcccgaggccgaggugcagaucgaccggcugaucaccgggcgccuccagagccugcagaccuacgugacccagcagcugauccgggcggccgagauccgcgccagcgccaaccucgccgcgaccaagauguccgagugcguccugggccagagcaagcggguggacuucugcggcaagggguaccaccugauguccuucccccagagcgccccgcacggcguggucuuccuccacgugacguacguccccgcccaggagaagaacuucaccaccgcccccgcgaucugccacgacgggaaggcccacuucccccgcgagggcguguucguguccaacgggacccacugguucgucacgcagcggaacuucuacgagccgcagaucaucaccaccgacaacaccuucgugagcggcaacugcgacguggucaucggcaucgugaacaacacgguguacgacccccugcagcccgagcuggacuccuucaaggaggagcucgacaaguacuucaagaaccacaccagccccgacgucgaccugggggacaucuccggcaucaacgccagcguggugaacauccagaaggagaucgaccgccugaacgaggucgccaagaaccucaacgagucccugaucgaccugcaggagcucgggaaguacgagcaguacaucaaguggccgugguacaucuggcugggcuucaucgccggccugaucgcgaucgugauggugaccaucaugcucugcugcaugaccagcugcugcuccugccugaaggggugcugcagcugcggcuccugcugcaaguucgacgaggacgacagcgagcccguccugaagggggugaagcuccacuacacguga

SEQ ID NO: 22766 - RNA, 3822 nt, Artificial Sequence
  SARS-CoV-2/Wuhan/WIV05/2019__EPI_ISL_402128 spike protein CDS gc (1-1273)(A222V_D614G)
auguucguguuccugguccuccugccccuggugagcucccagugcgugaaccucaccacccgcacgcagcugccgcccgccuacaccaacagcuucacccggggcgucuacuaccccgacaagguguuccgcuccagcgugcugcacuccacccaggaccucuuccugcccuucuucagcaacgucacgugguuccacgccauccacguguccgggaccaacggcaccaagcgguucgacaacccggugcugcccuucaacgacggggucuacuucgcgagcaccgagaaguccaacaucauccgcggcuggaucuucgggacgacccucgacagcaagacccagucccugcugaucgugaacaacgccaccaacguggucaucaaggugugcgaguuccaguucugcaacgaccccuuccucggcguguacuaccacaagaacaacaagagcuggauggaguccgaguuccgggucuacagcuccgccaacaacugcacguucgaguacgugagccagcccuuccugauggaccuggagggcaagcaggggaacuucaagaaccuccgcgaguucguguucaagaacaucgacggcuacuucaagaucuacuccaagcacaccccgaucaaccugguccgggaccugccccagggguucagcguccucgagccccugguggaccugcccaucggcaucaacaucacccgcuuccagacccuccuggcccugcaccgguccuaccucacgccgggggacagcagcuccggcuggaccgcgggcgccgccgccuacuacgugggguaccugcagccccgcaccuuccugcucaaguacaacgagaacggcaccaucacggacgcggucgacugcgcccuggacccccugagcgagaccaagugcacccucaaguccuucaccguggagaaggggaucuaccagacgagcaacuuccgggugcagcccaccgaguccaucguccgcuucccgaacaucaccaaccugugccccuucggcgagguguucaacgccacccgguucgccagcgucuacgccuggaaccgcaagcggaucuccaacugcguggcggacuacagcgugcuguacaacuccgccagcuucuccacguucaagugcuacggcgucagccccaccaagcucaacgaccugugcuucaccaacguguacgccgacuccuucgugauccgcggggacgagguccggcagaucgcccccggccagaccgggaagaucgccgacuacaacuacaagcugccggacgacuucacgggcugcgugaucgcguggaacagcaacaaccucgacuccaaggucgggggcaacuacaacuaccuguaccgccuguuccgcaagagcaaccucaagcccuucgagcgggacaucuccaccgagaucuaccaggccggcagcacccccugcaacgggguggagggcuucaacugcuacuucccccugcaguccuacggguuccagccgaccaacggcgugggguaccagcccuaccggguggucgugcugagcuucgagcuccugcacgcccccgccacggugugcggccccaagaaguccaccaaccuggucaagaacaagugcgugaacuucaacuucaacggccucaccgggaccggcgugcugaccgagagcaacaagaaguuccugccguuccagcaguucgggcgcgacaucgccgacacgaccgacgcgguccgcgacccccagacccuggagauccucgacaucacccccugcagcuucggcgggguguccgugaucacgccgggcaccaacaccagcaaccaggucgccgugcuguaccagggcgugaacugcaccgagguccccguggccauccacgccgaccagcugacgcccaccuggcggguguacuccaccggcagcaacgucuuccagacccgcgccgggugccucaucggcgcggagcacgugaacaacuccuacgagugcgacauccccaucggggccggcaucugcgccagcuaccagacgcagaccaacuccccgcggcgcgcccggagcguggcgucccagagcaucaucgccuacaccaugucccugggcgccgagaacagcgucgccuacuccaacaacagcaucgccauccccaccaacuucacgaucuccgugaccaccgagauccugcccgugagcaugaccaagacgagcgucgacugcaccauguacaucugcggggacuccaccgagugcagcaaccuccugcugcaguacggcuccuucugcacccagcucaaccgcgcgcugacggggaucgccguggagcaggacaagaacacccaggagguguucgcccaggucaagcagaucuacaagacgcccccgaucaaggacuucggcggguucaacuucagccagauccugcccgaccccuccaagcccagcaagcgguccuucaucgaggaccuccuguucaacaaggugacccuggccgacgccggcuucaucaagcaguacggcgacugccucggggacaucgcggcccgcgaccugaucugcgcccagaaguucaacggccugaccgugcucccgccccugcugaccgacgagaugaucgcccaguacaccagcgcccuccuggcggggaccaucacguccggcuggaccuucggggccggcgccgcccugcagauccccuucgcgaugcagauggccuaccgguucaacggcaucggggucacccagaacgugcucuacgagaaccagaagcugaucgccaaccaguucaacagcgccaucggcaagauccaggacucccugagcuccaccgccagcgcgcucgggaagcugcaggacguggucaaccagaacgcccaggcccugaacacgcucgugaagcagcuguccagcaacuucggcgccaucuccagcgugcugaacgacauccucucccgccuggacaaggucgaggccgaggugcagaucgaccggcugaucaccgggcgccuccagagccugcagaccuacgugacccagcagcugauccgggcggccgagauccgcgccagcgccaaccucgccgcgaccaagauguccgagugcguccugggccagagcaagcggguggacuucugcggcaagggguaccaccugauguccuucccccagagcgccccgcacggcguggucuuccuccacgugacguacguccccgcccaggagaagaacuucaccaccgcccccgcgaucugccacgacgggaaggcccacuucccccgcgagggcguguucguguccaacgggacccacugguucgucacgcagcggaacuucuacgagccgcagaucaucaccaccgacaacaccuucgugagcggcaacugcgacguggucaucggcaucgugaacaacacgguguacgacccccugcagcccgagcuggacuccuucaaggaggagcucgacaaguacuucaagaaccacaccagccccgacgucgaccugggggacaucuccggcaucaacgccagcguggugaacauccagaaggagaucgaccgccugaacgaggucgccaagaaccucaacgagucccugaucgaccugcaggagcucgggaaguacgagcaguacaucaaguggccgugguacaucuggcugggcuucaucgccggccugaucgcgaucgugauggugaccaucaugcucugcugcaugaccagcugcugcuccugccugaaggggugcugcagcugcggcuccugcugcaaguucgacgaggacgacagcgagcccguccugaagggggugaagcuccacuacacguga

SEQ ID NO: 22767 - RNA, 3822 nt, Artificial Sequence
  SARS-CoV-2/Wuhan/WIV05/2019__EPI_ISL_402128 spike protein CDS gc (1-1273)(K986P_V987P_A222V_D614G)
auguucguguuccugguccuccugccccuggugagcucccagugcgugaaccucaccacccgcacgcagcugccgcccgccuacaccaacagcuucacccggggcgucuacuaccccgacaagguguuccgcuccagcgugcugcacuccacccaggaccucuuccugcccuucuucagcaacgucacgugguuccacgccauccacguguccgggaccaacggcaccaagcgguucgacaacccggugcugcccuucaacgacggggucuacuucgcgagcaccgagaaguccaacaucauccgcggcuggaucuucgggacgacccucgacagcaagacccagucccugcugaucgugaacaacgccaccaacguggucaucaaggugugcgaguuccaguucugcaacgaccccuuccucggcguguacuaccacaagaacaacaagagcuggauggaguccgaguuccgggucuacagcuccgccaacaacugcacguucgaguacgugagccagcccuuccugauggaccuggagggcaagcaggggaacuucaagaaccuccgcgaguucguguucaagaacaucgacggcuacuucaagaucuacuccaagcacaccccgaucaaccugguccgggaccugccccagggguucagcguccucgagccccugguggaccugcccaucggcaucaacaucacccgcuuccagacccuccuggcccugcaccgguccuaccucacgccgggggacagcagcuccggcuggaccgcgggcgccgccgccuacuacgugggguaccugcagccccgcaccuuccugcucaaguacaacgagaacggcaccaucacggacgcggucgacugcgcccuggacccccugagcgagaccaagugcacccucaaguccuucaccguggagaaggggaucuaccagacgagcaacuuccgggugcagcccaccgaguccaucguccgcuucccgaacaucaccaaccugugccccuucggcgagguguucaacgccacccgguucgccagcgucuacgccuggaaccgcaagcggaucuccaacugcguggcggacuacagcgugcuguacaacuccgccagcuucuccacguucaagugcuacggcgucagccccaccaagcucaacgaccugugcuucaccaacguguacgccgacuccuucgugauccgcggggacgagguccggcagaucgcccccggccagaccgggaagaucgccgacuacaacuacaagcugccggacgacuucacgggcugcgugaucgcguggaacagcaacaaccucgacuccaaggucgggggcaacuacaacuaccuguaccgccuguuccgcaagagcaaccucaagcccuucgagcgggacaucuccaccgagaucuaccaggccggcagcacccccugcaacgggguggagggcuucaacugcuacuucccccugcaguccuacggguuccagccgaccaacggcgugggguaccagcccuaccggguggucgugcugagcuucgagcuccugcacgcccccgccacggugugcggccccaagaaguccaccaaccuggucaagaacaagugcgugaacuucaacuucaacggccucaccgggaccggcgugcugaccgagagcaacaagaaguuccugccguuccagcaguucgggcgcgacaucgccgacacgaccgacgcgguccgcgacccccagacccuggagauccucgacaucacccccugcagcuucggcgggguguccgugaucacgccgggcaccaacaccagcaaccaggucgccgugcuguaccagggcgugaacugcaccgagguccccguggccauccacgccgaccagcugacgcccaccuggcggguguacuccaccggcagcaacgucuuccagacccgcgccgggugccucaucggcgcggagcacgugaacaacuccuacgagugcgacauccccaucggggccggcaucugcgccagcuaccagacgcagaccaacuccccgcggcgcgcccggagcguggcgucccagagcaucaucgccuacaccaugucccugggcgccgagaacagcgucgccuacuccaacaacagcaucgccauccccaccaacuucacgaucuccgugaccaccgagauccugcccgugagcaugaccaagacgagcgucgacugcaccauguacaucugcggggacuccaccgagugcagcaaccuccugcugcaguacggcuccuucugcacccagcucaaccgcgcgcugacggggaucgccguggagcaggacaagaacacccaggagguguucgcccaggucaagcagaucuacaagacgcccccgaucaaggacuucggcggguucaacuucagccagauccugcccgaccccuccaagcccagcaagcgguccuucaucgaggaccuccuguucaacaaggugacccuggccgacgccggcuucaucaagcaguacggcgacugccucggggacaucgcggcccgcgaccugaucugcgcccagaaguucaacggccugaccgugcucccgccccugcugaccgacgagaugaucgcccaguacaccagcgcccuccuggcggggaccaucacguccggcuggaccuucggggccggcgccgcccugcagauccccuucgcgaugcagauggccuaccgguucaacggcaucggggucacccagaacgugcucuacgagaaccagaagcugaucgccaaccaguucaacagcgccaucggcaagauccaggacucccugagcuccaccgccagcgcgcucgggaagcugcaggacguggucaaccagaacgcccaggcccugaacacgcucgugaagcagcuguccagcaacuucggcgccaucuccagcgugcugaacgacauccucucccgccuggacccgcccgaggccgaggugcagaucgaccggcugaucaccgggcgccuccagagccugcagaccuacgugacccagcagcugauccgggcggccgagauccgcgccagcgccaaccucgccgcgaccaagauguccgagugcguccugggccagagcaagcggguggacuucugcggcaagggguaccaccugauguccuucccccagagcgccccgcacggcguggucuuccuccacgugacguacguccccgcccaggagaagaacuucaccaccgcccccgcgaucugccacgacgggaaggcccacuucccccgcgagggcguguucguguccaacgggacccacugguucgucacgcagcggaacuucuacgagccgcagaucaucaccaccgacaacaccuucgugagcggcaacugcgacguggucaucggcaucgugaacaacacgguguacgacccccugcagcccgagcuggacuccuucaaggaggagcucgacaaguacuucaagaaccacaccagccccgacgucgaccugggggacaucuccggcaucaacgccagcguggugaacauccagaaggagaucgaccgccugaacgaggucgccaagaaccucaacgagucccugaucgaccugcaggagcucgggaaguacgagcaguacaucaaguggccgugguacaucuggcugggcuucaucgccggccugaucgcgaucgugauggugaccaucaugcucugcugcaugaccagcugcugcuccugccugaaggggugcugcagcugcggcuccugcugcaaguucgacgaggacgacagcgagcccguccugaagggggugaagcuccacuacacguga

SEQ ID NO: 22768 - RNA, 3822 nt, Artificial Sequence
  SARS-CoV-2/Wuhan/WIV05/2019__EPI_ISL_402128 spike protein CDS gc (1-1273)(N439K_D614G)
auguucguguuccugguccuccugccccuggugagcucccagugcgugaaccucaccacccgcacgcagcugccgcccgccuacaccaacagcuucacccggggcgucuacuaccccgacaagguguuccgcuccagcgugcugcacuccacccaggaccucuuccugcccuucuucagcaacgucacgugguuccacgccauccacguguccgggaccaacggcaccaagcgguucgacaacccggugcugcccuucaacgacggggucuacuucgcgagcaccgagaaguccaacaucauccgcggcuggaucuucgggacgacccucgacagcaagacccagucccugcugaucgugaacaacgccaccaacguggucaucaaggugugcgaguuccaguucugcaacgaccccuuccucggcguguacuaccacaagaacaacaagagcuggauggaguccgaguuccgggucuacagcuccgccaacaacugcacguucgaguacgugagccagcccuuccugauggaccuggagggcaagcaggggaacuucaagaaccuccgcgaguucguguucaagaacaucgacggcuacuucaagaucuacuccaagcacaccccgaucaaccugguccgggaccugccccagggguucagcgcccucgagccccugguggaccugcccaucggcaucaacaucacccgcuuccagacccuccuggcccugcaccgguccuaccucacgccgggggacagcagcuccggcuggaccgcgggcgccgccgccuacuacgugggguaccugcagccccgcaccuuccugcucaaguacaacgagaacggcaccaucacggacgcggucgacugcgcccuggacccccugagcgagaccaagugcacccucaaguccuucaccguggagaaggggaucuaccagacgagcaacuuccgggugcagcccaccgaguccaucguccgcuucccgaacaucaccaaccugugccccuucggcgagguguucaacgccacccgguucgccagcgucuacgccuggaaccgcaagcggaucuccaacugcguggcggacuacagcgugcuguacaacuccgccagcuucuccacguucaagugcuacggcgucagccccaccaagcucaacgaccugugcuucaccaacguguacgccgacuccuucgugauccgcggggacgagguccggcagaucgcccccggccagaccgggaagaucgccgacuacaacuacaagcugccggacgacuucacgggcugcgugaucgcguggaacagcaagaaccucgacuccaaggucgggggcaacuacaacuaccuguaccgccuguuccgcaagagcaaccucaagcccuucgagcgggacaucuccaccgagaucuaccaggccggcagcacccccugcaacgggguggagggcuucaacugcuacuucccccugcaguccuacggguuccagccgaccaacggcgugggguaccagcccuaccggguggucgugcugagcuucgagcuccugcacgcccccgccacggugugcggccccaagaaguccaccaaccuggucaagaacaagugcgugaacuucaacuucaacggccucaccgggaccggcgugcugaccgagagcaacaagaaguuccugccguuccagcaguucgggcgcgacaucgccgacacgaccgacgcgguccgcgacccccagacccuggagauccucgacaucacccccugcagcuucggcgggguguccgugaucacgccgggcaccaacaccagcaaccaggucgccgugcuguaccagggcgugaacugcaccgagguccccguggccauccacgccgaccagcugacgcccaccuggcggguguacuccaccggcagcaacgucuuccagacccgcgccgggugccucaucggcgcggagcacgugaacaacuccuacgagugcgacauccccaucggggccggcaucugcgccagcuaccagacgcagaccaacuccccgcggcgcgcccggagcguggcgucccagagcaucaucgccuacaccaugucccugggcgccgagaacagcgucgccuacuccaacaacagcaucgccauccccaccaacuucacgaucuccgugaccaccgagauccugcccgugagcaugaccaagacgagcgucgacugcaccauguacaucugcggggacuccaccgagugcagcaaccuccugcugcaguacggcuccuucugcacccagcucaaccgcgcgcugacggggaucgccguggagcaggacaagaacacccaggagguguucgcccaggucaagcagaucuacaagacgcccccgaucaaggacuucggcggguucaacuucagccagauccugcccgaccccuccaagcccagcaagcgguccuucaucgaggaccuccuguucaacaaggugacccuggccgacgccggcuucaucaagcaguacggcgacugccucggggacaucgcggcccgcgaccugaucugcgcccagaaguucaacggccugaccgugcucccgccccugcugaccgacgagaugaucgcccaguacaccagcgcccuccuggcggggaccaucacguccggcuggaccuucggggccggcgccgcccugcagauccccuucgcgaugcagauggccuaccgguucaacggcaucggggucacccagaacgugcucuacgagaaccagaagcugaucgccaaccaguucaacagcgccaucggcaagauccaggacucccugagcuccaccgccagcgcgcucgggaagcugcaggacguggucaaccagaacgcccaggcccugaacacgcucgugaagcagcuguccagcaacuucggcgccaucuccagcgugcugaacgacauccucucccgccuggacaaggucgaggccgaggugcagaucgaccggcugaucaccgggcgccuccagagccugcagaccuacgugacccagcagcugauccgggcggccgagauccgcgccagcgccaaccucgccgcgaccaagauguccgagugcguccugggccagagcaagcggguggacuucugcggcaagggguaccaccugauguccuucccccagagcgccccgcacggcguggucuuccuccacgugacguacguccccgcccaggagaagaacuucaccaccgcccccgcgaucugccacgacgggaaggcccacuucccccgcgagggcguguucguguccaacgggacccacugguucgucacgcagcggaacuucuacgagccgcagaucaucaccaccgacaacaccuucgugagcggcaacugcgacguggucaucggcaucgugaacaacacgguguacgacccccugcagcccgagcuggacuccuucaaggaggagcucgacaaguacuucaagaaccacaccagccccgacgucgaccugggggacaucuccggcaucaacgccagcguggugaacauccagaaggagaucgaccgccugaacgaggucgccaagaaccucaacgagucccugaucgaccugcaggagcucgggaaguacgagcaguacaucaaguggccgugguacaucuggcugggcuucaucgccggccugaucgcgaucgugauggugaccaucaugcucugcugcaugaccagcugcugcuccugccugaaggggugcugcagcugcggcuccugcugcaaguucgacgaggacgacagcgagcccguccugaagggggugaagcuccacuacacguga

SEQ ID NO: 22769 - RNA, 3822 nt, Artificial Sequence
  SARS-CoV-2/Wuhan/WIV05/2019__EPI_ISL_402128 spike protein CDS gc (1-1273)(K986P_V987P_N439K_D614G)
auguucguguuccugguccuccugccccuggugagcucccagugcgugaaccucaccacccgcacgcagcugccgcccgccuacaccaacagcuucacccggggcgucuacuaccccgacaagguguuccgcuccagcgugcugcacuccacccaggaccucuuccugcccuucuucagcaacgucacgugguuccacgccauccacguguccgggaccaacggcaccaagcgguucgacaacccggugcugcccuucaacgacggggucuacuucgcgagcaccgagaaguccaacaucauccgcggcuggaucuucgggacgacccucgacagcaagacccagucccugcugaucgugaacaacgccaccaacguggucaucaaggugugcgaguuccaguucugcaacgaccccuuccucggcguguacuaccacaagaacaacaagagcuggauggaguccgaguuccgggucuacagcuccgccaacaacugcacguucgaguacgugagccagcccuuccugauggaccuggagggcaagcaggggaacuucaagaaccuccgcgaguucguguucaagaacaucgacggcuacuucaagaucuacuccaagcacaccccgaucaaccugguccgggaccugccccagggguucagcgcccucgagccccugguggaccugcccaucggcaucaacaucacccgcuuccagacccuccuggcccugcaccgguccuaccucacgccgggggacagcagcuccggcuggaccgcgggcgccgccgccuacuacgugggguaccugcagccccgcaccuuccugcucaaguacaacgagaacggcaccaucacggacgcggucgacugcgcccuggacccccugagcgagaccaagugcacccucaaguccuucaccguggagaaggggaucuaccagacgagcaacuuccgggugcagcccaccgaguccaucguccgcuucccgaacaucaccaaccugugccccuucggcgagguguucaacgccacccgguucgccagcgucuacgccuggaaccgcaagcggaucuccaacugcguggcggacuacagcgugcuguacaacuccgccagcuucuccacguucaagugcuacggcgucagccccaccaagcucaacgaccugugcuucaccaacguguacgccgacuccuucgugauccgcggggacgagguccggcagaucgcccccggccagaccgggaagaucgccgacuacaacuacaagcugccggacgacuucacgggcugcgugaucgcguggaacagcaagaaccucgacuccaaggucgggggcaacuacaacuaccuguaccgccuguuccgcaagagcaaccucaagcccuucgagcgggacaucuccaccgagaucuaccaggccggcagcacccccugcaacgggguggagggcuucaacugcuacuucccccugcaguccuacggguuccagccgaccaacggcgugggguaccagcccuaccggguggucgugcugagcuucgagcuccugcacgcccccgccacggugugcggccccaagaaguccaccaaccuggucaagaacaagugcgugaacuucaacuucaacggccucaccgggaccggcgugcugaccgagagcaacaagaaguuccugccguuccagcaguucgggcgcgacaucgccgacacgaccgacgcgguccgcgacccccagacccuggagauccucgacaucacccccugcagcuucggcgggguguccgugaucacgccgggcaccaacaccagcaaccaggucgccgugcuguaccagggcgugaacugcaccgagguccccguggccauccacgccgaccagcugacgcccaccuggcggguguacuccaccggcagcaacgucuuccagacccgcgccgggugccucaucggcgcggagcacgugaacaacuccuacgagugcgacauccccaucggggccggcaucugcgccagcuaccagacgcagaccaacuccccgcggcgcgcccggagcguggcgucccagagcaucaucgccuacaccaugucccugggcgccgagaacagcgucgccuacuccaacaacagcaucgccauccccaccaacuucacgaucuccgugaccaccgagauccugcccgugagcaugaccaagacgagcgucgacugcaccauguacaucugcggggacuccaccgagugcagcaaccuccugcugcaguacggcuccuucugcacccagcucaaccgcgcgcugacggggaucgccguggagcaggacaagaacacccaggagguguucgcccaggucaagcagaucuacaagacgcccccgaucaaggacuucggcggguucaacuucagccagauccugcccgaccccuccaagcccagcaagcgguccuucaucgaggaccuccuguucaacaaggugacccuggccgacgccggcuucaucaagcaguacggcgacugccucggggacaucgcggcccgcgaccugaucugcgcccagaaguucaacggccugaccgugcucccgccccugcugaccgacgagaugaucgcccaguacaccagcgcccuccuggcggggaccaucacguccggcuggaccuucggggccggcgccgcccugcagauccccuucgcgaugcagauggccuaccgguucaacggcaucggggucacccagaacgugcucuacgagaaccagaagcugaucgccaaccaguucaacagcgccaucggcaagauccaggacucccugagcuccaccgccagcgcgcucgggaagcugcaggacguggucaaccagaacgcccaggcccugaacacgcucgugaagcagcuguccagcaacuucggcgccaucuccagcgugcugaacgacauccucucccgccuggacccgcccgaggccgaggugcagaucgaccggcugaucaccgggcgccuccagagccugcagaccuacgugacccagcagcugauccgggcggccgagauccgcgccagcgccaaccucgccgcgaccaagauguccgagugcguccugggccagagcaagcggguggacuucugcggcaagggguaccaccugauguccuucccccagagcgccccgcacggcguggucuuccuccacgugacguacguccccgcccaggagaagaacuucaccaccgcccccgcgaucugccacgacgggaaggcccacuucccccgcgagggcguguucguguccaacgggacccacugguucgucacgcagcggaacuucuacgagccgcagaucaucaccaccgacaacaccuucgugagcggcaacugcgacguggucaucggcaucgugaacaacacgguguacgacccccugcagcccgagcuggacuccuucaaggaggagcucgacaaguacuucaagaaccacaccagccccgacgucgaccugggggacaucuccggcaucaacgccagcguggugaacauccagaaggagaucgaccgccugaacgaggucgccaagaaccucaacgagucccugaucgaccugcaggagcucgggaaguacgagcaguacaucaaguggccgugguacaucuggcugggcuucaucgccggccugaucgcgaucgugauggugaccaucaugcucugcugcaugaccagcugcugcuccugccugaaggggugcugcagcugcggcuccugcugcaaguucgacgaggacgacagcgagcccguccugaagggggugaagcuccacuacacguga

SEQ ID NO: 22770 - RNA, 3822 nt, Artificial Sequence
  SARS-CoV-2/Wuhan/WIV05/2019__EPI_ISL_402128 spike protein CDS gc (1-1273)(S477N_D614G)
auguucguguuccugguccuccugccccuggugagcucccagugcgugaaccucaccacccgcacgcagcugccgcccgccuacaccaacagcuucacccggggcgucuacuaccccgacaagguguuccgcuccagcgugcugcacuccacccaggaccucuuccugcccuucuucagcaacgucacgugguuccacgccauccacguguccgggaccaacggcaccaagcgguucgacaacccggugcugcccuucaacgacggggucuacuucgcgagcaccgagaaguccaacaucauccgcggcuggaucuucgggacgacccucgacagcaagacccagucccugcugaucgugaacaacgccaccaacguggucaucaaggugugcgaguuccaguucugcaacgaccccuuccucggcguguacuaccacaagaacaacaagagcuggauggaguccgaguuccgggucuacagcuccgccaacaacugcacguucgaguacgugagccagcccuuccugauggaccuggagggcaagcaggggaacuucaagaaccuccgcgaguucguguucaagaacaucgacggcuacuucaagaucuacuccaagcacaccccgaucaaccugguccgggaccugccccagggguucagcgcccucgagccccugguggaccugcccaucggcaucaacaucacccgcuuccagacccuccuggcccugcaccgguccuaccucacgccgggggacagcagcuccggcuggaccgcgggcgccgccgccuacuacgugggguaccugcagccccgcaccuuccugcucaaguacaacgagaacggcaccaucacggacgcggucgacugcgcccuggacccccugagcgagaccaagugcacccucaaguccuucaccguggagaaggggaucuaccagacgagcaacuuccgggugcagcccaccgaguccaucguccgcuucccgaacaucaccaaccugugccccuucggcgagguguucaacgccacccgguucgccagcgucuacgccuggaaccgcaagcggaucuccaacugcguggcggacuacagcgugcuguacaacuccgccagcuucuccacguucaagugcuacggcgucagccccaccaagcucaacgaccugugcuucaccaacguguacgccgacuccuucgugauccgcggggacgagguccggcagaucgcccccggccagaccgggaagaucgccgacuacaacuacaagcugccggacgacuucacgggcugcgugaucgcguggaacagcaacaaccucgacuccaaggucgggggcaacuacaacuaccuguaccgccuguuccgcaagagcaaccucaagcccuucgagcgggacaucuccaccgagaucuaccaggccggcaacacccccugcaacgggguggagggcuucaacugcuacuucccccugcaguccuacggguuccagccgaccaacggcgugggguaccagcccuaccggguggucgugcugagcuucgagcuccugcacgcccccgccacggugugcggccccaagaaguccaccaaccuggucaagaacaagugcgugaacuucaacuucaacggccucaccgggaccggcgugcugaccgagagcaacaagaaguuccugccguuccagcaguucgggcgcgacaucgccgacacgaccgacgcgguccgcgacccccagacccuggagauccucgacaucacccccugcagcuucggcgggguguccgugaucacgccgggcaccaacaccagcaaccaggucgccgugcuguaccagggcgugaacugcaccgagguccccguggccauccacgccgaccagcugacgcccaccuggcggguguacuccaccggcagcaacgucuuccagacccgcgccgggugccucaucggcgcggagcacgugaacaacuccuacgagugcgacauccccaucggggccggcaucugcgccagcuaccagacgcagaccaacuccccgcggcgcgcccggagcguggcgucccagagcaucaucgccuacaccaugucccugggcgccgagaacagcgucgccuacuccaacaacagcaucgccauccccaccaacuucacgaucuccgugaccaccgagauccugcccgugagcaugaccaagacgagcgucgacugcaccauguacaucugcggggacuccaccgagugcagcaaccuccugcugcaguacggcuccuucugcacccagcucaaccgcgcgcugacggggaucgccguggagcaggacaagaacacccaggagguguucgcccaggucaagcagaucuacaagacgcccccgaucaaggacuucggcggguucaacuucagccagauccugcccgaccccuccaagcccagcaagcgguccuucaucgaggaccuccuguucaacaaggugacccuggccgacgccggcuucaucaagcaguacggcgacugccucggggacaucgcggcccgcgaccugaucugcgcccagaaguucaacggccugaccgugcucccgccccugcugaccgacgagaugaucgcccaguacaccagcgcccuccuggcggggaccaucacguccggcuggaccuucggggccggcgccgcccugcagauccccuucgcgaugcagauggccuaccgguucaacggcaucggggucacccagaacgugcucuacgagaaccagaagcugaucgccaaccaguucaacagcgccaucggcaagauccaggacucccugagcuccaccgccagcgcgcucgggaagcugcaggacguggucaaccagaacgcccaggcccugaacacgcucgugaagcagcuguccagcaacuucggcgccaucuccagcgugcugaacgacauccucucccgccuggacaaggucgaggccgaggugcagaucgaccggcugaucaccgggcgccuccagagccugcagaccuacgugacccagcagcugauccgggcggccgagauccgcgccagcgccaaccucgccgcgaccaagauguccgagugcguccugggccagagcaagcggguggacuucugcggcaagggguaccaccugauguccuucccccagagcgccccgcacggcguggucuuccuccacgugacguacguccccgcccaggagaagaacuucaccaccgcccccgcgaucugccacgacgggaaggcccacuucccccgcgagggcguguucguguccaacgggacccacugguucgucacgcagcggaacuucuacgagccgcagaucaucaccaccgacaacaccuucgugagcggcaacugcgacguggucaucggcaucgugaacaacacgguguacgacccccugcagcccgagcuggacuccuucaaggaggagcucgacaaguacuucaagaaccacaccagccccgacgucgaccugggggacaucuccggcaucaacgccagcguggugaacauccagaaggagaucgaccgccugaacgaggucgccaagaaccucaacgagucccugaucgaccugcaggagcucgggaaguacgagcaguacaucaaguggccgugguacaucuggcugggcuucaucgccggccugaucgcgaucgugauggugaccaucaugcucugcugcaugaccagcugcugcuccugccugaaggggugcugcagcugcggcuccugcugcaaguucgacgaggacgacagcgagcccguccugaagggggugaagcuccacuacacguga

SEQ ID NO: 22771 - RNA, 3822 nt, Artificial Sequence
  SARS-CoV-2/Wuhan/WIV05/2019__EPI_ISL_402128 spike protein CDS gc (1-1273)(K986P_V987P_S477N_D614G)
auguucguguuccugguccuccugccccuggugagcucccagugcgugaaccucaccacccgcacgcagcugccgcccgccuacaccaacagcuucacccggggcgucuacuaccccgacaagguguuccgcuccagcgugcugcacuccacccaggaccucuuccugcccuucuucagcaacgucacgugguuccacgccauccacguguccgggaccaacggcaccaagcgguucgacaacccggugcugcccuucaacgacggggucuacuucgcgagcaccgagaaguccaacaucauccgcggcuggaucuucgggacgacccucgacagcaagacccagucccugcugaucgugaacaacgccaccaacguggucaucaaggugugcgaguuccaguucugcaacgaccccuuccucggcguguacuaccacaagaacaacaagagcuggauggaguccgaguuccgggucuacagcuccgccaacaacugcacguucgaguacgugagccagcccuuccugauggaccuggagggcaagcaggggaacuucaagaaccuccgcgaguucguguucaagaacaucgacggcuacuucaagaucuacuccaagcacaccccgaucaaccugguccgggaccugccccagggguucagcgcccucgagccccugguggaccugcccaucggcaucaacaucacccgcuuccagacccuccuggcccugcaccgguccuaccucacgccgggggacagcagcuccggcuggaccgcgggcgccgccgccuacuacgugggguaccugcagccccgcaccuuccugcucaaguacaacgagaacggcaccaucacggacgcggucgacugcgcccuggacccccugagcgagaccaagugcacccucaaguccuucaccguggagaaggggaucuaccagacgagcaacuuccgggugcagcccaccgaguccaucguccgcuucccgaacaucaccaaccugugccccuucggcgagguguucaacgccacccgguucgccagcgucuacgccuggaaccgcaagcggaucuccaacugcguggcggacuacagcgugcuguacaacuccgccagcuucuccacguucaagugcuacggcgucagccccaccaagcucaacgaccugugcuucaccaacguguacgccgacuccuucgugauccgcggggacgagguccggcagaucgcccccggccagaccgggaagaucgccgacuacaacuacaagcugccggacgacuucacgggcugcgugaucgcguggaacagcaacaaccucgacuccaaggucgggggcaacuacaacuaccuguaccgccuguuccgcaagagcaaccucaagcccuucgagcgggacaucuccaccgagaucuaccaggccggcaacacccccugcaacgggguggagggcuucaacugcuacuucccccugcaguccuacggguuccagccgaccaacggcgugggguaccagcccuaccggguggucgugcugagcuucgagcuccugcacgcccccgccacggugugcggccccaagaaguccaccaaccuggucaagaacaagugcgugaacuucaacuucaacggccucaccgggaccggcgugcugaccgagagcaacaagaaguuccugccguuccagcaguucgggcgcgacaucgccgacacgaccgacgcgguccgcgacccccagacccuggagauccucgacaucacccccugcagcuucggcgggguguccgugaucacgccgggcaccaacaccagcaaccaggucgccgugcuguaccagggcgugaacugcaccgagguccccguggccauccacgccgaccagcugacgcccaccuggcggguguacuccaccggcagcaacgucuuccagacccgcgccgggugccucaucggcgcggagcacgugaacaacuccuacgagugcgacauccccaucggggccggcaucugcgccagcuaccagacgcagaccaacuccccgcggcgcgcccggagcguggcgucccagagcaucaucgccuacaccaugucccugggcgccgagaacagcgucgccuacuccaacaacagcaucgccauccccaccaacuucacgaucuccgugaccaccgagauccugcccgugagcaugaccaagacgagcgucgacugcaccauguacaucugcggggacuccaccgagugcagcaaccuccugcugcaguacggcuccuucugcacccagcucaaccgcgcgcugacggggaucgccguggagcaggacaagaacacccaggagguguucgcccaggucaagcagaucuacaagacgcccccgaucaaggacuucggcggguucaacuucagccagauccugcccgaccccuccaagcccagcaagcgguccuucaucgaggaccuccuguucaacaaggugacccuggccgacgccggcuucaucaagcaguacggcgacugccucggggacaucgcggcccgcgaccugaucugcgcccagaaguucaacggccugaccgugcucccgccccugcugaccgacgagaugaucgcccaguacaccagcgcccuccuggcggggaccaucacguccggcuggaccuucggggccggcgccgcccugcagauccccuucgcgaugcagauggccuaccgguucaacggcaucggggucacccagaacgugcucuacgagaaccagaagcugaucgccaaccaguucaacagcgccaucggcaagauccaggacucccugagcuccaccgccagcgcgcucgggaagcugcaggacguggucaaccagaacgcccaggcccugaacacgcucgugaagcagcuguccagcaacuucggcgccaucuccagcgugcugaacgacauccucucccgccuggacccgcccgaggccgaggugcagaucgaccggcugaucaccgggcgccuccagagccugcagaccuacgugacccagcagcugauccgggcggccgagauccgcgccagcgccaaccucgccgcgaccaagauguccgagugcguccugggccagagcaagcggguggacuucugcggcaagggguaccaccugauguccuucccccagagcgccccgcacggcguggucuuccuccacgugacguacguccccgcccaggagaagaacuucaccaccgcccccgcgaucugccacgacgggaaggcccacuucccccgcgagggcguguucguguccaacgggacccacugguucgucacgcagcggaacuucuacgagccgcagaucaucaccaccgacaacaccuucgugagcggcaacugcgacguggucaucggcaucgugaacaacacgguguacgacccccugcagcccgagcuggacuccuucaaggaggagcucgacaaguacuucaagaaccacaccagccccgacgucgaccugggggacaucuccggcaucaacgccagcguggugaacauccagaaggagaucgaccgccugaacgaggucgccaagaaccucaacgagucccugaucgaccugcaggagcucgggaaguacgagcaguacaucaaguggccgugguacaucuggcugggcuucaucgccggccugaucgcgaucgugauggugaccaucaugcucugcugcaugaccagcugcugcuccugccugaaggggugcugcagcugcggcuccugcugcaaguucgacgaggacgacagcgagcccguccugaagggggugaagcuccacuacacguga

SEQ ID NO: 22772 - RNA, 3822 nt, Artificial Sequence
  SARS-CoV-2/Wuhan/WIV05/2019__EPI_ISL_402128 spike protein CDS gc (1-1273)(N501Y_D614G)
auguucguguuccugguccuccugccccuggugagcucccagugcgugaaccucaccacccgcacgcagcugccgcccgccuacaccaacagcuucacccggggcgucuacuaccccgacaagguguuccgcuccagcgugcugcacuccacccaggaccucuuccugcccuucuucagcaacgucacgugguuccacgccauccacguguccgggaccaacggcaccaagcgguucgacaacccggugcugcccuucaacgacggggucuacuucgcgagcaccgagaaguccaacaucauccgcggcuggaucuucgggacgacccucgacagcaagacccagucccugcugaucgugaacaacgccaccaacguggucaucaaggugugcgaguuccaguucugcaacgaccccuuccucggcguguacuaccacaagaacaacaagagcuggauggaguccgaguuccgggucuacagcuccgccaacaacugcacguucgaguacgugagccagcccuuccugauggaccuggagggcaagcaggggaacuucaagaaccuccgcgaguucguguucaagaacaucgacggcuacuucaagaucuacuccaagcacaccccgaucaaccugguccgggaccugccccagggguucagcgcccucgagccccugguggaccugcccaucggcaucaacaucacccgcuuccagacccuccuggcccugcaccgguccuaccucacgccgggggacagcagcuccggcuggaccgcgggcgccgccgccuacuacgugggguaccugcagccccgcaccuuccugcucaaguacaacgagaacggcaccaucacggacgcggucgacugcgcccuggacccccugagcgagaccaagugcacccucaaguccuucaccguggagaaggggaucuaccagacgagcaacuuccgggugcagcccaccgaguccaucguccgcuucccgaacaucaccaaccugugccccuucggcgagguguucaacgccacccgguucgccagcgucuacgccuggaaccgcaagcggaucuccaacugcguggcggacuacagcgugcuguacaacuccgccagcuucuccacguucaagugcuacggcgucagccccaccaagcucaacgaccugugcuucaccaacguguacgccgacuccuucgugauccgcggggacgagguccggcagaucgcccccggccagaccgggaagaucgccgacuacaacuacaagcugccggacgacuucacgggcugcgugaucgcguggaacagcaacaaccucgacuccaaggucgggggcaacuacaacuaccuguaccgccuguuccgcaagagcaaccucaagcccuucgagcgggacaucuccaccgagaucuaccaggccggcagcacccccugcaacgggguggagggcuucaacugcuacuucccccugcaguccuacggguuccagccgaccuacggcgugggguaccagcccuaccggguggucgugcugagcuucgagcuccugcacgcccccgccacggugugcggccccaagaaguccaccaaccuggucaagaacaagugcgugaacuucaacuucaacggccucaccgggaccggcgugcugaccgagagcaacaagaaguuccugccguuccagcaguucgggcgcgacaucgccgacacgaccgacgcgguccgcgacccccagacccuggagauccucgacaucacccccugcagcuucggcgggguguccgugaucacgccgggcaccaacaccagcaaccaggucgccgugcuguaccagggcgugaacugcaccgagguccccguggccauccacgccgaccagcugacgcccaccuggcggguguacuccaccggcagcaacgucuuccagacccgcgccgggugccucaucggcgcggagcacgugaacaacuccuacgagugcgacauccccaucggggccggcaucugcgccagcuaccagacgcagaccaacuccccgcggcgcgcccggagcguggcgucccagagcaucaucgccuacaccaugucccugggcgccgagaacagcgucgccuacuccaacaacagcaucgccauccccaccaacuucacgaucuccgugaccaccgagauccugcccgugagcaugaccaagacgagcgucgacugcaccauguacaucugcggggacuccaccgagugcagcaaccuccugcugcaguacggcuccuucugcacccagcucaaccgcgcgcugacggggaucgccguggagcaggacaagaacacccaggagguguucgcccaggucaagcagaucuacaagacgcccccgaucaaggacuucggcggguucaacuucagccagauccugcccgaccccuccaagcccagcaagcgguccuucaucgaggaccuccuguucaacaaggugacccuggccgacgccggcuucaucaagcaguacggcgacugccucggggacaucgcggcccgcgaccugaucugcgcccagaaguucaacggccugaccgugcucccgccccugcugaccgacgagaugaucgcccaguacaccagcgcccuccuggcggggaccaucacguccggcuggaccuucggggccggcgccgcccugcagauccccuucgcgaugcagauggccuaccgguucaacggcaucggggucacccagaacgugcucuacgagaaccagaagcugaucgccaaccaguucaacagcgccaucggcaagauccaggacucccugagcuccaccgccagcgcgcucgggaagcugcaggacguggucaaccagaacgcccaggcccugaacacgcucgugaagcagcuguccagcaacuucggcgccaucuccagcgugcugaacgacauccucucccgccuggacaaggucgaggccgaggugcagaucgaccggcugaucaccgggcgccuccagagccugcagaccuacgugacccagcagcugauccgggcggccgagauccgcgccagcgccaaccucgccgcgaccaagauguccgagugcguccugggccagagcaagcggguggacuucugcggcaagggguaccaccugauguccuucccccagagcgccccgcacggcguggucuuccuccacgugacguacguccccgcccaggagaagaacuucaccaccgcccccgcgaucugccacgacgggaaggcccacuucccccgcgagggcguguucguguccaacgggacccacugguucgucacgcagcggaacuucuacgagccgcagaucaucaccaccgacaacaccuucgugagcggcaacugcgacguggucaucggcaucgugaacaacacgguguacgacccccugcagcccgagcuggacuccuucaaggaggagcucgacaaguacuucaagaaccacaccagccccgacgucgaccugggggacaucuccggcaucaacgccagcguggugaacauccagaaggagaucgaccgccugaacgaggucgccaagaaccucaacgagucccugaucgaccugcaggagcucgggaaguacgagcaguacaucaaguggccgugguacaucuggcugggcuucaucgccggccugaucgcgaucgugauggugaccaucaugcucugcugcaugaccagcugcugcuccugccugaaggggugcugcagcugcggcuccugcugcaaguucgacgaggacgacagcgagcccguccugaagggggugaagcuccacuacacguga

SEQ ID NO: 22773 - RNA, 3822 nt, Artificial Sequence
  SARS-CoV-2/Wuhan/WIV05/2019__EPI_ISL_402128 spike protein CDS gc (1-1273)(K986P_V987P_N501Y_D614G)
auguucguguuccugguccuccugccccuggugagcucccagugcgugaaccucaccacccgcacgcagcugccgcccgccuacaccaacagcuucacccggggcgucuacuaccccgacaagguguuccgcuccagcgugcugcacuccacccaggaccucuuccugcccuucuucagcaacgucacgugguuccacgccauccacguguccgggaccaacggcaccaagcgguucgacaacccggugcugcccuucaacgacggggucuacuucgcgagcaccgagaaguccaacaucauccgcggcuggaucuucgggacgacccucgacagcaagacccagucccugcugaucgugaacaacgccaccaacguggucaucaaggugugcgaguuccaguucugcaacgaccccuuccucggcguguacuaccacaagaacaacaagagcuggauggaguccgaguuccgggucuacagcuccgccaacaacugcacguucgaguacgugagccagcccuuccugauggaccuggagggcaagcaggggaacuucaagaaccuccgcgaguucguguucaagaacaucgacggcuacuucaagaucuacuccaagcacaccccgaucaaccugguccgggaccugccccagggguucagcgcccucgagccccugguggaccugcccaucggcaucaacaucacccgcuuccagacccuccuggcccugcaccgguccuaccucacgccgggggacagcagcuccggcuggaccgcgggcgccgccgccuacuacgugggguaccugcagccccgcaccuuccugcucaaguacaacgagaacggcaccaucacggacgcggucgacugcgcccuggacccccugagcgagaccaagugcacccucaaguccuucaccguggagaaggggaucuaccagacgagcaacuuccgggugcagcccaccgaguccaucguccgcuucccgaacaucaccaaccugugccccuucggcgagguguucaacgccacccgguucgccagcgucuacgccuggaaccgcaagcggaucuccaacugcguggcggacuacagcgugcuguacaacuccgccagcuucuccacguucaagugcuacggcgucagccccaccaagcucaacgaccugugcuucaccaacguguacgccgacuccuucgugauccgcggggacgagguccggcagaucgcccccggccagaccgggaagaucgccgacuacaacuacaagcugccggacgacuucacgggcugcgugaucgcguggaacagcaacaaccucgacuccaaggucgggggcaacuacaacuaccuguaccgccuguuccgcaagagcaaccucaagcccuucgagcgggacaucuccaccgagaucuaccaggccggcagcacccccugcaacgggguggagggcuucaacugcuacuucccccugcaguccuacggguuccagccgaccuacggcgugggguaccagcccuaccggguggucgugcugagcuucgagcuccugcacgcccccgccacggugugcggccccaagaaguccaccaaccuggucaagaacaagugcgugaacuucaacuucaacggccucaccgggaccggcgugcugaccgagagcaacaagaaguuccugccguuccagcaguucgggcgcgacaucgccgacacgaccgacgcgguccgcgacccccagacccuggagauccucgacaucacccccugcagcuucggcgggguguccgugaucacgccgggcaccaacaccagcaaccaggucgccgugcuguaccagggcgugaacugcaccgagguccccguggccauccacgccgaccagcugacgcccaccuggcggguguacuccaccggcagcaacgucuuccagacccgcgccgggugccucaucggcgcggagcacgugaacaacuccuacgagugcgacauccccaucggggccggcaucugcgccagcuaccagacgcagaccaacuccccgcggcgcgcccggagcguggcgucccagagcaucaucgccuacaccaugucccugggcgccgagaacagcgucgccuacuccaacaacagcaucgccauccccaccaacuucacgaucuccgugaccaccgagauccugcccgugagcaugaccaagacgagcgucgacugcaccauguacaucugcggggacuccaccgagugcagcaaccuccugcugcaguacggcuccuucugcacccagcucaaccgcgcgcugacggggaucgccguggagcaggacaagaacacccaggagguguucgcccaggucaagcagaucuacaagacgcccccgaucaaggacuucggcggguucaacuucagccagauccugcccgaccccuccaagcccagcaagcgguccuucaucgaggaccuccuguucaacaaggugacccuggccgacgccggcuucaucaagcaguacggcgacugccucggggacaucgcggcccgcgaccugaucugcgcccagaaguucaacggccugaccgugcucccgccccugcugaccgacgagaugaucgcccaguacaccagcgcccuccuggcggggaccaucacguccggcuggaccuucggggccggcgccgcccugcagauccccuucgcgaugcagauggccuaccgguucaacggcaucggggucacccagaacgugcucuacgagaaccagaagcugaucgccaaccaguucaacagcgccaucggcaagauccaggacucccugagcuccaccgccagcgcgcucgggaagcugcaggacguggucaaccagaacgcccaggcccugaacacgcucgugaagcagcuguccagcaacuucggcgccaucuccagcgugcugaacgacauccucucccgccuggacccgcccgaggccgaggugcagaucgaccggcugaucaccgggcgccuccagagccugcagaccuacgugacccagcagcugauccgggcggccgagauccgcgccagcgccaaccucgccgcgaccaagauguccgagugcguccugggccagagcaagcggguggacuucugcggcaagggguaccaccugauguccuucccccagagcgccccgcacggcguggucuuccuccacgugacguacguccccgcccaggagaagaacuucaccaccgcccccgcgaucugccacgacgggaaggcccacuucccccgcgagggcguguucguguccaacgggacccacugguucgucacgcagcggaacuucuacgagccgcagaucaucaccaccgacaacaccuucgugagcggcaacugcgacguggucaucggcaucgugaacaacacgguguacgacccccugcagcccgagcuggacuccuucaaggaggagcucgacaaguacuucaagaaccacaccagccccgacgucgaccugggggacaucuccggcaucaacgccagcguggugaacauccagaaggagaucgaccgccugaacgaggucgccaagaaccucaacgagucccugaucgaccugcaggagcucgggaaguacgagcaguacaucaaguggccgugguacaucuggcugggcuucaucgccggccugaucgcgaucgugauggugaccaucaugcucugcugcaugaccagcugcugcuccugccugaaggggugcugcagcugcggcuccugcugcaaguucgacgaggacgacagcgagcccguccugaagggggugaagcuccacuacacguga

SEQ ID NO: 22774 - RNA, 3816 nt, Artificial Sequence
  SARS-CoV-2/Wuhan/WIV05/2019__EPI_ISL_402128 spike protein CDS gc (1-1273)(H69del_V70del_D614G)
auguucguguuccugguccuccugccccuggugagcucccagugcgugaaccucaccacccgcacgcagcugccgcccgccuacaccaacagcuucacccggggcgucuacuaccccgacaagguguuccgcuccagcgugcugcacuccacccaggaccucuuccugcccuucuucagcaacgucacgugguuccacgccaucuccgggaccaacggcaccaagcgguucgacaacccggugcugcccuucaacgacggggucuacuucgcgagcaccgagaaguccaacaucauccgcggcuggaucuucgggacgacccucgacagcaagacccagucccugcugaucgugaacaacgccaccaacguggucaucaaggugugcgaguuccaguucugcaacgaccccuuccucggcguguacuaccacaagaacaacaagagcuggauggaguccgaguuccgggucuacagcuccgccaacaacugcacguucgaguacgugagccagcccuuccugauggaccuggagggcaagcaggggaacuucaagaaccuccgcgaguucguguucaagaacaucgacggcuacuucaagaucuacuccaagcacaccccgaucaaccugguccgggaccugccccagggguucagcgcccucgagccccugguggaccugcccaucggcaucaacaucacccgcuuccagacccuccuggcccugcaccgguccuaccucacgccgggggacagcagcuccggcuggaccgcgggcgccgccgccuacuacgugggguaccugcagccccgcaccuuccugcucaaguacaacgagaacggcaccaucacggacgcggucgacugcgcccuggacccccugagcgagaccaagugcacccucaaguccuucaccguggagaaggggaucuaccagacgagcaacuuccgggugcagcccaccgaguccaucguccgcuucccgaacaucaccaaccugugccccuucggcgagguguucaacgccacccgguucgccagcgucuacgccuggaaccgcaagcggaucuccaacugcguggcggacuacagcgugcuguacaacuccgccagcuucuccacguucaagugcuacggcgucagccccaccaagcucaacgaccugugcuucaccaacguguacgccgacuccuucgugauccgcggggacgagguccggcagaucgcccccggccagaccgggaagaucgccgacuacaacuacaagcugccggacgacuucacgggcugcgugaucgcguggaacagcaacaaccucgacuccaaggucgggggcaacuacaacuaccuguaccgccuguuccgcaagagcaaccucaagcccuucgagcgggacaucuccaccgagaucuaccaggccggcagcacccccugcaacgggguggagggcuucaacugcuacuucccccugcaguccuacggguuccagccgaccaacggcgugggguaccagcccuaccggguggucgugcugagcuucgagcuccugcacgcccccgccacggugugcggccccaagaaguccaccaaccuggucaagaacaagugcgugaacuucaacuucaacggccucaccgggaccggcgugcugaccgagagcaacaagaaguuccugccguuccagcaguucgggcgcgacaucgccgacacgaccgacgcgguccgcgacccccagacccuggagauccucgacaucacccccugcagcuucggcgggguguccgugaucacgccgggcaccaacaccagcaaccaggucgccgugcuguaccagggcgugaacugcaccgagguccccguggccauccacgccgaccagcugacgcccaccuggcggguguacuccaccggcagcaacgucuuccagacccgcgccgggugccucaucggcgcggagcacgugaacaacuccuacgagugcgacauccccaucggggccggcaucugcgccagcuaccagacgcagaccaacuccccgcggcgcgcccggagcguggcgucccagagcaucaucgccuacaccaugucccugggcgccgagaacagcgucgccuacuccaacaacagcaucgccauccccaccaacuucacgaucuccgugaccaccgagauccugcccgugagcaugaccaagacgagcgucgacugcaccauguacaucugcggggacuccaccgagugcagcaaccuccugcugcaguacggcuccuucugcacccagcucaaccgcgcgcugacggggaucgccguggagcaggacaagaacacccaggagguguucgcccaggucaagcagaucuacaagacgcccccgaucaaggacuucggcggguucaacuucagccagauccugcccgaccccuccaagcccagcaagcgguccuucaucgaggaccuccuguucaacaaggugacccuggccgacgccggcuucaucaagcaguacggcgacugccucggggacaucgcggcccgcgaccugaucugcgcccagaaguucaacggccugaccgugcucccgccccugcugaccgacgagaugaucgcccaguacaccagcgcccuccuggcggggaccaucacguccggcuggaccuucggggccggcgccgcccugcagauccccuucgcgaugcagauggccuaccgguucaacggcaucggggucacccagaacgugcucuacgagaaccagaagcugaucgccaaccaguucaacagcgccaucggcaagauccaggacucccugagcuccaccgccagcgcgcucgggaagcugcaggacguggucaaccagaacgcccaggcccugaacacgcucgugaagcagcuguccagcaacuucggcgccaucuccagcgugcugaacgacauccucucccgccuggacaaggucgaggccgaggugcagaucgaccggcugaucaccgggcgccuccagagccugcagaccuacgugacccagcagcugauccgggcggccgagauccgcgccagcgccaaccucgccgcgaccaagauguccgagugcguccugggccagagcaagcggguggacuucugcggcaagggguaccaccugauguccuucccccagagcgccccgcacggcguggucuuccuccacgugacguacguccccgcccaggagaagaacuucaccaccgcccccgcgaucugccacgacgggaaggcccacuucccccgcgagggcguguucguguccaacgggacccacugguucgucacgcagcggaacuucuacgagccgcagaucaucaccaccgacaacaccuucgugagcggcaacugcgacguggucaucggcaucgugaacaacacgguguacgacccccugcagcccgagcuggacuccuucaaggaggagcucgacaaguacuucaagaaccacaccagccccgacgucgaccugggggacaucuccggcaucaacgccagcguggugaacauccagaaggagaucgaccgccugaacgaggucgccaagaaccucaacgagucccugaucgaccugcaggagcucgggaaguacgagcaguacaucaaguggccgugguacaucuggcugggcuucaucgccggccugaucgcgaucgugauggugaccaucaugcucugcugcaugaccagcugcugcuccugccugaaggggugcugcagcugcggcuccugcugcaaguucgacgaggacgacagcgagcccguccugaagggggugaagcuccacuacacguga

SEQ ID NO: 22775 - RNA, 3816 nt, Artificial Sequence
  SARS-CoV-2/Wuhan/WIV05/2019__EPI_ISL_402128 spike protein CDS gc (1-1273)(K986P_V987P_H69del_V70del_D614G)
auguucguguuccugguccuccugccccuggugagcucccagugcgugaaccucaccacccgcacgcagcugccgcccgccuacaccaacagcuucacccggggcgucuacuaccccgacaagguguuccgcuccagcgugcugcacuccacccaggaccucuuccugcccuucuucagcaacgucacgugguuccacgccaucuccgggaccaacggcaccaagcgguucgacaacccggugcugcccuucaacgacggggucuacuucgcgagcaccgagaaguccaacaucauccgcggcuggaucuucgggacgacccucgacagcaagacccagucccugcugaucgugaacaacgccaccaacguggucaucaaggugugcgaguuccaguucugcaacgaccccuuccucggcguguacuaccacaagaacaacaagagcuggauggaguccgaguuccgggucuacagcuccgccaacaacugcacguucgaguacgugagccagcccuuccugauggaccuggagggcaagcaggggaacuucaagaaccuccgcgaguucguguucaagaacaucgacggcuacuucaagaucuacuccaagcacaccccgaucaaccugguccgggaccugccccagggguucagcgcccucgagccccugguggaccugcccaucggcaucaacaucacccgcuuccagacccuccuggcccugcaccgguccuaccucacgccgggggacagcagcuccggcuggaccgcgggcgccgccgccuacuacgugggguaccugcagccccgcaccuuccugcucaaguacaacgagaacggcaccaucacggacgcggucgacugcgcccuggacccccugagcgagaccaagugcacccucaaguccuucaccguggagaaggggaucuaccagacgagcaacuuccgggugcagcccaccgaguccaucguccgcuucccgaacaucaccaaccugugccccuucggcgagguguucaacgccacccgguucgccagcgucuacgccuggaaccgcaagcggaucuccaacugcguggcggacuacagcgugcuguacaacuccgccagcuucuccacguucaagugcuacggcgucagccccaccaagcucaacgaccugugcuucaccaacguguacgccgacuccuucgugauccgcggggacgagguccggcagaucgcccccggccagaccgggaagaucgccgacuacaacuacaagcugccggacgacuucacgggcugcgugaucgcguggaacagcaacaaccucgacuccaaggucgggggcaacuacaacuaccuguaccgccuguuccgcaagagcaaccucaagcccuucgagcgggacaucuccaccgagaucuaccaggccggcagcacccccugcaacgggguggagggcuucaacugcuacuucccccugcaguccuacggguuccagccgaccaacggcgugggguaccagcccuaccggguggucgugcugagcuucgagcuccugcacgcccccgccacggugugcggccccaagaaguccaccaaccuggucaagaacaagugcgugaacuucaacuucaacggccucaccgggaccggcgugcugaccgagagcaacaagaaguuccugccguuccagcaguucgggcgcgacaucgccgacacgaccgacgcgguccgcgacccccagacccuggagauccucgacaucacccccugcagcuucggcgggguguccgugaucacgccgggcaccaacaccagcaaccaggucgccgugcuguaccagggcgugaacugcaccgagguccccguggccauccacgccgaccagcugacgcccaccuggcggguguacuccaccggcagcaacgucuuccagacccgcgccgggugccucaucggcgcggagcacgugaacaacuccuacgagugcgacauccccaucggggccggcaucugcgccagcuaccagacgcagaccaacuccccgcggcgcgcccggagcguggcgucccagagcaucaucgccuacaccaugucccugggcgccgagaacagcgucgccuacuccaacaacagcaucgccauccccaccaacuucacgaucuccgugaccaccgagauccugcccgugagcaugaccaagacgagcgucgacugcaccauguacaucugcggggacuccaccgagugcagcaaccuccugcugcaguacggcuccuucugcacccagcucaaccgcgcgcugacggggaucgccguggagcaggacaagaacacccaggagguguucgcccaggucaagcagaucuacaagacgcccccgaucaaggacuucggcggguucaacuucagccagauccugcccgaccccuccaagcccagcaagcgguccuucaucgaggaccuccuguucaacaaggugacccuggccgacgccggcuucaucaagcaguacggcgacugccucggggacaucgcggcccgcgaccugaucugcgcccagaaguucaacggccugaccgugcucccgccccugcugaccgacgagaugaucgcccaguacaccagcgcccuccuggcggggaccaucacguccggcuggaccuucggggccggcgccgcccugcagauccccuucgcgaugcagauggccuaccgguucaacggcaucggggucacccagaacgugcucuacgagaaccagaagcugaucgccaaccaguucaacagcgccaucggcaagauccaggacucccugagcuccaccgccagcgcgcucgggaagcugcaggacguggucaaccagaacgcccaggcccugaacacgcucgugaagcagcuguccagcaacuucggcgccaucuccagcgugcugaacgacauccucucccgccuggacccgcccgaggccgaggugcagaucgaccggcugaucaccgggcgccuccagagccugcagaccuacgugacccagcagcugauccgggcggccgagauccgcgccagcgccaaccucgccgcgaccaagauguccgagugcguccugggccagagcaagcggguggacuucugcggcaagggguaccaccugauguccuucccccagagcgccccgcacggcguggucuuccuccacgugacguacguccccgcccaggagaagaacuucaccaccgcccccgcgaucugccacgacgggaaggcccacuucccccgcgagggcguguucguguccaacgggacccacugguucgucacgcagcggaacuucuacgagccgcagaucaucaccaccgacaacaccuucgugagcggcaacugcgacguggucaucggcaucgugaacaacacgguguacgacccccugcagcccgagcuggacuccuucaaggaggagcucgacaaguacuucaagaaccacaccagccccgacgucgaccugggggacaucuccggcaucaacgccagcguggugaacauccagaaggagaucgaccgccugaacgaggucgccaagaaccucaacgagucccugaucgaccugcaggagcucgggaaguacgagcaguacaucaaguggccgugguacaucuggcugggcuucaucgccggccugaucgcgaucgugauggugaccaucaugcucugcugcaugaccagcugcugcuccugccugaaggggugcugcagcugcggcuccugcugcaaguucgacgaggacgacagcgagcccguccugaagggggugaagcuccacuacacguga

SEQ ID NO: 22776 - RNA, 3822 nt, Artificial Sequence
  SARS-CoV-2/Wuhan/WIV05/2019__EPI_ISL_402128 spike protein CDS gc (1-1273)(Y453F_D614G)
auguucguguuccugguccuccugccccuggugagcucccagugcgugaaccucaccacccgcacgcagcugccgcccgccuacaccaacagcuucacccggggcgucuacuaccccgacaagguguuccgcuccagcgugcugcacuccacccaggaccucuuccugcccuucuucagcaacgucacgugguuccacgccauccacguguccgggaccaacggcaccaagcgguucgacaacccggugcugcccuucaacgacggggucuacuucgcgagcaccgagaaguccaacaucauccgcggcuggaucuucgggacgacccucgacagcaagacccagucccugcugaucgugaacaacgccaccaacguggucaucaaggugugcgaguuccaguucugcaacgaccccuuccucggcguguacuaccacaagaacaacaagagcuggauggaguccgaguuccgggucuacagcuccgccaacaacugcacguucgaguacgugagccagcccuuccugauggaccuggagggcaagcaggggaacuucaagaaccuccgcgaguucguguucaagaacaucgacggcuacuucaagaucuacuccaagcacaccccgaucaaccugguccgggaccugccccagggguucagcgcccucgagccccugguggaccugcccaucggcaucaacaucacccgcuuccagacccuccuggcccugcaccgguccuaccucacgccgggggacagcagcuccggcuggaccgcgggcgccgccgccuacuacgugggguaccugcagccccgcaccuuccugcucaaguacaacgagaacggcaccaucacggacgcggucgacugcgcccuggacccccugagcgagaccaagugcacccucaaguccuucaccguggagaaggggaucuaccagacgagcaacuuccgggugcagcccaccgaguccaucguccgcuucccgaacaucaccaaccugugccccuucggcgagguguucaacgccacccgguucgccagcgucuacgccuggaaccgcaagcggaucuccaacugcguggcggacuacagcgugcuguacaacuccgccagcuucuccacguucaagugcuacggcgucagccccaccaagcucaacgaccugugcuucaccaacguguacgccgacuccuucgugauccgcggggacgagguccggcagaucgcccccggccagaccgggaagaucgccgacuacaacuacaagcugccggacgacuucacgggcugcgugaucgcguggaacagcaacaaccucgacuccaaggucgggggcaacuacaacuaccuguuccgccuguuccgcaagagcaaccucaagcccuucgagcgggacaucuccaccgagaucuaccaggccggcagcacccccugcaacgggguggagggcuucaacugcuacuucccccugcaguccuacggguuccagccgaccaacggcgugggguaccagcccuaccggguggucgugcugagcuucgagcuccugcacgcccccgccacggugugcggccccaagaaguccaccaaccuggucaagaacaagugcgugaacuucaacuucaacggccucaccgggaccggcgugcugaccgagagcaacaagaaguuccugccguuccagcaguucgggcgcgacaucgccgacacgaccgacgcgguccgcgacccccagacccuggagauccucgacaucacccccugcagcuucggcgggguguccgugaucacgccgggcaccaacaccagcaaccaggucgccgugcuguaccagggcgugaacugcaccgagguccccguggccauccacgccgaccagcugacgcccaccuggcggguguacuccaccggcagcaacgucuuccagacccgcgccgggugccucaucggcgcggagcacgugaacaacuccuacgagugcgacauccccaucggggccggcaucugcgccagcuaccagacgcagaccaacuccccgcggcgcgcccggagcguggcgucccagagcaucaucgccuacaccaugucccugggcgccgagaacagcgucgccuacuccaacaacagcaucgccauccccaccaacuucacgaucuccgugaccaccgagauccugcccgugagcaugaccaagacgagcgucgacugcaccauguacaucugcggggacuccaccgagugcagcaaccuccugcugcaguacggcuccuucugcacccagcucaaccgcgcgcugacggggaucgccguggagcaggacaagaacacccaggagguguucgcccaggucaagcagaucuacaagacgcccccgaucaaggacuucggcggguucaacuucagccagauccugcccgaccccuccaagcccagcaagcgguccuucaucgaggaccuccuguucaacaaggugacccuggccgacgccggcuucaucaagcaguacggcgacugccucggggacaucgcggcccgcgaccugaucugcgcccagaaguucaacggccugaccgugcucccgccccugcugaccgacgagaugaucgcccaguacaccagcgcccuccuggcggggaccaucacguccggcuggaccuucggggccggcgccgcccugcagauccccuucgcgaugcagauggccuaccgguucaacggcaucggggucacccagaacgugcucuacgagaaccagaagcugaucgccaaccaguucaacagcgccaucggcaagauccaggacucccugagcuccaccgccagcgcgcucgggaagcugcaggacguggucaaccagaacgcccaggcccugaacacgcucgugaagcagcuguccagcaacuucggcgccaucuccagcgugcugaacgacauccucucccgccuggacaaggucgaggccgaggugcagaucgaccggcugaucaccgggcgccuccagagccugcagaccuacgugacccagcagcugauccgggcggccgagauccgcgccagcgccaaccucgccgcgaccaagauguccgagugcguccugggccagagcaagcggguggacuucugcggcaagggguaccaccugauguccuucccccagagcgccccgcacggcguggucuuccuccacgugacguacguccccgcccaggagaagaacuucaccaccgcccccgcgaucugccacgacgggaaggcccacuucccccgcgagggcguguucguguccaacgggacccacugguucgucacgcagcggaacuucuacgagccgcagaucaucaccaccgacaacaccuucgugagcggcaacugcgacguggucaucggcaucgugaacaacacgguguacgacccccugcagcccgagcuggacuccuucaaggaggagcucgacaaguacuucaagaaccacaccagccccgacgucgaccugggggacaucuccggcaucaacgccagcguggugaacauccagaaggagaucgaccgccugaacgaggucgccaagaaccucaacgagucccugaucgaccugcaggagcucgggaaguacgagcaguacaucaaguggccgugguacaucuggcugggcuucaucgccggccugaucgcgaucgugauggugaccaucaugcucugcugcaugaccagcugcugcuccugccugaaggggugcugcagcugcggcuccugcugcaaguucgacgaggacgacagcgagcccguccugaagggggugaagcuccacuacacguga

SEQ ID NO: 22777 - RNA, 3822 nt, Artificial Sequence
  SARS-CoV-2/Wuhan/WIV05/2019__EPI_ISL_402128 spike protein CDS gc (1-1273)(K986P_V987P_Y453F_D614G)
auguucguguuccugguccuccugccccuggugagcucccagugcgugaaccucaccacccgcacgcagcugccgcccgccuacaccaacagcuucacccggggcgucuacuaccccgacaagguguuccgcuccagcgugcugcacuccacccaggaccucuuccugcccuucuucagcaacgucacgugguuccacgccauccacguguccgggaccaacggcaccaagcgguucgacaacccggugcugcccuucaacgacggggucuacuucgcgagcaccgagaaguccaacaucauccgcggcuggaucuucgggacgacccucgacagcaagacccagucccugcugaucgugaacaacgccaccaacguggucaucaaggugugcgaguuccaguucugcaacgaccccuuccucggcguguacuaccacaagaacaacaagagcuggauggaguccgaguuccgggucuacagcuccgccaacaacugcacguucgaguacgugagccagcccuuccugauggaccuggagggcaagcaggggaacuucaagaaccuccgcgaguucguguucaagaacaucgacggcuacuucaagaucuacuccaagcacaccccgaucaaccugguccgggaccugccccagggguucagcgcccucgagccccugguggaccugcccaucggcaucaacaucacccgcuuccagacccuccuggcccugcaccgguccuaccucacgccgggggacagcagcuccggcuggaccgcgggcgccgccgccuacuacgugggguaccugcagccccgcaccuuccugcucaaguacaacgagaacggcaccaucacggacgcggucgacugcgcccuggacccccugagcgagaccaagugcacccucaaguccuucaccguggagaaggggaucuaccagacgagcaacuuccgggugcagcccaccgaguccaucguccgcuucccgaacaucaccaaccugugccccuucggcgagguguucaacgccacccgguucgccagcgucuacgccuggaaccgcaagcggaucuccaacugcguggcggacuacagcgugcuguacaacuccgccagcuucuccacguucaagugcuacggcgucagccccaccaagcucaacgaccugugcuucaccaacguguacgccgacuccuucgugauccgcggggacgagguccggcagaucgcccccggccagaccgggaagaucgccgacuacaacuacaagcugccggacgacuucacgggcugcgugaucgcguggaacagcaacaaccucgacuccaaggucgggggcaacuacaacuaccuguuccgccuguuccgcaagagcaaccucaagcccuucgagcgggacaucuccaccgagaucuaccaggccggcagcacccccugcaacgggguggagggcuucaacugcuacuucccccugcaguccuacggguuccagccgaccaacggcgugggguaccagcccuaccggguggucgugcugagcuucgagcuccugcacgcccccgccacggugugcggccccaagaaguccaccaaccuggucaagaacaagugcgugaacuucaacuucaacggccucaccgggaccggcgugcugaccgagagcaacaagaaguuccugccguuccagcaguucgggcgcgacaucgccgacacgaccgacgcgguccgcgacccccagacccuggagauccucgacaucacccccugcagcuucggcgggguguccgugaucacgccgggcaccaacaccagcaaccaggucgccgugcuguaccagggcgugaacugcaccgagguccccguggccauccacgccgaccagcugacgcccaccuggcggguguacuccaccggcagcaacgucuuccagacccgcgccgggugccucaucggcgcggagcacgugaacaacuccuacgagugcgacauccccaucggggccggcaucugcgccagcuaccagacgcagaccaacuccccgcggcgcgcccggagcguggcgucccagagcaucaucgccuacaccaugucccugggcgccgagaacagcgucgccuacuccaacaacagcaucgccauccccaccaacuucacgaucuccgugaccaccgagauccugcccgugagcaugaccaagacgagcgucgacugcaccauguacaucugcggggacuccaccgagugcagcaaccuccugcugcaguacggcuccuucugcacccagcucaaccgcgcgcugacggggaucgccguggagcaggacaagaacacccaggagguguucgcccaggucaagcagaucuacaagacgcccccgaucaaggacuucggcggguucaacuucagccagauccugcccgaccccuccaagcccagcaagcgguccuucaucgaggaccuccuguucaacaaggugacccuggccgacgccggcuucaucaagcaguacggcgacugccucggggacaucgcggcccgcgaccugaucugcgcccagaaguucaacggccugaccgugcucccgccccugcugaccgacgagaugaucgcccaguacaccagcgcccuccuggcggggaccaucacguccggcuggaccuucggggccggcgccgcccugcagauccccuucgcgaugcagauggccuaccgguucaacggcaucggggucacccagaacgugcucuacgagaaccagaagcugaucgccaaccaguucaacagcgccaucggcaagauccaggacucccugagcuccaccgccagcgcgcucgggaagcugcaggacguggucaaccagaacgcccaggcccugaacacgcucgugaagcagcuguccagcaacuucggcgccaucuccagcgugcugaacgacauccucucccgccuggacccgcccgaggccgaggugcagaucgaccggcugaucaccgggcgccuccagagccugcagaccuacgugacccagcagcugauccgggcggccgagauccgcgccagcgccaaccucgccgcgaccaagauguccgagugcguccugggccagagcaagcggguggacuucugcggcaagggguaccaccugauguccuucccccagagcgccccgcacggcguggucuuccuccacgugacguacguccccgcccaggagaagaacuucaccaccgcccccgcgaucugccacgacgggaaggcccacuucccccgcgagggcguguucguguccaacgggacccacugguucgucacgcagcggaacuucuacgagccgcagaucaucaccaccgacaacaccuucgugagcggcaacugcgacguggucaucggcaucgugaacaacacgguguacgacccccugcagcccgagcuggacuccuucaaggaggagcucgacaaguacuucaagaaccacaccagccccgacgucgaccugggggacaucuccggcaucaacgccagcguggugaacauccagaaggagaucgaccgccugaacgaggucgccaagaaccucaacgagucccugaucgaccugcaggagcucgggaaguacgagcaguacaucaaguggccgugguacaucuggcugggcuucaucgccggccugaucgcgaucgugauggugaccaucaugcucugcugcaugaccagcugcugcuccugccugaaggggugcugcagcugcggcuccugcugcaaguucgacgaggacgacagcgagcccguccugaagggggugaagcuccacuacacguga

SEQ ID NO: 22778 - RNA, 3822 nt, Artificial Sequence
  SARS-CoV-2/Wuhan/WIV05/2019__EPI_ISL_402128 spike protein CDS gc (1-1273)(D614G_I692V)
auguucguguuccugguccuccugccccuggugagcucccagugcgugaaccucaccacccgcacgcagcugccgcccgccuacaccaacagcuucacccggggcgucuacuaccccgacaagguguuccgcuccagcgugcugcacuccacccaggaccucuuccugcccuucuucagcaacgucacgugguuccacgccauccacguguccgggaccaacggcaccaagcgguucgacaacccggugcugcccuucaacgacggggucuacuucgcgagcaccgagaaguccaacaucauccgcggcuggaucuucgggacgacccucgacagcaagacccagucccugcugaucgugaacaacgccaccaacguggucaucaaggugugcgaguuccaguucugcaacgaccccuuccucggcguguacuaccacaagaacaacaagagcuggauggaguccgaguuccgggucuacagcuccgccaacaacugcacguucgaguacgugagccagcccuuccugauggaccuggagggcaagcaggggaacuucaagaaccuccgcgaguucguguucaagaacaucgacggcuacuucaagaucuacuccaagcacaccccgaucaaccugguccgggaccugccccagggguucagcgcccucgagccccugguggaccugcccaucggcaucaacaucacccgcuuccagacccuccuggcccugcaccgguccuaccucacgccgggggacagcagcuccggcuggaccgcgggcgccgccgccuacuacgugggguaccugcagccccgcaccuuccugcucaaguacaacgagaacggcaccaucacggacgcggucgacugcgcccuggacccccugagcgagaccaagugcacccucaaguccuucaccguggagaaggggaucuaccagacgagcaacuuccgggugcagcccaccgaguccaucguccgcuucccgaacaucaccaaccugugccccuucggcgagguguucaacgccacccgguucgccagcgucuacgccuggaaccgcaagcggaucuccaacugcguggcggacuacagcgugcuguacaacuccgccagcuucuccacguucaagugcuacggcgucagccccaccaagcucaacgaccugugcuucaccaacguguacgccgacuccuucgugauccgcggggacgagguccggcagaucgcccccggccagaccgggaagaucgccgacuacaacuacaagcugccggacgacuucacgggcugcgugaucgcguggaacagcaacaaccucgacuccaaggucgggggcaacuacaacuaccuguaccgccuguuccgcaagagcaaccucaagcccuucgagcgggacaucuccaccgagaucuaccaggccggcagcacccccugcaacgggguggagggcuucaacugcuacuucccccugcaguccuacggguuccagccgaccaacggcgugggguaccagcccuaccggguggucgugcugagcuucgagcuccugcacgcccccgccacggugugcggccccaagaaguccaccaaccuggucaagaacaagugcgugaacuucaacuucaacggccucaccgggaccggcgugcugaccgagagcaacaagaaguuccugccguuccagcaguucgggcgcgacaucgccgacacgaccgacgcgguccgcgacccccagacccuggagauccucgacaucacccccugcagcuucggcgggguguccgugaucacgccgggcaccaacaccagcaaccaggucgccgugcuguaccagggcgugaacugcaccgagguccccguggccauccacgccgaccagcugacgcccaccuggcggguguacuccaccggcagcaacgucuuccagacccgcgccgggugccucaucggcgcggagcacgugaacaacuccuacgagugcgacauccccaucggggccggcaucugcgccagcuaccagacgcagaccaacuccccgcggcgcgcccggagcguggcgucccagagcgucaucgccuacaccaugucccugggcgccgagaacagcgucgccuacuccaacaacagcaucgccauccccaccaacuucacgaucuccgugaccaccgagauccugcccgugagcaugaccaagacgagcgucgacugcaccauguacaucugcggggacuccaccgagugcagcaaccuccugcugcaguacggcuccuucugcacccagcucaaccgcgcgcugacggggaucgccguggagcaggacaagaacacccaggagguguucgcccaggucaagcagaucuacaagacgcccccgaucaaggacuucggcggguucaacuucagccagauccugcccgaccccuccaagcccagcaagcgguccuucaucgaggaccuccuguucaacaaggugacccuggccgacgccggcuucaucaagcaguacggcgacugccucggggacaucgcggcccgcgaccugaucugcgcccagaaguucaacggccugaccgugcucccgccccugcugaccgacgagaugaucgcccaguacaccagcgcccuccuggcggggaccaucacguccggcuggaccuucggggccggcgccgcccugcagauccccuucgcgaugcagauggccuaccgguucaacggcaucggggucacccagaacgugcucuacgagaaccagaagcugaucgccaaccaguucaacagcgccaucggcaagauccaggacucccugagcuccaccgccagcgcgcucgggaagcugcaggacguggucaaccagaacgcccaggcccugaacacgcucgugaagcagcuguccagcaacuucggcgccaucuccagcgugcugaacgacauccucucccgccuggacaaggucgaggccgaggugcagaucgaccggcugaucaccgggcgccuccagagccugcagaccuacgugacccagcagcugauccgggcggccgagauccgcgccagcgccaaccucgccgcgaccaagauguccgagugcguccugggccagagcaagcggguggacuucugcggcaagggguaccaccugauguccuucccccagagcgccccgcacggcguggucuuccuccacgugacguacguccccgcccaggagaagaacuucaccaccgcccccgcgaucugccacgacgggaaggcccacuucccccgcgagggcguguucguguccaacgggacccacugguucgucacgcagcggaacuucuacgagccgcagaucaucaccaccgacaacaccuucgugagcggcaacugcgacguggucaucggcaucgugaacaacacgguguacgacccccugcagcccgagcuggacuccuucaaggaggagcucgacaaguacuucaagaaccacaccagccccgacgucgaccugggggacaucuccggcaucaacgccagcguggugaacauccagaaggagaucgaccgccugaacgaggucgccaagaaccucaacgagucccugaucgaccugcaggagcucgggaaguacgagcaguacaucaaguggccgugguacaucuggcugggcuucaucgccggccugaucgcgaucgugauggugaccaucaugcucugcugcaugaccagcugcugcuccugccugaaggggugcugcagcugcggcuccugcugcaaguucgacgaggacgacagcgagcccguccugaagggggugaagcuccacuacacguga

SEQ ID NO: 22779 - RNA, 3822 nt, Artificial Sequence
  SARS-CoV-2/Wuhan/WIV05/2019__EPI_ISL_402128 spike protein CDS gc (1-1273)(K986P_V987P_D614G_I692V)
auguucguguuccugguccuccugccccuggugagcucccagugcgugaaccucaccacccgcacgcagcugccgcccgccuacaccaacagcuucacccggggcgucuacuaccccgacaagguguuccgcuccagcgugcugcacuccacccaggaccucuuccugcccuucuucagcaacgucacgugguuccacgccauccacguguccgggaccaacggcaccaagcgguucgacaacccggugcugcccuucaacgacggggucuacuucgcgagcaccgagaaguccaacaucauccgcggcuggaucuucgggacgacccucgacagcaagacccagucccugcugaucgugaacaacgccaccaacguggucaucaaggugugcgaguuccaguucugcaacgaccccuuccucggcguguacuaccacaagaacaacaagagcuggauggaguccgaguuccgggucuacagcuccgccaacaacugcacguucgaguacgugagccagcccuuccugauggaccuggagggcaagcaggggaacuucaagaaccuccgcgaguucguguucaagaacaucgacggcuacuucaagaucuacuccaagcacaccccgaucaaccugguccgggaccugccccagggguucagcgcccucgagccccugguggaccugcccaucggcaucaacaucacccgcuuccagacccuccuggcccugcaccgguccuaccucacgccgggggacagcagcuccggcuggaccgcgggcgccgccgccuacuacgugggguaccugcagccccgcaccuuccugcucaaguacaacgagaacggcaccaucacggacgcggucgacugcgcccuggacccccugagcgagaccaagugcacccucaaguccuucaccguggagaaggggaucuaccagacgagcaacuuccgggugcagcccaccgaguccaucguccgcuucccgaacaucaccaaccugugccccuucggcgagguguucaacgccacccgguucgccagcgucuacgccuggaaccgcaagcggaucuccaacugcguggcggacuacagcgugcuguacaacuccgccagcuucuccacguucaagugcuacggcgucagccccaccaagcucaacgaccugugcuucaccaacguguacgccgacuccuucgugauccgcggggacgagguccggcagaucgcccccggccagaccgggaagaucgccgacuacaacuacaagcugccggacgacuucacgggcugcgugaucgcguggaacagcaacaaccucgacuccaaggucgggggcaacuacaacuaccuguaccgccuguuccgcaagagcaaccucaagcccuucgagcgggacaucuccaccgagaucuaccaggccggcagcacccccugcaacgggguggagggcuucaacugcuacuucccccugcaguccuacggguuccagccgaccaacggcgugggguaccagcccuaccggguggucgugcugagcuucgagcuccugcacgcccccgccacggugugcggccccaagaaguccaccaaccuggucaagaacaagugcgugaacuucaacuucaacggccucaccgggaccggcgugcugaccgagagcaacaagaaguuccugccguuccagcaguucgggcgcgacaucgccgacacgaccgacgcgguccgcgacccccagacccuggagauccucgacaucacccccugcagcuucggcgggguguccgugaucacgccgggcaccaacaccagcaaccaggucgccgugcuguaccagggcgugaacugcaccgagguccccguggccauccacgccgaccagcugacgcccaccuggcggguguacuccaccggcagcaacgucuuccagacccgcgccgggugccucaucggcgcggagcacgugaacaacuccuacgagugcgacauccccaucggggccggcaucugcgccagcuaccagacgcagaccaacuccccgcggcgcgcccggagcguggcgucccagagcgucaucgccuacaccaugucccugggcgccgagaacagcgucgccuacuccaacaacagcaucgccauccccaccaacuucacgaucuccgugaccaccgagauccugcccgugagcaugaccaagacgagcgucgacugcaccauguacaucugcggggacuccaccgagugcagcaaccuccugcugcaguacggcuccuucugcacccagcucaaccgcgcgcugacggggaucgccguggagcaggacaagaacacccaggagguguucgcccaggucaagcagaucuacaagacgcccccgaucaaggacuucggcggguucaacuucagccagauccugcccgaccccuccaagcccagcaagcgguccuucaucgaggaccuccuguucaacaaggugacccuggccgacgccggcuucaucaagcaguacggcgacugccucggggacaucgcggcccgcgaccugaucugcgcccagaaguucaacggccugaccgugcucccgccccugcugaccgacgagaugaucgcccaguacaccagcgcccuccuggcggggaccaucacguccggcuggaccuucggggccggcgccgcccugcagauccccuucgcgaugcagauggccuaccgguucaacggcaucggggucacccagaacgugcucuacgagaaccagaagcugaucgccaaccaguucaacagcgccaucggcaagauccaggacucccugagcuccaccgccagcgcgcucgggaagcugcaggacguggucaaccagaacgcccaggcccugaacacgcucgugaagcagcuguccagcaacuucggcgccaucuccagcgugcugaacgacauccucucccgccuggacccgcccgaggccgaggugcagaucgaccggcugaucaccgggcgccuccagagccugcagaccuacgugacccagcagcugauccgggcggccgagauccgcgccagcgccaaccucgccgcgaccaagauguccgagugcguccugggccagagcaagcggguggacuucugcggcaagggguaccaccugauguccuucccccagagcgccccgcacggcguggucuuccuccacgugacguacguccccgcccaggagaagaacuucaccaccgcccccgcgaucugccacgacgggaaggcccacuucccccgcgagggcguguucguguccaacgggacccacugguucgucacgcagcggaacuucuacgagccgcagaucaucaccaccgacaacaccuucgugagcggcaacugcgacguggucaucggcaucgugaacaacacgguguacgacccccugcagcccgagcuggacuccuucaaggaggagcucgacaaguacuucaagaaccacaccagccccgacgucgaccugggggacaucuccggcaucaacgccagcguggugaacauccagaaggagaucgaccgccugaacgaggucgccaagaaccucaacgagucccugaucgaccugcaggagcucgggaaguacgagcaguacaucaaguggccgugguacaucuggcugggcuucaucgccggccugaucgcgaucgugauggugaccaucaugcucugcugcaugaccagcugcugcuccugccugaaggggugcugcagcugcggcuccugcugcaaguucgacgaggacgacagcgagcccguccugaagggggugaagcuccacuacacguga

SEQ ID NO: 22780 - RNA, 3822 nt, Artificial Sequence
  SARS-CoV-2/Wuhan/WIV05/2019__EPI_ISL_402128 spike protein CDS gc (1-1273)(D614G_M1229I)
auguucguguuccugguccuccugccccuggugagcucccagugcgugaaccucaccacccgcacgcagcugccgcccgccuacaccaacagcuucacccggggcgucuacuaccccgacaagguguuccgcuccagcgugcugcacuccacccaggaccucuuccugcccuucuucagcaacgucacgugguuccacgccauccacguguccgggaccaacggcaccaagcgguucgacaacccggugcugcccuucaacgacggggucuacuucgcgagcaccgagaaguccaacaucauccgcggcuggaucuucgggacgacccucgacagcaagacccagucccugcugaucgugaacaacgccaccaacguggucaucaaggugugcgaguuccaguucugcaacgaccccuuccucggcguguacuaccacaagaacaacaagagcuggauggaguccgaguuccgggucuacagcuccgccaacaacugcacguucgaguacgugagccagcccuuccugauggaccuggagggcaagcaggggaacuucaagaaccuccgcgaguucguguucaagaacaucgacggcuacuucaagaucuacuccaagcacaccccgaucaaccugguccgggaccugccccagggguucagcgcccucgagccccugguggaccugcccaucggcaucaacaucacccgcuuccagacccuccuggcccugcaccgguccuaccucacgccgggggacagcagcuccggcuggaccgcgggcgccgccgccuacuacgugggguaccugcagccccgcaccuuccugcucaaguacaacgagaacggcaccaucacggacgcggucgacugcgcccuggacccccugagcgagaccaagugcacccucaaguccuucaccguggagaaggggaucuaccagacgagcaacuuccgggugcagcccaccgaguccaucguccgcuucccgaacaucaccaaccugugccccuucggcgagguguucaacgccacccgguucgccagcgucuacgccuggaaccgcaagcggaucuccaacugcguggcggacuacagcgugcuguacaacuccgccagcuucuccacguucaagugcuacggcgucagccccaccaagcucaacgaccugugcuucaccaacguguacgccgacuccuucgugauccgcggggacgagguccggcagaucgcccccggccagaccgggaagaucgccgacuacaacuacaagcugccggacgacuucacgggcugcgugaucgcguggaacagcaacaaccucgacuccaaggucgggggcaacuacaacuaccuguaccgccuguuccgcaagagcaaccucaagcccuucgagcgggacaucuccaccgagaucuaccaggccggcagcacccccugcaacgggguggagggcuucaacugcuacuucccccugcaguccuacggguuccagccgaccaacggcgugggguaccagcccuaccggguggucgugcugagcuucgagcuccugcacgcccccgccacggugugcggccccaagaaguccaccaaccuggucaagaacaagugcgugaacuucaacuucaacggccucaccgggaccggcgugcugaccgagagcaacaagaaguuccugccguuccagcaguucgggcgcgacaucgccgacacgaccgacgcgguccgcgacccccagacccuggagauccucgacaucacccccugcagcuucggcgggguguccgugaucacgccgggcaccaacaccagcaaccaggucgccgugcuguaccagggcgugaacugcaccgagguccccguggccauccacgccgaccagcugacgcccaccuggcggguguacuccaccggcagcaacgucuuccagacccgcgccgggugccucaucggcgcggagcacgugaacaacuccuacgagugcgacauccccaucggggccggcaucugcgccagcuaccagacgcagaccaacuccccgcggcgcgcccggagcguggcgucccagagcaucaucgccuacaccaugucccugggcgccgagaacagcgucgccuacuccaacaacagcaucgccauccccaccaacuucacgaucuccgugaccaccgagauccugcccgugagcaugaccaagacgagcgucgacugcaccauguacaucugcggggacuccaccgagugcagcaaccuccugcugcaguacggcuccuucugcacccagcucaaccgcgcgcugacggggaucgccguggagcaggacaagaacacccaggagguguucgcccaggucaagcagaucuacaagacgcccccgaucaaggacuucggcggguucaacuucagccagauccugcccgaccccuccaagcccagcaagcgguccuucaucgaggaccuccuguucaacaaggugacccuggccgacgccggcuucaucaagcaguacggcgacugccucggggacaucgcggcccgcgaccugaucugcgcccagaaguucaacggccugaccgugcucccgccccugcugaccgacgagaugaucgcccaguacaccagcgcccuccuggcggggaccaucacguccggcuggaccuucggggccggcgccgcccugcagauccccuucgcgaugcagauggccuaccgguucaacggcaucggggucacccagaacgugcucuacgagaaccagaagcugaucgccaaccaguucaacagcgccaucggcaagauccaggacucccugagcuccaccgccagcgcgcucgggaagcugcaggacguggucaaccagaacgcccaggcccugaacacgcucgugaagcagcuguccagcaacuucggcgccaucuccagcgugcugaacgacauccucucccgccuggacaaggucgaggccgaggugcagaucgaccggcugaucaccgggcgccuccagagccugcagaccuacgugacccagcagcugauccgggcggccgagauccgcgccagcgccaaccucgccgcgaccaagauguccgagugcguccugggccagagcaagcggguggacuucugcggcaagggguaccaccugauguccuucccccagagcgccccgcacggcguggucuuccuccacgugacguacguccccgcccaggagaagaacuucaccaccgcccccgcgaucugccacgacgggaaggcccacuucccccgcgagggcguguucguguccaacgggacccacugguucgucacgcagcggaacuucuacgagccgcagaucaucaccaccgacaacaccuucgugagcggcaacugcgacguggucaucggcaucgugaacaacacgguguacgacccccugcagcccgagcuggacuccuucaaggaggagcucgacaaguacuucaagaaccacaccagccccgacgucgaccugggggacaucuccggcaucaacgccagcguggugaacauccagaaggagaucgaccgccugaacgaggucgccaagaaccucaacgagucccugaucgaccugcaggagcucgggaaguacgagcaguacaucaaguggccgugguacaucuggcugggcuucaucgccggccugaucgcgaucgugaucgugaccaucaugcucugcugcaugaccagcugcugcuccugccugaaggggugcugcagcugcggcuccugcugcaaguucgacgaggacgacagcgagcccguccugaagggggugaagcuccacuacacguga

SEQ ID NO: 22781 - RNA, 3822 nt, Artificial Sequence
  SARS-CoV-2/Wuhan/WIV05/2019__EPI_ISL_402128 spike protein CDS gc (1-1273)(K986P_V987P_D614G_M1229I)
auguucguguuccugguccuccugccccuggugagcucccagugcgugaaccucaccacccgcacgcagcugccgcccgccuacaccaacagcuucacccggggcgucuacuaccccgacaagguguuccgcuccagcgugcugcacuccacccaggaccucuuccugcccuucuucagcaacgucacgugguuccacgccauccacguguccgggaccaacggcaccaagcgguucgacaacccggugcugcccuucaacgacggggucuacuucgcgagcaccgagaaguccaacaucauccgcggcuggaucuucgggacgacccucgacagcaagacccagucccugcugaucgugaacaacgccaccaacguggucaucaaggugugcgaguuccaguucugcaacgaccccuuccucggcguguacuaccacaagaacaacaagagcuggauggaguccgaguuccgggucuacagcuccgccaacaacugcacguucgaguacgugagccagcccuuccugauggaccuggagggcaagcaggggaacuucaagaaccuccgcgaguucguguucaagaacaucgacggcuacuucaagaucuacuccaagcacaccccgaucaaccugguccgggaccugccccagggguucagcgcccucgagccccugguggaccugcccaucggcaucaacaucacccgcuuccagacccuccuggcccugcaccgguccuaccucacgccgggggacagcagcuccggcuggaccgcgggcgccgccgccuacuacgugggguaccugcagccccgcaccuuccugcucaaguacaacgagaacggcaccaucacggacgcggucgacugcgcccuggacccccugagcgagaccaagugcacccucaaguccuucaccguggagaaggggaucuaccagacgagcaacuuccgggugcagcccaccgaguccaucguccgcuucccgaacaucaccaaccugugccccuucggcgagguguucaacgccacccgguucgccagcgucuacgccuggaaccgcaagcggaucuccaacugcguggcggacuacagcgugcuguacaacuccgccagcuucuccacguucaagugcuacggcgucagccccaccaagcucaacgaccugugcuucaccaacguguacgccgacuccuucgugauccgcggggacgagguccggcagaucgcccccggccagaccgggaagaucgccgacuacaacuacaagcugccggacgacuucacgggcugcgugaucgcguggaacagcaacaaccucgacuccaaggucgggggcaacuacaacuaccuguaccgccuguuccgcaagagcaaccucaagcccuucgagcgggacaucuccaccgagaucuaccaggccggcagcacccccugcaacgggguggagggcuucaacugcuacuucccccugcaguccuacggguuccagccgaccaacggcgugggguaccagcccuaccggguggucgugcugagcuucgagcuccugcacgcccccgccacggugugcggccccaagaaguccaccaaccuggucaagaacaagugcgugaacuucaacuucaacggccucaccgggaccggcgugcugaccgagagcaacaagaaguuccugccguuccagcaguucgggcgcgacaucgccgacacgaccgacgcgguccgcgacccccagacccuggagauccucgacaucacccccugcagcuucggcgggguguccgugaucacgccgggcaccaacaccagcaaccaggucgccgugcuguaccagggcgugaacugcaccgagguccccguggccauccacgccgaccagcugacgcccaccuggcggguguacuccaccggcagcaacgucuuccagacccgcgccgggugccucaucggcgcggagcacgugaacaacuccuacgagugcgacauccccaucggggccggcaucugcgccagcuaccagacgcagaccaacuccccgcggcgcgcccggagcguggcgucccagagcaucaucgccuacaccaugucccugggcgccgagaacagcgucgccuacuccaacaacagcaucgccauccccaccaacuucacgaucuccgugaccaccgagauccugcccgugagcaugaccaagacgagcgucgacugcaccauguacaucugcggggacuccaccgagugcagcaaccuccugcugcaguacggcuccuucugcacccagcucaaccgcgcgcugacggggaucgccguggagcaggacaagaacacccaggagguguucgcccaggucaagcagaucuacaagacgcccccgaucaaggacuucggcggguucaacuucagccagauccugcccgaccccuccaagcccagcaagcgguccuucaucgaggaccuccuguucaacaaggugacccuggccgacgccggcuucaucaagcaguacggcgacugccucggggacaucgcggcccgcgaccugaucugcgcccagaaguucaacggccugaccgugcucccgccccugcugaccgacgagaugaucgcccaguacaccagcgcccuccuggcggggaccaucacguccggcuggaccuucggggccggcgccgcccugcagauccccuucgcgaugcagauggccuaccgguucaacggcaucggggucacccagaacgugcucuacgagaaccagaagcugaucgccaaccaguucaacagcgccaucggcaagauccaggacucccugagcuccaccgccagcgcgcucgggaagcugcaggacguggucaaccagaacgcccaggcccugaacacgcucgugaagcagcuguccagcaacuucggcgccaucuccagcgugcugaacgacauccucucccgccuggacccgcccgaggccgaggugcagaucgaccggcugaucaccgggcgccuccagagccugcagaccuacgugacccagcagcugauccgggcggccgagauccgcgccagcgccaaccucgccgcgaccaagauguccgagugcguccugggccagagcaagcggguggacuucugcggcaagggguaccaccugauguccuucccccagagcgccccgcacggcguggucuuccuccacgugacguacguccccgcccaggagaagaacuucaccaccgcccccgcgaucugccacgacgggaaggcccacuucccccgcgagggcguguucguguccaacgggacccacugguucgucacgcagcggaacuucuacgagccgcagaucaucaccaccgacaacaccuucgugagcggcaacugcgacguggucaucggcaucgugaacaacacgguguacgacccccugcagcccgagcuggacuccuucaaggaggagcucgacaaguacuucaagaaccacaccagccccgacgucgaccugggggacaucuccggcaucaacgccagcguggugaacauccagaaggagaucgaccgccugaacgaggucgccaagaaccucaacgagucccugaucgaccugcaggagcucgggaaguacgagcaguacaucaaguggccgugguacaucuggcugggcuucaucgccggccugaucgcgaucgugaucgugaccaucaugcucugcugcaugaccagcugcugcuccugccugaaggggugcugcagcugcggcuccugcugcaaguucgacgaggacgacagcgagcccguccugaagggggugaagcuccacuacacguga

SEQ ID NO: 22782 - RNA, 3816 nt, Artificial Sequence
  SARS-CoV-2/Wuhan/WIV05/2019__EPI_ISL_402128 spike protein CDS gc (1-1273)(H69del_V70del_A222V_Y453F_S477N_D614G_I692V)
auguucguguuccugguccuccugccccuggugagcucccagugcgugaaccucaccacccgcacgcagcugccgcccgccuacaccaacagcuucacccggggcgucuacuaccccgacaagguguuccgcuccagcgugcugcacuccacccaggaccucuuccugcccuucuucagcaacgucacgugguuccacgccaucuccgggaccaacggcaccaagcgguucgacaacccggugcugcccuucaacgacggggucuacuucgcgagcaccgagaaguccaacaucauccgcggcuggaucuucgggacgacccucgacagcaagacccagucccugcugaucgugaacaacgccaccaacguggucaucaaggugugcgaguuccaguucugcaacgaccccuuccucggcguguacuaccacaagaacaacaagagcuggauggaguccgaguuccgggucuacagcuccgccaacaacugcacguucgaguacgugagccagcccuuccugauggaccuggagggcaagcaggggaacuucaagaaccuccgcgaguucguguucaagaacaucgacggcuacuucaagaucuacuccaagcacaccccgaucaaccugguccgggaccugccccagggguucagcguccucgagccccugguggaccugcccaucggcaucaacaucacccgcuuccagacccuccuggcccugcaccgguccuaccucacgccgggggacagcagcuccggcuggaccgcgggcgccgccgccuacuacgugggguaccugcagccccgcaccuuccugcucaaguacaacgagaacggcaccaucacggacgcggucgacugcgcccuggacccccugagcgagaccaagugcacccucaaguccuucaccguggagaaggggaucuaccagacgagcaacuuccgggugcagcccaccgaguccaucguccgcuucccgaacaucaccaaccugugccccuucggcgagguguucaacgccacccgguucgccagcgucuacgccuggaaccgcaagcggaucuccaacugcguggcggacuacagcgugcuguacaacuccgccagcuucuccacguucaagugcuacggcgucagccccaccaagcucaacgaccugugcuucaccaacguguacgccgacuccuucgugauccgcggggacgagguccggcagaucgcccccggccagaccgggaagaucgccgacuacaacuacaagcugccggacgacuucacgggcugcgugaucgcguggaacagcaacaaccucgacuccaaggucgggggcaacuacaacuaccuguuccgccuguuccgcaagagcaaccucaagcccuucgagcgggacaucuccaccgagaucuaccaggccggcaacacccccugcaacgggguggagggcuucaacugcuacuucccccugcaguccuacggguuccagccgaccaacggcgugggguaccagcccuaccggguggucgugcugagcuucgagcuccugcacgcccccgccacggugugcggccccaagaaguccaccaaccuggucaagaacaagugcgugaacuucaacuucaacggccucaccgggaccggcgugcugaccgagagcaacaagaaguuccugccguuccagcaguucgggcgcgacaucgccgacacgaccgacgcgguccgcgacccccagacccuggagauccucgacaucacccccugcagcuucggcgggguguccgugaucacgccgggcaccaacaccagcaaccaggucgccgugcuguaccagggcgugaacugcaccgagguccccguggccauccacgccgaccagcugacgcccaccuggcggguguacuccaccggcagcaacgucuuccagacccgcgccgggugccucaucggcgcggagcacgugaacaacuccuacgagugcgacauccccaucggggccggcaucugcgccagcuaccagacgcagaccaacuccccgcggcgcgcccggagcguggcgucccagagcgucaucgccuacaccaugucccugggcgccgagaacagcgucgccuacuccaacaacagcaucgccauccccaccaacuucacgaucuccgugaccaccgagauccugcccgugagcaugaccaagacgagcgucgacugcaccauguacaucugcggggacuccaccgagugcagcaaccuccugcugcaguacggcuccuucugcacccagcucaaccgcgcgcugacggggaucgccguggagcaggacaagaacacccaggagguguucgcccaggucaagcagaucuacaagacgcccccgaucaaggacuucggcggguucaacuucagccagauccugcccgaccccuccaagcccagcaagcgguccuucaucgaggaccuccuguucaacaaggugacccuggccgacgccggcuucaucaagcaguacggcgacugccucggggacaucgcggcccgcgaccugaucugcgcccagaaguucaacggccugaccgugcucccgccccugcugaccgacgagaugaucgcccaguacaccagcgcccuccuggcggggaccaucacguccggcuggaccuucggggccggcgccgcccugcagauccccuucgcgaugcagauggccuaccgguucaacggcaucggggucacccagaacgugcucuacgagaaccagaagcugaucgccaaccaguucaacagcgccaucggcaagauccaggacucccugagcuccaccgccagcgcgcucgggaagcugcaggacguggucaaccagaacgcccaggcccugaacacgcucgugaagcagcuguccagcaacuucggcgccaucuccagcgugcugaacgacauccucucccgccuggacaaggucgaggccgaggugcagaucgaccggcugaucaccgggcgccuccagagccugcagaccuacgugacccagcagcugauccgggcggccgagauccgcgccagcgccaaccucgccgcgaccaagauguccgagugcguccugggccagagcaagcggguggacuucugcggcaagggguaccaccugauguccuucccccagagcgccccgcacggcguggucuuccuccacgugacguacguccccgcccaggagaagaacuucaccaccgcccccgcgaucugccacgacgggaaggcccacuucccccgcgagggcguguucguguccaacgggacccacugguucgucacgcagcggaacuucuacgagccgcagaucaucaccaccgacaacaccuucgugagcggcaacugcgacguggucaucggcaucgugaacaacacgguguacgacccccugcagcccgagcuggacuccuucaaggaggagcucgacaaguacuucaagaaccacaccagccccgacgucgaccugggggacaucuccggcaucaacgccagcguggugaacauccagaaggagaucgaccgccugaacgaggucgccaagaaccucaacgagucccugaucgaccugcaggagcucgggaaguacgagcaguacaucaaguggccgugguacaucuggcugggcuucaucgccggccugaucgcgaucgugauggugaccaucaugcucugcugcaugaccagcugcugcuccugccugaaggggugcugcagcugcggcuccugcugcaaguucgacgaggacgacagcgagcccguccugaagggggugaagcuccacuacacguga

SEQ ID NO: 22783 - RNA, 3816 nt, Artificial Sequence
  SARS-CoV-2/Wuhan/WIV05/2019__EPI_ISL_402128 spike protein CDS gc (1-1273)(K986P_V987P_H69del_V70del_A222V_Y453F_S477N_D614G_I692V)
auguucguguuccugguccuccugccccuggugagcucccagugcgugaaccucaccacccgcacgcagcugccgcccgccuacaccaacagcuucacccggggcgucuacuaccccgacaagguguuccgcuccagcgugcugcacuccacccaggaccucuuccugcccuucuucagcaacgucacgugguuccacgccaucuccgggaccaacggcaccaagcgguucgacaacccggugcugcccuucaacgacggggucuacuucgcgagcaccgagaaguccaacaucauccgcggcuggaucuucgggacgacccucgacagcaagacccagucccugcugaucgugaacaacgccaccaacguggucaucaaggugugcgaguuccaguucugcaacgaccccuuccucggcguguacuaccacaagaacaacaagagcuggauggaguccgaguuccgggucuacagcuccgccaacaacugcacguucgaguacgugagccagcccuuccugauggaccuggagggcaagcaggggaacuucaagaaccuccgcgaguucguguucaagaacaucgacggcuacuucaagaucuacuccaagcacaccccgaucaaccugguccgggaccugccccagggguucagcguccucgagccccugguggaccugcccaucggcaucaacaucacccgcuuccagacccuccuggcccugcaccgguccuaccucacgccgggggacagcagcuccggcuggaccgcgggcgccgccgccuacuacgugggguaccugcagccccgcaccuuccugcucaaguacaacgagaacggcaccaucacggacgcggucgacugcgcccuggacccccugagcgagaccaagugcacccucaaguccuucaccguggagaaggggaucuaccagacgagcaacuuccgggugcagcccaccgaguccaucguccgcuucccgaacaucaccaaccugugccccuucggcgagguguucaacgccacccgguucgccagcgucuacgccuggaaccgcaagcggaucuccaacugcguggcggacuacagcgugcuguacaacuccgccagcuucuccacguucaagugcuacggcgucagccccaccaagcucaacgaccugugcuucaccaacguguacgccgacuccuucgugauccgcggggacgagguccggcagaucgcccccggccagaccgggaagaucgccgacuacaacuacaagcugccggacgacuucacgggcugcgugaucgcguggaacagcaacaaccucgacuccaaggucgggggcaacuacaacuaccuguuccgccuguuccgcaagagcaaccucaagcccuucgagcgggacaucuccaccgagaucuaccaggccggcaacacccccugcaacgggguggagggcuucaacugcuacuucccccugcaguccuacggguuccagccgaccaacggcgugggguaccagcccuaccggguggucgugcugagcuucgagcuccugcacgcccccgccacggugugcggccccaagaaguccaccaaccuggucaagaacaagugcgugaacuucaacuucaacggccucaccgggaccggcgugcugaccgagagcaacaagaaguuccugccguuccagcaguucgggcgcgacaucgccgacacgaccgacgcgguccgcgacccccagacccuggagauccucgacaucacccccugcagcuucggcgggguguccgugaucacgccgggcaccaacaccagcaaccaggucgccgugcuguaccagggcgugaacugcaccgagguccccguggccauccacgccgaccagcugacgcccaccuggcggguguacuccaccggcagcaacgucuuccagacccgcgccgggugccucaucggcgcggagcacgugaacaacuccuacgagugcgacauccccaucggggccggcaucugcgccagcuaccagacgcagaccaacuccccgcggcgcgcccggagcguggcgucccagagcgucaucgccuacaccaugucccugggcgccgagaacagcgucgccuacuccaacaacagcaucgccauccccaccaacuucacgaucuccgugaccaccgagauccugcccgugagcaugaccaagacgagcgucgacugcaccauguacaucugcggggacuccaccgagugcagcaaccuccugcugcaguacggcuccuucugcacccagcucaaccgcgcgcugacggggaucgccguggagcaggacaagaacacccaggagguguucgcccaggucaagcagaucuacaagacgcccccgaucaaggacuucggcggguucaacuucagccagauccugcccgaccccuccaagcccagcaagcgguccuucaucgaggaccuccuguucaacaaggugacccuggccgacgccggcuucaucaagcaguacggcgacugccucggggacaucgcggcccgcgaccugaucugcgcccagaaguucaacggccugaccgugcucccgccccugcugaccgacgagaugaucgcccaguacaccagcgcccuccuggcggggaccaucacguccggcuggaccuucggggccggcgccgcccugcagauccccuucgcgaugcagauggccuaccgguucaacggcaucggggucacccagaacgugcucuacgagaaccagaagcugaucgccaaccaguucaacagcgccaucggcaagauccaggacucccugagcuccaccgccagcgcgcucgggaagcugcaggacguggucaaccagaacgcccaggcccugaacacgcucgugaagcagcuguccagcaacuucggcgccaucuccagcgugcugaacgacauccucucccgccuggacccgcccgaggccgaggugcagaucgaccggcugaucaccgggcgccuccagagccugcagaccuacgugacccagcagcugauccgggcggccgagauccgcgccagcgccaaccucgccgcgaccaagauguccgagugcguccugggccagagcaagcggguggacuucugcggcaagggguaccaccugauguccuucccccagagcgccccgcacggcguggucuuccuccacgugacguacguccccgcccaggagaagaacuucaccaccgcccccgcgaucugccacgacgggaaggcccacuucccccgcgagggcguguucguguccaacgggacccacugguucgucacgcagcggaacuucuacgagccgcagaucaucaccaccgacaacaccuucgugagcggcaacugcgacguggucaucggcaucgugaacaacacgguguacgacccccugcagcccgagcuggacuccuucaaggaggagcucgacaaguacuucaagaaccacaccagccccgacgucgaccugggggacaucuccggcaucaacgccagcguggugaacauccagaaggagaucgaccgccugaacgaggucgccaagaaccucaacgagucccugaucgaccugcaggagcucgggaaguacgagcaguacaucaaguggccgugguacaucuggcugggcuucaucgccggccugaucgcgaucgugauggugaccaucaugcucugcugcaugaccagcugcugcuccugccugaaggggugcugcagcugcggcuccugcugcaaguucgacgaggacgacagcgagcccguccugaagggggugaagcuccacuacacguga

SEQ ID NO: 22784 - RNA, 3816 nt, Artificial Sequence
  SARS-CoV-2/Wuhan/WIV05/2019__EPI_ISL_402128 spike protein CDS gc (1-1273)(H69del_V70del_Y453F_D614G_I692V_M1229I)
auguucguguuccugguccuccugccccuggugagcucccagugcgugaaccucaccacccgcacgcagcugccgcccgccuacaccaacagcuucacccggggcgucuacuaccccgacaagguguuccgcuccagcgugcugcacuccacccaggaccucuuccugcccuucuucagcaacgucacgugguuccacgccaucuccgggaccaacggcaccaagcgguucgacaacccggugcugcccuucaacgacggggucuacuucgcgagcaccgagaaguccaacaucauccgcggcuggaucuucgggacgacccucgacagcaagacccagucccugcugaucgugaacaacgccaccaacguggucaucaaggugugcgaguuccaguucugcaacgaccccuuccucggcguguacuaccacaagaacaacaagagcuggauggaguccgaguuccgggucuacagcuccgccaacaacugcacguucgaguacgugagccagcccuuccugauggaccuggagggcaagcaggggaacuucaagaaccuccgcgaguucguguucaagaacaucgacggcuacuucaagaucuacuccaagcacaccccgaucaaccugguccgggaccugccccagggguucagcgcccucgagccccugguggaccugcccaucggcaucaacaucacccgcuuccagacccuccuggcccugcaccgguccuaccucacgccgggggacagcagcuccggcuggaccgcgggcgccgccgccuacuacgugggguaccugcagccccgcaccuuccugcucaaguacaacgagaacggcaccaucacggacgcggucgacugcgcccuggacccccugagcgagaccaagugcacccucaaguccuucaccguggagaaggggaucuaccagacgagcaacuuccgggugcagcccaccgaguccaucguccgcuucccgaacaucaccaaccugugccccuucggcgagguguucaacgccacccgguucgccagcgucuacgccuggaaccgcaagcggaucuccaacugcguggcggacuacagcgugcuguacaacuccgccagcuucuccacguucaagugcuacggcgucagccccaccaagcucaacgaccugugcuucaccaacguguacgccgacuccuucgugauccgcggggacgagguccggcagaucgcccccggccagaccgggaagaucgccgacuacaacuacaagcugccggacgacuucacgggcugcgugaucgcguggaacagcaacaaccucgacuccaaggucgggggcaacuacaacuaccuguuccgccuguuccgcaagagcaaccucaagcccuucgagcgggacaucuccaccgagaucuaccaggccggcagcacccccugcaacgggguggagggcuucaacugcuacuucccccugcaguccuacggguuccagccgaccaacggcgugggguaccagcccuaccggguggucgugcugagcuucgagcuccugcacgcccccgccacggugugcggccccaagaaguccaccaaccuggucaagaacaagugcgugaacuucaacuucaacggccucaccgggaccggcgugcugaccgagagcaacaagaaguuccugccguuccagcaguucgggcgcgacaucgccgacacgaccgacgcgguccgcgacccccagacccuggagauccucgacaucacccccugcagcuucggcgggguguccgugaucacgccgggcaccaacaccagcaaccaggucgccgugcuguaccagggcgugaacugcaccgagguccccguggccauccacgccgaccagcugacgcccaccuggcggguguacuccaccggcagcaacgucuuccagacccgcgccgggugccucaucggcgcggagcacgugaacaacuccuacgagugcgacauccccaucggggccggcaucugcgccagcuaccagacgcagaccaacuccccgcggcgcgcccggagcguggcgucccagagcgugaucgccuacaccaugucccugggcgccgagaacagcgucgccuacuccaacaacagcaucgccauccccaccaacuucacgaucuccgugaccaccgagauccugcccgugagcaugaccaagacgagcgucgacugcaccauguacaucugcggggacuccaccgagugcagcaaccuccugcugcaguacggcuccuucugcacccagcucaaccgcgcgcugacggggaucgccguggagcaggacaagaacacccaggagguguucgcccaggucaagcagaucuacaagacgcccccgaucaaggacuucggcggguucaacuucagccagauccugcccgaccccuccaagcccagcaagcgguccuucaucgaggaccuccuguucaacaaggugacccuggccgacgccggcuucaucaagcaguacggcgacugccucggggacaucgcggcccgcgaccugaucugcgcccagaaguucaacggccugaccgugcucccgccccugcugaccgacgagaugaucgcccaguacaccagcgcccuccuggcggggaccaucacguccggcuggaccuucggggccggcgccgcccugcagauccccuucgcgaugcagauggccuaccgguucaacggcaucggggucacccagaacgugcucuacgagaaccagaagcugaucgccaaccaguucaacagcgccaucggcaagauccaggacucccugagcuccaccgccagcgcgcucgggaagcugcaggacguggucaaccagaacgcccaggcccugaacacgcucgugaagcagcuguccagcaacuucggcgccaucuccagcgugcugaacgacauccucucccgccuggacaaggucgaggccgaggugcagaucgaccggcugaucaccgggcgccuccagagccugcagaccuacgugacccagcagcugauccgggcggccgagauccgcgccagcgccaaccucgccgcgaccaagauguccgagugcguccugggccagagcaagcggguggacuucugcggcaagggguaccaccugauguccuucccccagagcgccccgcacggcguggucuuccuccacgugacguacguccccgcccaggagaagaacuucaccaccgcccccgcgaucugccacgacgggaaggcccacuucccccgcgagggcguguucguguccaacgggacccacugguucgucacgcagcggaacuucuacgagccgcagaucaucaccaccgacaacaccuucgugagcggcaacugcgacguggucaucggcaucgugaacaacacgguguacgacccccugcagcccgagcuggacuccuucaaggaggagcucgacaaguacuucaagaaccacaccagccccgacgucgaccugggggacaucuccggcaucaacgccagcguggugaacauccagaaggagaucgaccgccugaacgaggucgccaagaaccucaacgagucccugaucgaccugcaggagcucgggaaguacgagcaguacaucaaguggccgugguacaucuggcugggcuucaucgccggccugaucgcgaucgugaucgugaccaucaugcucugcugcaugaccagcugcugcuccugccugaaggggugcugcagcugcggcuccugcugcaaguucgacgaggacgacagcgagcccguccugaagggggugaagcuccacuacacguga

SEQ ID NO: 22785 - RNA, 3816 nt, Artificial Sequence
  SARS-CoV-2/Wuhan/WIV05/2019__EPI_ISL_402128 spike protein CDS gc (1-1273)(K986P_V987P_H69del_V70del_Y453F_D614G_I692V_M1229I)
auguucguguuccugguccuccugccccuggugagcucccagugcgugaaccucaccacccgcacgcagcugccgcccgccuacaccaacagcuucacccggggcgucuacuaccccgacaagguguuccgcuccagcgugcugcacuccacccaggaccucuuccugcccuucuucagcaacgucacgugguuccacgccaucuccgggaccaacggcaccaagcgguucgacaacccggugcugcccuucaacgacggggucuacuucgcgagcaccgagaaguccaacaucauccgcggcuggaucuucgggacgacccucgacagcaagacccagucccugcugaucgugaacaacgccaccaacguggucaucaaggugugcgaguuccaguucugcaacgaccccuuccucggcguguacuaccacaagaacaacaagagcuggauggaguccgaguuccgggucuacagcuccgccaacaacugcacguucgaguacgugagccagcccuuccugauggaccuggagggcaagcaggggaacuucaagaaccuccgcgaguucguguucaagaacaucgacggcuacuucaagaucuacuccaagcacaccccgaucaaccugguccgggaccugccccagggguucagcgcccucgagccccugguggaccugcccaucggcaucaacaucacccgcuuccagacccuccuggcccugcaccgguccuaccucacgccgggggacagcagcuccggcuggaccgcgggcgccgccgccuacuacgugggguaccugcagccccgcaccuuccugcucaaguacaacgagaacggcaccaucacggacgcggucgacugcgcccuggacccccugagcgagaccaagugcacccucaaguccuucaccguggagaaggggaucuaccagacgagcaacuuccgggugcagcccaccgaguccaucguccgcuucccgaacaucaccaaccugugccccuucggcgagguguucaacgccacccgguucgccagcgucuacgccuggaaccgcaagcggaucuccaacugcguggcggacuacagcgugcuguacaacuccgccagcuucuccacguucaagugcuacggcgucagccccaccaagcucaacgaccugugcuucaccaacguguacgccgacuccuucgugauccgcggggacgagguccggcagaucgcccccggccagaccgggaagaucgccgacuacaacuacaagcugccggacgacuucacgggcugcgugaucgcguggaacagcaacaaccucgacuccaaggucgggggcaacuacaacuaccuguuccgccuguuccgcaagagcaaccucaagcccuucgagcgggacaucuccaccgagaucuaccaggccggcagcacccccugcaacgggguggagggcuucaacugcuacuucccccugcaguccuacggguuccagccgaccaacggcgugggguaccagcccuaccggguggucgugcugagcuucgagcuccugcacgcccccgccacggugugcggccccaagaaguccaccaaccuggucaagaacaagugcgugaacuucaacuucaacggccucaccgggaccggcgugcugaccgagagcaacaagaaguuccugccguuccagcaguucgggcgcgacaucgccgacacgaccgacgcgguccgcgacccccagacccuggagauccucgacaucacccccugcagcuucggcgggguguccgugaucacgccgggcaccaacaccagcaaccaggucgccgugcuguaccagggcgugaacugcaccgagguccccguggccauccacgccgaccagcugacgcccaccuggcggguguacuccaccggcagcaacgucuuccagacccgcgccgggugccucaucggcgcggagcacgugaacaacuccuacgagugcgacauccccaucggggccggcaucugcgccagcuaccagacgcagaccaacuccccgcggcgcgcccggagcguggcgucccagagcgugaucgccuacaccaugucccugggcgccgagaacagcgucgccuacuccaacaacagcaucgccauccccaccaacuucacgaucuccgugaccaccgagauccugcccgugagcaugaccaagacgagcgucgacugcaccauguacaucugcggggacuccaccgagugcagcaaccuccugcugcaguacggcuccuucugcacccagcucaaccgcgcgcugacggggaucgccguggagcaggacaagaacacccaggagguguucgcccaggucaagcagaucuacaagacgcccccgaucaaggacuucggcggguucaacuucagccagauccugcccgaccccuccaagcccagcaagcgguccuucaucgaggaccuccuguucaacaaggugacccuggccgacgccggcuucaucaagcaguacggcgacugccucggggacaucgcggcccgcgaccugaucugcgcccagaaguucaacggccugaccgugcucccgccccugcugaccgacgagaugaucgcccaguacaccagcgcccuccuggcggggaccaucacguccggcuggaccuucggggccggcgccgcccugcagauccccuucgcgaugcagauggccuaccgguucaacggcaucggggucacccagaacgugcucuacgagaaccagaagcugaucgccaaccaguucaacagcgccaucggcaagauccaggacucccugagcuccaccgccagcgcgcucgggaagcugcaggacguggucaaccagaacgcccaggcccugaacacgcucgugaagcagcuguccagcaacuucggcgccaucuccagcgugcugaacgacauccucucccgccuggacccgcccgaggccgaggugcagaucgaccggcugaucaccgggcgccuccagagccugcagaccuacgugacccagcagcugauccgggcggccgagauccgcgccagcgccaaccucgccgcgaccaagauguccgagugcguccugggccagagcaagcggguggacuucugcggcaagggguaccaccugauguccuucccccagagcgccccgcacggcguggucuuccuccacgugacguacguccccgcccaggagaagaacuucaccaccgcccccgcgaucugccacgacgggaaggcccacuucccccgcgagggcguguucguguccaacgggacccacugguucgucacgcagcggaacuucuacgagccgcagaucaucaccaccgacaacaccuucgugagcggcaacugcgacguggucaucggcaucgugaacaacacgguguacgacccccugcagcccgagcuggacuccuucaaggaggagcucgacaaguacuucaagaaccacaccagccccgacgucgaccugggggacaucuccggcaucaacgccagcguggugaacauccagaaggagaucgaccgccugaacgaggucgccaagaaccucaacgagucccugaucgaccugcaggagcucgggaaguacgagcaguacaucaaguggccgugguacaucuggcugggcuucaucgccggccugaucgcgaucgugaucgugaccaucaugcucugcugcaugaccagcugcugcuccugccugaaggggugcugcagcugcggcuccugcugcaaguucgacgaggacgacagcgagcccguccugaagggggugaagcuccacuacacguga

SEQ ID NO: 22786 - RNA, 4094 nt, Artificial Sequence
  SARS-CoV-2/Wuhan/WIV05/2019__EPI_ISL_402128 spike protein mRNA gc (1-1273)(K986P_V987P_F817P_A892P_A899P_A942P)
aggagagucccgcagucggcguccagcggcucugcuuguucgugugugugucguugcaggccuuauucaagcuuaccauguucguguuccugguccuccugccccuggugagcucccagugcgugaaccucaccacccgcacgcagcugccgcccgccuacaccaacagcuucacccggggcgucuacuaccccgacaagguguuccgcuccagcgugcugcacuccacccaggaccucuuccugcccuucuucagcaacgucacgugguuccacgccauccacguguccgggaccaacggcaccaagcgguucgacaacccggugcugcccuucaacgacggggucuacuucgcgagcaccgagaaguccaacaucauccgcggcuggaucuucgggacgacccucgacagcaagacccagucccugcugaucgugaacaacgccaccaacguggucaucaaggugugcgaguuccaguucugcaacgaccccuuccucggcguguacuaccacaagaacaacaagagcuggauggaguccgaguuccgggucuacagcuccgccaacaacugcacguucgaguacgugagccagcccuuccugauggaccuggagggcaagcaggggaacuucaagaaccuccgcgaguucguguucaagaacaucgacggcuacuucaagaucuacuccaagcacaccccgaucaaccugguccgggaccugccccagggguucagcgcccucgagccccugguggaccugcccaucggcaucaacaucacccgcuuccagacccuccuggcccugcaccgguccuaccucacgccgggggacagcagcuccggcuggaccgcgggcgccgccgccuacuacgugggguaccugcagccccgcaccuuccugcucaaguacaacgagaacggcaccaucacggacgcggucgacugcgcccuggacccccugagcgagaccaagugcacccucaaguccuucaccguggagaaggggaucuaccagacgagcaacuuccgggugcagcccaccgaguccaucguccgcuucccgaacaucaccaaccugugccccuucggcgagguguucaacgccacccgguucgccagcgucuacgccuggaaccgcaagcggaucuccaacugcguggcggacuacagcgugcuguacaacuccgccagcuucuccacguucaagugcuacggcgucagccccaccaagcucaacgaccugugcuucaccaacguguacgccgacuccuucgugauccgcggggacgagguccggcagaucgcccccggccagaccgggaagaucgccgacuacaacuacaagcugccggacgacuucacgggcugcgugaucgcguggaacagcaacaaccucgacuccaaggucgggggcaacuacaacuaccuguaccgccuguuccgcaagagcaaccucaagcccuucgagcgggacaucuccaccgagaucuaccaggccggcagcacccccugcaacgggguggagggcuucaacugcuacuucccccugcaguccuacggguuccagccgaccaacggcgugggguaccagcccuaccggguggucgugcugagcuucgagcuccugcacgcccccgccacggugugcggccccaagaaguccaccaaccuggucaagaacaagugcgugaacuucaacuucaacggccucaccgggaccggcgugcugaccgagagcaacaagaaguuccugccguuccagcaguucgggcgcgacaucgccgacacgaccgacgcgguccgcgacccccagacccuggagauccucgacaucacccccugcagcuucggcgggguguccgugaucacgccgggcaccaacaccagcaaccaggucgccgugcuguaccaggacgugaacugcaccgagguccccguggccauccacgccgaccagcugacgcccaccuggcggguguacuccaccggcagcaacgucuuccagacccgcgccgggugccucaucggcgcggagcacgugaacaacuccuacgagugcgacauccccaucggggccggcaucugcgccagcuaccagacgcagaccaacuccccgcggcgcgcccggagcguggcgucccagagcaucaucgccuacaccaugucccugggcgccgagaacagcgucgccuacuccaacaacagcaucgccauccccaccaacuucacgaucuccgugaccaccgagauccugcccgugagcaugaccaagacgagcgucgacugcaccauguacaucugcggggacuccaccgagugcagcaaccuccugcugcaguacggcuccuucugcacccagcucaaccgcgcgcugacggggaucgccguggagcaggacaagaacacccaggagguguucgcccaggucaagcagaucuacaagacgcccccgaucaaggacuucggcggguucaacuucagccagauccugcccgaccccuccaagcccagcaagcggucccccaucgaggaccuccuguucaacaaggugacccuggccgacgccggcuucaucaagcaguacggcgacugccucggggacaucgcggcccgcgaccugaucugcgcccagaaguucaacggccugaccgugcucccgccccugcugaccgacgagaugaucgcccaguacaccagcgcccuccuggcggggaccaucacguccggcuggaccuucggggccggccccgcccugcagauccccuucccgaugcagauggccuaccgguucaacggcaucggggucacccagaacgugcucuacgagaaccagaagcugaucgccaaccaguucaacagcgccaucggcaagauccaggacucccugagcuccacccccagcgcgcucgggaagcugcaggacguggucaaccagaacgcccaggcccugaacacgcucgugaagcagcuguccagcaacuucggcgccaucuccagcgugcugaacgacauccucucccgccuggacccgcccgaggccgaggugcagaucgaccggcugaucaccgggcgccuccagagccugcagaccuacgugacccagcagcugauccgggcggccgagauccgcgccagcgccaaccucgccgcgaccaagauguccgagugcguccugggccagagcaagcggguggacuucugcggcaagggguaccaccugauguccuucccccagagcgccccgcacggcguggucuuccuccacgugacguacguccccgcccaggagaagaacuucaccaccgcccccgcgaucugccacgacgggaaggcccacuucccccgcgagggcguguucguguccaacgggacccacugguucgucacgcagcggaacuucuacgagccgcagaucaucaccaccgacaacaccuucgugagcggcaacugcgacguggucaucggcaucgugaacaacacgguguacgacccccugcagcccgagcuggacuccuucaaggaggagcucgacaaguacuucaagaaccacaccagccccgacgucgaccugggggacaucuccggcaucaacgccagcguggugaacauccagaaggagaucgaccgccugaacgaggucgccaagaaccucaacgagucccugaucgaccugcaggagcucgggaaguacgagcaguacaucaaguggccgugguacaucuggcugggcuucaucgccggccugaucgcgaucgugauggugaccaucaugcucugcugcaugaccagcugcugcuccugccugaaggggugcugcagcugcggcuccugcugcaaguucgacgaggacgacagcgagcccguccugaagggggugaagcuccacuacacgugaggacuagucccuguucccagagcccacuuuuuuuucuuuuuuugaaauaaaauagccugucuuucagaucucaaaggcucuuuucagagccaccaaaaaaaaaaaaaaaaaaaaaaaaaaaaaaaaaaaaaaaaaaaaaaaaaaaaaaaaaaaaaaaaaaaaaaaaaaaaaaaaaaaaaaaaaaaaaaaaaaaaa

SEQ ID NO: 22787 - RNA, 1424 nt, Artificial Sequence
  SARS-CoV-2/Wuhan/WIV05/2019__EPI_ISL_402128 spike protein mRNA gc (1-15,334-528) Ferritin construct R10340
aggagagucccgcagucggcguccagcggcucugcuuguucgugugugugucguugcaggccuuauucaagcuuaccauguucguguuccugguccuccugccccuggugagcucccagugcaaccugugccccuucggcgagguguucaacgccacccgguucgccagcgucuacgccuggaaccgcaagcggaucuccaacugcguggcggacuacagcgugcuguacaacuccgccagcuucuccacguucaagugcuacggcgucagccccaccaagcucaacgaccugugcuucaccaacguguacgccgacuccuucgugauccgcggggacgagguccggcagaucgcccccggccagaccgggaagaucgccgacuacaacuacaagcugccggacgacuucacgggcugcgugaucgcguggaacagcaacaaccucgacuccaaggucgggggcaacuacaacuaccuguaccgccuguuccgcaagagcaaccucaagcccuucgagcgggacaucuccaccgagaucuaccaggccggcagcacccccugcaacgggguggagggcuucaacugcuacuucccccugcaguccuacggguuccagccgaccaacggcgugggguaccagcccuaccggguggucgugcugagcuucgagcuccugcacgcccccgccacggugugcggccccaagggcggggguggaagcggcggggguggaagugacaucaucaagcuccugaacgagcaggucaacaaggagaugcaguccagcaaccuguacauguccaugagcuccuggugcuacacccacagccucgacggcgccgggcuguuccuguucgaccacgccgcggaggaguacgagcacgccaagaagcucaucaucuuccugaacgagaacaacgugcccgugcagcugaccuccaucagcgccccggagcacaaguucgagggccucacgcagaucuuccagaaggccuacgagcacgagcagcacaucuccgagagcaucaacaacaucguggaccacgccaucaaguccaaggaccacgcgaccuucaacuuccugcagugguacgucgccgagcagcacgaggaggaggugcuguucaaggacauccucgacaagaucgagcugaucgggaacgagaaccacggccuguaccucgccgaccaguacgugaaggggaucgccaagagccgcaaguccugaggacuagucccuguucccagagcccacuuuuuuuucuuuuuuugaaauaaaauagccugucuuucagaucucaaaggcucuuuucagagccaccaaaaaaaaaaaaaaaaaaaaaaaaaaaaaaaaaaaaaaaaaaaaaaaaaaaaaaaaaaaaaaaaaaaaaaaaaaaaaaaaaaaaaaaaaaaaaaaaaaaaa

SEQ ID NO: 22788 - RNA, 1022 nt, Artificial Sequence
  SARS-CoV-2/Wuhan/WIV05/2019__EPI_ISL_402128 spike protein mRNA gc (334-528) Foldon construct R9927
aggagagucccgcagucggcguccagcggcucugcuuguucgugugugugucguugcaggccuuauucaagcuuaccaugcccaugggcagccugcagccgcucgccacccuguaccugcucgggaugcugguggccuccguccuggcgaaccugugccccuucggcgagguguucaacgccacccgguucgccagcgucuacgccuggaaccgcaagcggaucuccaacugcguggcggacuacagcgugcuguacaacuccgccagcuucuccacguucaagugcuacggcgucagccccaccaagcucaacgaccugugcuucaccaacguguacgccgacuccuucgugauccgcggggacgagguccggcagaucgcccccggccagaccgggaagaucgccgacuacaacuacaagcugccggacgacuucacgggcugcgugaucgcguggaacagcaacaaccucgacuccaaggucgggggcaacuacaacuaccuguaccgccuguuccgcaagagcaaccucaagcccuucgagcgggacaucuccaccgagaucuaccaggccggcagcacccccugcaacgggguggagggcuucaacugcuacuucccccugcaguccuacggguuccagccgaccaacggcgugggguaccagcccuaccggguggucgugcugagcuucgagcuccugcacgcccccgccacggugugcggccccaagggcagcggcggguacauccccgaggccccgcgcgacggccaggccuacgugcggaaggacggcgaguggguccugcugagcaccuuccucugaggacuagucccuguucccagagcccacuuuuuuuucuuuuuuugaaauaaaauagccugucuuucagaucucaaaggcucuuuucagagccaccaaaaaaaaaaaaaaaaaaaaaaaaaaaaaaaaaaaaaaaaaaaaaaaaaaaaaaaaaaaaaaaaaaaaaaaaaaaaaaaaaaaaaaaaaaaaaaaaaaaaa

SEQ ID NO: 22789 - RNA, 1400 nt, Artificial Sequence
  SARS-CoV-2/Wuhan/WIV05/2019__EPI_ISL_402128 spike protein mRNA gc (1-15,334-528) LumSynth construct R10338
aggagagucccgcagucggcguccagcggcucugcuuguucgugugugugucguugcaggccuuauucaagcuuaccauguucguguuccugguccuccugccccuggugagcucccagugcaaccugugccccuucggcgagguguucaacgccacccgguucgccagcgucuacgccuggaaccgcaagcggaucuccaacugcguggcggacuacagcgugcuguacaacuccgccagcuucuccacguucaagugcuacggcgucagccccaccaagcucaacgaccugugcuucaccaacguguacgccgacuccuucgugauccgcggggacgagguccggcagaucgcccccggccagaccgggaagaucgccgacuacaacuacaagcugccggacgacuucacgggcugcgugaucgcguggaacagcaacaaccucgacuccaaggucgggggcaacuacaacuaccuguaccgccuguuccgcaagagcaaccucaagcccuucgagcgggacaucuccaccgagaucuaccaggccggcagcacccccugcaacgggguggagggcuucaacugcuacuucccccugcaguccuacggguuccagccgaccaacggcgugggguaccagcccuaccggguggucgugcugagcuucgagcuccugcacgcccccgccacggugugcggccccaagggcggcggcggcuccggaggcggagguagcgggggacagaucuacgagggcaagcugaccgccgaggggcuccgcuucggcaucguggccagccgguucaaccacgcgcuggucgaccgccugguggagggggccaucgacgccaucgugcggcacggcgggcgcgaggaggacaucacccucguccgggugcccggcuccugggagaucccgguggccgccggcgagcuggcccgcaaggaggacaucgacgcggucaucgccaucggggugcugauccggggcgccacgccccacuucgacuacaucgccagcgagguguccaaggggcucgcggaccugagccuggagcuccgcaagcccaucaccuucggcgucaucaccgccgacacccuggagcaggccaucgagcgggccgggacgaagcacggcaacaagggcugggaggccgcgcuguccgccaucgagauggccaaccucuucaagagccugcgcugaggacuagucccuguucccagagcccacuuuuuuuucuuuuuuugaaauaaaauagccugucuuucagaucucaaaggcucuuuucagagccaccaaaaaaaaaaaaaaaaaaaaaaaaaaaaaaaaaaaaaaaaaaaaaaaaaaaaaaaaaaaaaaaaaaaaaaaaaaaaaaaaaaaaaaaaaaaaaaaaaaaaa

SEQ ID NO: 22790 - RNA, 1361 nt, Artificial Sequence
  SARS-CoV-2/Wuhan/WIV05/2019__EPI_ISL_402128 spike protein mRNA gc (334-528) LumSynth construct R10339
aggagagucccgcagucggcguccagcggcucugcuuguucgugugugugucguugcaggccuuauucaagcuuaccaugcagaucuacgagggcaagcugaccgccgaggggcuccgcuucggcaucguggccagccgguucaaccacgcgcuggucgaccgccugguggagggggccaucgacgccaucgugcggcacggcgggcgcgaggaggacaucacccucguccgggugcccggcuccugggagaucccgguggccgccggcgagcuggcccgcaaggaggacaucgacgcggucaucgccaucggggugcugauccggggcgccacgccccacuucgacuacaucgccagcgagguguccaaggggcucgcggaccugagccuggagcuccgcaagcccaucaccuucggcgucaucaccgccgacacccuggagcaggccaucgagcgggccgggacgaagcacggcaacaagggcugggaggccgcgcuguccgccaucgagauggccaaccucuucaagagccugcgcggcgggggcgggagcggcgggggcggcuccgggggcgggaaccugugccccuucggcgagguguucaacgccacccgguucgccagcgucuacgccuggaaccgcaagcggaucuccaacugcguggcggacuacagcgugcuguacaacuccgccagcuucuccacguucaagugcuacggcgucagccccaccaagcucaacgaccugugcuucaccaacguguacgccgacuccuucgugauccgcggggacgagguccggcagaucgcccccggccagaccgggaagaucgccgacuacaacuacaagcugccggacgacuucacgggcugcgugaucgcguggaacagcaacaaccucgacuccaaggucgggggcaacuacaacuaccuguaccgccuguuccgcaagagcaaccucaagcccuucgagcgggacaucuccaccgagaucuaccaggccggcagcacccccugcaacgggguggagggcuucaacugcuacuucccccugcaguccuacggguuccagccgaccaacggcgugggguaccagcccuaccggguggucgugcugagcuucgagcuccugcacgcccccgccacggugugcggccccaagugaggacuagucccuguucccagagcccacuuuuuuuucuuuuuuugaaauaaaauagccugucuuucagaucucaaaggcucuuuucagagccaccaaaaaaaaaaaaaaaaaaaaaaaaaaaaaaaaaaaaaaaaaaaaaaaaaaaaaaaaaaaaaaaaaaaaaaaaaaaaaaaaaaaaaaaaaaaaaaaaaaaaa

SEQ ID NO: 22791 - RNA, 4094 nt, Artificial Sequence
  SARS-CoV-2/Wuhan/WIV05/2019__EPI_ISL_402128 spike protein mRNA gc (1-1273)(D614G) R10182
aggagagucccgcagucggcguccagcggcucugcuuguucgugugugugucguugcaggccuuauucaagcuuaccauguucguguuccugguccuccugccccuggugagcucccagugcgugaaccucaccacccgcacgcagcugccgcccgccuacaccaacagcuucacccggggcgucuacuaccccgacaagguguuccgcuccagcgugcugcacuccacccaggaccucuuccugcccuucuucagcaacgucacgugguuccacgccauccacguguccgggaccaacggcaccaagcgguucgacaacccggugcugcccuucaacgacggggucuacuucgcgagcaccgagaaguccaacaucauccgcggcuggaucuucgggacgacccucgacagcaagacccagucccugcugaucgugaacaacgccaccaacguggucaucaaggugugcgaguuccaguucugcaacgaccccuuccucggcguguacuaccacaagaacaacaagagcuggauggaguccgaguuccgggucuacagcuccgccaacaacugcacguucgaguacgugagccagcccuuccugauggaccuggagggcaagcaggggaacuucaagaaccuccgcgaguucguguucaagaacaucgacggcuacuucaagaucuacuccaagcacaccccgaucaaccugguccgggaccugccccagggguucagcgcccucgagccccugguggaccugcccaucggcaucaacaucacccgcuuccagacccuccuggcccugcaccgguccuaccucacgccgggggacagcagcuccggcuggaccgcgggcgccgccgccuacuacgugggguaccugcagccccgcaccuuccugcucaaguacaacgagaacggcaccaucacggacgcggucgacugcgcccuggacccccugagcgagaccaagugcacccucaaguccuucaccguggagaaggggaucuaccagacgagcaacuuccgggugcagcccaccgaguccaucguccgcuucccgaacaucaccaaccugugccccuucggcgagguguucaacgccacccgguucgccagcgucuacgccuggaaccgcaagcggaucuccaacugcguggcggacuacagcgugcuguacaacuccgccagcuucuccacguucaagugcuacggcgucagccccaccaagcucaacgaccugugcuucaccaacguguacgccgacuccuucgugauccgcggggacgagguccggcagaucgcccccggccagaccgggaagaucgccgacuacaacuacaagcugccggacgacuucacgggcugcgugaucgcguggaacagcaacaaccucgacuccaaggucgggggcaacuacaacuaccuguaccgccuguuccgcaagagcaaccucaagcccuucgagcgggacaucuccaccgagaucuaccaggccggcagcacccccugcaacgggguggagggcuucaacugcuacuucccccugcaguccuacggguuccagccgaccaacggcgugggguaccagcccuaccggguggucgugcugagcuucgagcuccugcacgcccccgccacggugugcggccccaagaaguccaccaaccuggucaagaacaagugcgugaacuucaacuucaacggccucaccgggaccggcgugcugaccgagagcaacaagaaguuccugccguuccagcaguucgggcgcgacaucgccgacacgaccgacgcgguccgcgacccccagacccuggagauccucgacaucacccccugcagcuucggcgggguguccgugaucacgccgggcaccaacaccagcaaccaggucgccgugcuguaccagggcgugaacugcaccgagguccccguggccauccacgccgaccagcugacgcccaccuggcggguguacuccaccggcagcaacgucuuccagacccgcgccgggugccucaucggcgcggagcacgugaacaacuccuacgagugcgacauccccaucggggccggcaucugcgccagcuaccagacgcagaccaacuccccgcggcgcgcccggagcguggcgucccagagcaucaucgccuacaccaugucccugggcgccgagaacagcgucgccuacuccaacaacagcaucgccauccccaccaacuucacgaucuccgugaccaccgagauccugcccgugagcaugaccaagacgagcgucgacugcaccauguacaucugcggggacuccaccgagugcagcaaccuccugcugcaguacggcuccuucugcacccagcucaaccgcgcgcugacggggaucgccguggagcaggacaagaacacccaggagguguucgcccaggucaagcagaucuacaagacgcccccgaucaaggacuucggcggguucaacuucagccagauccugcccgaccccuccaagcccagcaagcgguccuucaucgaggaccuccuguucaacaaggugacccuggccgacgccggcuucaucaagcaguacggcgacugccucggggacaucgcggcccgcgaccugaucugcgcccagaaguucaacggccugaccgugcucccgccccugcugaccgacgagaugaucgcccaguacaccagcgcccuccuggcggggaccaucacguccggcuggaccuucggggccggcgccgcccugcagauccccuucgcgaugcagauggccuaccgguucaacggcaucggggucacccagaacgugcucuacgagaaccagaagcugaucgccaaccaguucaacagcgccaucggcaagauccaggacucccugagcuccaccgccagcgcgcucgggaagcugcaggacguggucaaccagaacgcccaggcccugaacacgcucgugaagcagcuguccagcaacuucggcgccaucuccagcgugcugaacgacauccucucccgccuggacaaggucgaggccgaggugcagaucgaccggcugaucaccgggcgccuccagagccugcagaccuacgugacccagcagcugauccgggcggccgagauccgcgccagcgccaaccucgccgcgaccaagauguccgagugcguccugggccagagcaagcggguggacuucugcggcaagggguaccaccugauguccuucccccagagcgccccgcacggcguggucuuccuccacgugacguacguccccgcccaggagaagaacuucaccaccgcccccgcgaucugccacgacgggaaggcccacuucccccgcgagggcguguucguguccaacgggacccacugguucgucacgcagcggaacuucuacgagccgcagaucaucaccaccgacaacaccuucgugagcggcaacugcgacguggucaucggcaucgugaacaacacgguguacgacccccugcagcccgagcuggacuccuucaaggaggagcucgacaaguacuucaagaaccacaccagccccgacgucgaccugggggacaucuccggcaucaacgccagcguggugaacauccagaaggagaucgaccgccugaacgaggucgccaagaaccucaacgagucccugaucgaccugcaggagcucgggaaguacgagcaguacaucaaguggccgugguacaucuggcugggcuucaucgccggccugaucgcgaucgugauggugaccaucaugcucugcugcaugaccagcugcugcuccugccugaaggggugcugcagcugcggcuccugcugcaaguucgacgaggacgacagcgagcccguccugaagggggugaagcuccacuacacgugaggacuagucccuguucccagagcccacuuuuuuuucuuuuuuugaaauaaaauagccugucuuucagaucucaaaggcucuuuucagagccaccaaaaaaaaaaaaaaaaaaaaaaaaaaaaaaaaaaaaaaaaaaaaaaaaaaaaaaaaaaaaaaaaaaaaaaaaaaaaaaaaaaaaaaaaaaaaaaaaaaaaa

SEQ ID NO: 22792 - RNA, 4094 nt, Artificial Sequence
  SARS-CoV-2/Wuhan/WIV05/2019__EPI_ISL_402128 spike protein mRNA gc (1-1273)(K986P_V987P_ D614G) R10166
aggagagucccgcagucggcguccagcggcucugcuuguucgugugugugucguugcaggccuuauucaagcuuaccauguucguguuccugguccuccugccccuggugagcucccagugcgugaaccucaccacccgcacgcagcugccgcccgccuacaccaacagcuucacccggggcgucuacuaccccgacaagguguuccgcuccagcgugcugcacuccacccaggaccucuuccugcccuucuucagcaacgucacgugguuccacgccauccacguguccgggaccaacggcaccaagcgguucgacaacccggugcugcccuucaacgacggggucuacuucgcgagcaccgagaaguccaacaucauccgcggcuggaucuucgggacgacccucgacagcaagacccagucccugcugaucgugaacaacgccaccaacguggucaucaaggugugcgaguuccaguucugcaacgaccccuuccucggcguguacuaccacaagaacaacaagagcuggauggaguccgaguuccgggucuacagcuccgccaacaacugcacguucgaguacgugagccagcccuuccugauggaccuggagggcaagcaggggaacuucaagaaccuccgcgaguucguguucaagaacaucgacggcuacuucaagaucuacuccaagcacaccccgaucaaccugguccgggaccugccccagggguucagcgcccucgagccccugguggaccugcccaucggcaucaacaucacccgcuuccagacccuccuggcccugcaccgguccuaccucacgccgggggacagcagcuccggcuggaccgcgggcgccgccgccuacuacgugggguaccugcagccccgcaccuuccugcucaaguacaacgagaacggcaccaucacggacgcggucgacugcgcccuggacccccugagcgagaccaagugcacccucaaguccuucaccguggagaaggggaucuaccagacgagcaacuuccgggugcagcccaccgaguccaucguccgcuucccgaacaucaccaaccugugccccuucggcgagguguucaacgccacccgguucgccagcgucuacgccuggaaccgcaagcggaucuccaacugcguggcggacuacagcgugcuguacaacuccgccagcuucuccacguucaagugcuacggcgucagccccaccaagcucaacgaccugugcuucaccaacguguacgccgacuccuucgugauccgcggggacgagguccggcagaucgcccccggccagaccgggaagaucgccgacuacaacuacaagcugccggacgacuucacgggcugcgugaucgcguggaacagcaacaaccucgacuccaaggucgggggcaacuacaacuaccuguaccgccuguuccgcaagagcaaccucaagcccuucgagcgggacaucuccaccgagaucuaccaggccggcagcacccccugcaacgggguggagggcuucaacugcuacuucccccugcaguccuacggguuccagccgaccaacggcgugggguaccagcccuaccggguggucgugcugagcuucgagcuccugcacgcccccgccacggugugcggccccaagaaguccaccaaccuggucaagaacaagugcgugaacuucaacuucaacggccucaccgggaccggcgugcugaccgagagcaacaagaaguuccugccguuccagcaguucgggcgcgacaucgccgacacgaccgacgcgguccgcgacccccagacccuggagauccucgacaucacccccugcagcuucggcgggguguccgugaucacgccgggcaccaacaccagcaaccaggucgccgugcuguaccagggcgugaacugcaccgagguccccguggccauccacgccgaccagcugacgcccaccuggcggguguacuccaccggcagcaacgucuuccagacccgcgccgggugccucaucggcgcggagcacgugaacaacuccuacgagugcgacauccccaucggggccggcaucugcgccagcuaccagacgcagaccaacuccccgcggcgcgcccggagcguggcgucccagagcaucaucgccuacaccaugucccugggcgccgagaacagcgucgccuacuccaacaacagcaucgccauccccaccaacuucacgaucuccgugaccaccgagauccugcccgugagcaugaccaagacgagcgucgacugcaccauguacaucugcggggacuccaccgagugcagcaaccuccugcugcaguacggcuccuucugcacccagcucaaccgcgcgcugacggggaucgccguggagcaggacaagaacacccaggagguguucgcccaggucaagcagaucuacaagacgcccccgaucaaggacuucggcggguucaacuucagccagauccugcccgaccccuccaagcccagcaagcgguccuucaucgaggaccuccuguucaacaaggugacccuggccgacgccggcuucaucaagcaguacggcgacugccucggggacaucgcggcccgcgaccugaucugcgcccagaaguucaacggccugaccgugcucccgccccugcugaccgacgagaugaucgcccaguacaccagcgcccuccuggcggggaccaucacguccggcuggaccuucggggccggcgccgcccugcagauccccuucgcgaugcagauggccuaccgguucaacggcaucggggucacccagaacgugcucuacgagaaccagaagcugaucgccaaccaguucaacagcgccaucggcaagauccaggacucccugagcuccaccgccagcgcgcucgggaagcugcaggacguggucaaccagaacgcccaggcccugaacacgcucgugaagcagcuguccagcaacuucggcgccaucuccagcgugcugaacgacauccucucccgccuggacccgcccgaggccgaggugcagaucgaccggcugaucaccgggcgccuccagagccugcagaccuacgugacccagcagcugauccgggcggccgagauccgcgccagcgccaaccucgccgcgaccaagauguccgagugcguccugggccagagcaagcggguggacuucugcggcaagggguaccaccugauguccuucccccagagcgccccgcacggcguggucuuccuccacgugacguacguccccgcccaggagaagaacuucaccaccgcccccgcgaucugccacgacgggaaggcccacuucccccgcgagggcguguucguguccaacgggacccacugguucgucacgcagcggaacuucuacgagccgcagaucaucaccaccgacaacaccuucgugagcggcaacugcgacguggucaucggcaucgugaacaacacgguguacgacccccugcagcccgagcuggacuccuucaaggaggagcucgacaaguacuucaagaaccacaccagccccgacgucgaccugggggacaucuccggcaucaacgccagcguggugaacauccagaaggagaucgaccgccugaacgaggucgccaagaaccucaacgagucccugaucgaccugcaggagcucgggaaguacgagcaguacaucaaguggccgugguacaucuggcugggcuucaucgccggccugaucgcgaucgugauggugaccaucaugcucugcugcaugaccagcugcugcuccugccugaaggggugcugcagcugcggcuccugcugcaaguucgacgaggacgacagcgagcccguccugaagggggugaagcuccacuacacgugaggacuagucccuguucccagagcccacuuuuuuuucuuuuuuugaaauaaaauagccugucuuucagaucucaaaggcucuuuucagagccaccaaaaaaaaaaaaaaaaaaaaaaaaaaaaaaaaaaaaaaaaaaaaaaaaaaaaaaaaaaaaaaaaaaaaaaaaaaaaaaaaaaaaaaaaaaaaaaaaaaaaa

SEQ ID NO: 22793 - RNA, 4094 nt, Artificial Sequence
  SARS-CoV-2/Wuhan/WIV05/2019__EPI_ISL_402128 spike protein mRNA gc (1-1273)(A222V_D614G) R10278
aggagagucccgcagucggcguccagcggcucugcuuguucgugugugugucguugcaggccuuauucaagcuuaccauguucguguuccugguccuccugccccuggugagcucccagugcgugaaccucaccacccgcacgcagcugccgcccgccuacaccaacagcuucacccggggcgucuacuaccccgacaagguguuccgcuccagcgugcugcacuccacccaggaccucuuccugcccuucuucagcaacgucacgugguuccacgccauccacguguccgggaccaacggcaccaagcgguucgacaacccggugcugcccuucaacgacggggucuacuucgcgagcaccgagaaguccaacaucauccgcggcuggaucuucgggacgacccucgacagcaagacccagucccugcugaucgugaacaacgccaccaacguggucaucaaggugugcgaguuccaguucugcaacgaccccuuccucggcguguacuaccacaagaacaacaagagcuggauggaguccgaguuccgggucuacagcuccgccaacaacugcacguucgaguacgugagccagcccuuccugauggaccuggagggcaagcaggggaacuucaagaaccuccgcgaguucguguucaagaacaucgacggcuacuucaagaucuacuccaagcacaccccgaucaaccugguccgggaccugccccagggguucagcguccucgagccccugguggaccugcccaucggcaucaacaucacccgcuuccagacccuccuggcccugcaccgguccuaccucacgccgggggacagcagcuccggcuggaccgcgggcgccgccgccuacuacgugggguaccugcagccccgcaccuuccugcucaaguacaacgagaacggcaccaucacggacgcggucgacugcgcccuggacccccugagcgagaccaagugcacccucaaguccuucaccguggagaaggggaucuaccagacgagcaacuuccgggugcagcccaccgaguccaucguccgcuucccgaacaucaccaaccugugccccuucggcgagguguucaacgccacccgguucgccagcgucuacgccuggaaccgcaagcggaucuccaacugcguggcggacuacagcgugcuguacaacuccgccagcuucuccacguucaagugcuacggcgucagccccaccaagcucaacgaccugugcuucaccaacguguacgccgacuccuucgugauccgcggggacgagguccggcagaucgcccccggccagaccgggaagaucgccgacuacaacuacaagcugccggacgacuucacgggcugcgugaucgcguggaacagcaacaaccucgacuccaaggucgggggcaacuacaacuaccuguaccgccuguuccgcaagagcaaccucaagcccuucgagcgggacaucuccaccgagaucuaccaggccggcagcacccccugcaacgggguggagggcuucaacugcuacuucccccugcaguccuacggguuccagccgaccaacggcgugggguaccagcccuaccggguggucgugcugagcuucgagcuccugcacgcccccgccacggugugcggccccaagaaguccaccaaccuggucaagaacaagugcgugaacuucaacuucaacggccucaccgggaccggcgugcugaccgagagcaacaagaaguuccugccguuccagcaguucgggcgcgacaucgccgacacgaccgacgcgguccgcgacccccagacccuggagauccucgacaucacccccugcagcuucggcgggguguccgugaucacgccgggcaccaacaccagcaaccaggucgccgugcuguaccagggcgugaacugcaccgagguccccguggccauccacgccgaccagcugacgcccaccuggcggguguacuccaccggcagcaacgucuuccagacccgcgccgggugccucaucggcgcggagcacgugaacaacuccuacgagugcgacauccccaucggggccggcaucugcgccagcuaccagacgcagaccaacuccccgcggcgcgcccggagcguggcgucccagagcaucaucgccuacaccaugucccugggcgccgagaacagcgucgccuacuccaacaacagcaucgccauccccaccaacuucacgaucuccgugaccaccgagauccugcccgugagcaugaccaagacgagcgucgacugcaccauguacaucugcggggacuccaccgagugcagcaaccuccugcugcaguacggcuccuucugcacccagcucaaccgcgcgcugacggggaucgccguggagcaggacaagaacacccaggagguguucgcccaggucaagcagaucuacaagacgcccccgaucaaggacuucggcggguucaacuucagccagauccugcccgaccccuccaagcccagcaagcgguccuucaucgaggaccuccuguucaacaaggugacccuggccgacgccggcuucaucaagcaguacggcgacugccucggggacaucgcggcccgcgaccugaucugcgcccagaaguucaacggccugaccgugcucccgccccugcugaccgacgagaugaucgcccaguacaccagcgcccuccuggcggggaccaucacguccggcuggaccuucggggccggcgccgcccugcagauccccuucgcgaugcagauggccuaccgguucaacggcaucggggucacccagaacgugcucuacgagaaccagaagcugaucgccaaccaguucaacagcgccaucggcaagauccaggacucccugagcuccaccgccagcgcgcucgggaagcugcaggacguggucaaccagaacgcccaggcccugaacacgcucgugaagcagcuguccagcaacuucggcgccaucuccagcgugcugaacgacauccucucccgccuggacaaggucgaggccgaggugcagaucgaccggcugaucaccgggcgccuccagagccugcagaccuacgugacccagcagcugauccgggcggccgagauccgcgccagcgccaaccucgccgcgaccaagauguccgagugcguccugggccagagcaagcggguggacuucugcggcaagggguaccaccugauguccuucccccagagcgccccgcacggcguggucuuccuccacgugacguacguccccgcccaggagaagaacuucaccaccgcccccgcgaucugccacgacgggaaggcccacuucccccgcgagggcguguucguguccaacgggacccacugguucgucacgcagcggaacuucuacgagccgcagaucaucaccaccgacaacaccuucgugagcggcaacugcgacguggucaucggcaucgugaacaacacgguguacgacccccugcagcccgagcuggacuccuucaaggaggagcucgacaaguacuucaagaaccacaccagccccgacgucgaccugggggacaucuccggcaucaacgccagcguggugaacauccagaaggagaucgaccgccugaacgaggucgccaagaaccucaacgagucccugaucgaccugcaggagcucgggaaguacgagcaguacaucaaguggccgugguacaucuggcugggcuucaucgccggccugaucgcgaucgugauggugaccaucaugcucugcugcaugaccagcugcugcuccugccugaaggggugcugcagcugcggcuccugcugcaaguucgacgaggacgacagcgagcccguccugaagggggugaagcuccacuacacgugaggacuagucccuguucccagagcccacuuuuuuuucuuuuuuugaaauaaaauagccugucuuucagaucucaaaggcucuuuucagagccaccaaaaaaaaaaaaaaaaaaaaaaaaaaaaaaaaaaaaaaaaaaaaaaaaaaaaaaaaaaaaaaaaaaaaaaaaaaaaaaaaaaaaaaaaaaaaaaaaaaaaa

SEQ ID NO: 22794 - RNA, 4094 nt, Artificial Sequence
  SARS-CoV-2/Wuhan/WIV05/2019__EPI_ISL_402128 spike protein mRNA gc (1-1273)(K986P_V987P_A222V_D614G) R10279
aggagagucccgcagucggcguccagcggcucugcuuguucgugugugugucguugcaggccuuauucaagcuuaccauguucguguuccugguccuccugccccuggugagcucccagugcgugaaccucaccacccgcacgcagcugccgcccgccuacaccaacagcuucacccggggcgucuacuaccccgacaagguguuccgcuccagcgugcugcacuccacccaggaccucuuccugcccuucuucagcaacgucacgugguuccacgccauccacguguccgggaccaacggcaccaagcgguucgacaacccggugcugcccuucaacgacggggucuacuucgcgagcaccgagaaguccaacaucauccgcggcuggaucuucgggacgacccucgacagcaagacccagucccugcugaucgugaacaacgccaccaacguggucaucaaggugugcgaguuccaguucugcaacgaccccuuccucggcguguacuaccacaagaacaacaagagcuggauggaguccgaguuccgggucuacagcuccgccaacaacugcacguucgaguacgugagccagcccuuccugauggaccuggagggcaagcaggggaacuucaagaaccuccgcgaguucguguucaagaacaucgacggcuacuucaagaucuacuccaagcacaccccgaucaaccugguccgggaccugccccagggguucagcguccucgagccccugguggaccugcccaucggcaucaacaucacccgcuuccagacccuccuggcccugcaccgguccuaccucacgccgggggacagcagcuccggcuggaccgcgggcgccgccgccuacuacgugggguaccugcagccccgcaccuuccugcucaaguacaacgagaacggcaccaucacggacgcggucgacugcgcccuggacccccugagcgagaccaagugcacccucaaguccuucaccguggagaaggggaucuaccagacgagcaacuuccgggugcagcccaccgaguccaucguccgcuucccgaacaucaccaaccugugccccuucggcgagguguucaacgccacccgguucgccagcgucuacgccuggaaccgcaagcggaucuccaacugcguggcggacuacagcgugcuguacaacuccgccagcuucuccacguucaagugcuacggcgucagccccaccaagcucaacgaccugugcuucaccaacguguacgccgacuccuucgugauccgcggggacgagguccggcagaucgcccccggccagaccgggaagaucgccgacuacaacuacaagcugccggacgacuucacgggcugcgugaucgcguggaacagcaacaaccucgacuccaaggucgggggcaacuacaacuaccuguaccgccuguuccgcaagagcaaccucaagcccuucgagcgggacaucuccaccgagaucuaccaggccggcagcacccccugcaacgggguggagggcuucaacugcuacuucccccugcaguccuacggguuccagccgaccaacggcgugggguaccagcccuaccggguggucgugcugagcuucgagcuccugcacgcccccgccacggugugcggccccaagaaguccaccaaccuggucaagaacaagugcgugaacuucaacuucaacggccucaccgggaccggcgugcugaccgagagcaacaagaaguuccugccguuccagcaguucgggcgcgacaucgccgacacgaccgacgcgguccgcgacccccagacccuggagauccucgacaucacccccugcagcuucggcgggguguccgugaucacgccgggcaccaacaccagcaaccaggucgccgugcuguaccagggcgugaacugcaccgagguccccguggccauccacgccgaccagcugacgcccaccuggcggguguacuccaccggcagcaacgucuuccagacccgcgccgggugccucaucggcgcggagcacgugaacaacuccuacgagugcgacauccccaucggggccggcaucugcgccagcuaccagacgcagaccaacuccccgcggcgcgcccggagcguggcgucccagagcaucaucgccuacaccaugucccugggcgccgagaacagcgucgccuacuccaacaacagcaucgccauccccaccaacuucacgaucuccgugaccaccgagauccugcccgugagcaugaccaagacgagcgucgacugcaccauguacaucugcggggacuccaccgagugcagcaaccuccugcugcaguacggcuccuucugcacccagcucaaccgcgcgcugacggggaucgccguggagcaggacaagaacacccaggagguguucgcccaggucaagcagaucuacaagacgcccccgaucaaggacuucggcggguucaacuucagccagauccugcccgaccccuccaagcccagcaagcgguccuucaucgaggaccuccuguucaacaaggugacccuggccgacgccggcuucaucaagcaguacggcgacugccucggggacaucgcggcccgcgaccugaucugcgcccagaaguucaacggccugaccgugcucccgccccugcugaccgacgagaugaucgcccaguacaccagcgcccuccuggcggggaccaucacguccggcuggaccuucggggccggcgccgcccugcagauccccuucgcgaugcagauggccuaccgguucaacggcaucggggucacccagaacgugcucuacgagaaccagaagcugaucgccaaccaguucaacagcgccaucggcaagauccaggacucccugagcuccaccgccagcgcgcucgggaagcugcaggacguggucaaccagaacgcccaggcccugaacacgcucgugaagcagcuguccagcaacuucggcgccaucuccagcgugcugaacgacauccucucccgccuggacccgcccgaggccgaggugcagaucgaccggcugaucaccgggcgccuccagagccugcagaccuacgugacccagcagcugauccgggcggccgagauccgcgccagcgccaaccucgccgcgaccaagauguccgagugcguccugggccagagcaagcggguggacuucugcggcaagggguaccaccugauguccuucccccagagcgccccgcacggcguggucuuccuccacgugacguacguccccgcccaggagaagaacuucaccaccgcccccgcgaucugccacgacgggaaggcccacuucccccgcgagggcguguucguguccaacgggacccacugguucgucacgcagcggaacuucuacgagccgcagaucaucaccaccgacaacaccuucgugagcggcaacugcgacguggucaucggcaucgugaacaacacgguguacgacccccugcagcccgagcuggacuccuucaaggaggagcucgacaaguacuucaagaaccacaccagccccgacgucgaccugggggacaucuccggcaucaacgccagcguggugaacauccagaaggagaucgaccgccugaacgaggucgccaagaaccucaacgagucccugaucgaccugcaggagcucgggaaguacgagcaguacaucaaguggccgugguacaucuggcugggcuucaucgccggccugaucgcgaucgugauggugaccaucaugcucugcugcaugaccagcugcugcuccugccugaaggggugcugcagcugcggcuccugcugcaaguucgacgaggacgacagcgagcccguccugaagggggugaagcuccacuacacgugaggacuagucccuguucccagagcccacuuuuuuuucuuuuuuugaaauaaaauagccugucuuucagaucucaaaggcucuuuucagagccaccaaaaaaaaaaaaaaaaaaaaaaaaaaaaaaaaaaaaaaaaaaaaaaaaaaaaaaaaaaaaaaaaaaaaaaaaaaaaaaaaaaaaaaaaaaaaaaaaaaaaa

SEQ ID NO: 22795 - RNA, 4094 nt, Artificial Sequence
  SARS-CoV-2/Wuhan/WIV05/2019__EPI_ISL_402128 spike protein mRNA gc (1-1273)(N439K_D614G) R10298
aggagagucccgcagucggcguccagcggcucugcuuguucgugugugugucguugcaggccuuauucaagcuuaccauguucguguuccugguccuccugccccuggugagcucccagugcgugaaccucaccacccgcacgcagcugccgcccgccuacaccaacagcuucacccggggcgucuacuaccccgacaagguguuccgcuccagcgugcugcacuccacccaggaccucuuccugcccuucuucagcaacgucacgugguuccacgccauccacguguccgggaccaacggcaccaagcgguucgacaacccggugcugcccuucaacgacggggucuacuucgcgagcaccgagaaguccaacaucauccgcggcuggaucuucgggacgacccucgacagcaagacccagucccugcugaucgugaacaacgccaccaacguggucaucaaggugugcgaguuccaguucugcaacgaccccuuccucggcguguacuaccacaagaacaacaagagcuggauggaguccgaguuccgggucuacagcuccgccaacaacugcacguucgaguacgugagccagcccuuccugauggaccuggagggcaagcaggggaacuucaagaaccuccgcgaguucguguucaagaacaucgacggcuacuucaagaucuacuccaagcacaccccgaucaaccugguccgggaccugccccagggguucagcgcccucgagccccugguggaccugcccaucggcaucaacaucacccgcuuccagacccuccuggcccugcaccgguccuaccucacgccgggggacagcagcuccggcuggaccgcgggcgccgccgccuacuacgugggguaccugcagccccgcaccuuccugcucaaguacaacgagaacggcaccaucacggacgcggucgacugcgcccuggacccccugagcgagaccaagugcacccucaaguccuucaccguggagaaggggaucuaccagacgagcaacuuccgggugcagcccaccgaguccaucguccgcuucccgaacaucaccaaccugugccccuucggcgagguguucaacgccacccgguucgccagcgucuacgccuggaaccgcaagcggaucuccaacugcguggcggacuacagcgugcuguacaacuccgccagcuucuccacguucaagugcuacggcgucagccccaccaagcucaacgaccugugcuucaccaacguguacgccgacuccuucgugauccgcggggacgagguccggcagaucgcccccggccagaccgggaagaucgccgacuacaacuacaagcugccggacgacuucacgggcugcgugaucgcguggaacagcaagaaccucgacuccaaggucgggggcaacuacaacuaccuguaccgccuguuccgcaagagcaaccucaagcccuucgagcgggacaucuccaccgagaucuaccaggccggcagcacccccugcaacgggguggagggcuucaacugcuacuucccccugcaguccuacggguuccagccgaccaacggcgugggguaccagcccuaccggguggucgugcugagcuucgagcuccugcacgcccccgccacggugugcggccccaagaaguccaccaaccuggucaagaacaagugcgugaacuucaacuucaacggccucaccgggaccggcgugcugaccgagagcaacaagaaguuccugccguuccagcaguucgggcgcgacaucgccgacacgaccgacgcgguccgcgacccccagacccuggagauccucgacaucacccccugcagcuucggcgggguguccgugaucacgccgggcaccaacaccagcaaccaggucgccgugcuguaccagggcgugaacugcaccgagguccccguggccauccacgccgaccagcugacgcccaccuggcggguguacuccaccggcagcaacgucuuccagacccgcgccgggugccucaucggcgcggagcacgugaacaacuccuacgagugcgacauccccaucggggccggcaucugcgccagcuaccagacgcagaccaacuccccgcggcgcgcccggagcguggcgucccagagcaucaucgccuacaccaugucccugggcgccgagaacagcgucgccuacuccaacaacagcaucgccauccccaccaacuucacgaucuccgugaccaccgagauccugcccgugagcaugaccaagacgagcgucgacugcaccauguacaucugcggggacuccaccgagugcagcaaccuccugcugcaguacggcuccuucugcacccagcucaaccgcgcgcugacggggaucgccguggagcaggacaagaacacccaggagguguucgcccaggucaagcagaucuacaagacgcccccgaucaaggacuucggcggguucaacuucagccagauccugcccgaccccuccaagcccagcaagcgguccuucaucgaggaccuccuguucaacaaggugacccuggccgacgccggcuucaucaagcaguacggcgacugccucggggacaucgcggcccgcgaccugaucugcgcccagaaguucaacggccugaccgugcucccgccccugcugaccgacgagaugaucgcccaguacaccagcgcccuccuggcggggaccaucacguccggcuggaccuucggggccggcgccgcccugcagauccccuucgcgaugcagauggccuaccgguucaacggcaucggggucacccagaacgugcucuacgagaaccagaagcugaucgccaaccaguucaacagcgccaucggcaagauccaggacucccugagcuccaccgccagcgcgcucgggaagcugcaggacguggucaaccagaacgcccaggcccugaacacgcucgugaagcagcuguccagcaacuucggcgccaucuccagcgugcugaacgacauccucucccgccuggacaaggucgaggccgaggugcagaucgaccggcugaucaccgggcgccuccagagccugcagaccuacgugacccagcagcugauccgggcggccgagauccgcgccagcgccaaccucgccgcgaccaagauguccgagugcguccugggccagagcaagcggguggacuucugcggcaagggguaccaccugauguccuucccccagagcgccccgcacggcguggucuuccuccacgugacguacguccccgcccaggagaagaacuucaccaccgcccccgcgaucugccacgacgggaaggcccacuucccccgcgagggcguguucguguccaacgggacccacugguucgucacgcagcggaacuucuacgagccgcagaucaucaccaccgacaacaccuucgugagcggcaacugcgacguggucaucggcaucgugaacaacacgguguacgacccccugcagcccgagcuggacuccuucaaggaggagcucgacaaguacuucaagaaccacaccagccccgacgucgaccugggggacaucuccggcaucaacgccagcguggugaacauccagaaggagaucgaccgccugaacgaggucgccaagaaccucaacgagucccugaucgaccugcaggagcucgggaaguacgagcaguacaucaaguggccgugguacaucuggcugggcuucaucgccggccugaucgcgaucgugauggugaccaucaugcucugcugcaugaccagcugcugcuccugccugaaggggugcugcagcugcggcuccugcugcaaguucgacgaggacgacagcgagcccguccugaagggggugaagcuccacuacacgugaggacuagucccuguucccagagcccacuuuuuuuucuuuuuuugaaauaaaauagccugucuuucagaucucaaaggcucuuuucagagccaccaaaaaaaaaaaaaaaaaaaaaaaaaaaaaaaaaaaaaaaaaaaaaaaaaaaaaaaaaaaaaaaaaaaaaaaaaaaaaaaaaaaaaaaaaaaaaaaaaaaaa

SEQ ID NO: 22796 - RNA, 4094 nt, Artificial Sequence
  SARS-CoV-2/Wuhan/WIV05/2019__EPI_ISL_402128 spike protein mRNA gc (1-1273)(K986P_V987P_N439K_D614G) R10299
aggagagucccgcagucggcguccagcggcucugcuuguucgugugugugucguugcaggccuuauucaagcuuaccauguucguguuccugguccuccugccccuggugagcucccagugcgugaaccucaccacccgcacgcagcugccgcccgccuacaccaacagcuucacccggggcgucuacuaccccgacaagguguuccgcuccagcgugcugcacuccacccaggaccucuuccugcccuucuucagcaacgucacgugguuccacgccauccacguguccgggaccaacggcaccaagcgguucgacaacccggugcugcccuucaacgacggggucuacuucgcgagcaccgagaaguccaacaucauccgcggcuggaucuucgggacgacccucgacagcaagacccagucccugcugaucgugaacaacgccaccaacguggucaucaaggugugcgaguuccaguucugcaacgaccccuuccucggcguguacuaccacaagaacaacaagagcuggauggaguccgaguuccgggucuacagcuccgccaacaacugcacguucgaguacgugagccagcccuuccugauggaccuggagggcaagcaggggaacuucaagaaccuccgcgaguucguguucaagaacaucgacggcuacuucaagaucuacuccaagcacaccccgaucaaccugguccgggaccugccccagggguucagcgcccucgagccccugguggaccugcccaucggcaucaacaucacccgcuuccagacccuccuggcccugcaccgguccuaccucacgccgggggacagcagcuccggcuggaccgcgggcgccgccgccuacuacgugggguaccugcagccccgcaccuuccugcucaaguacaacgagaacggcaccaucacggacgcggucgacugcgcccuggacccccugagcgagaccaagugcacccucaaguccuucaccguggagaaggggaucuaccagacgagcaacuuccgggugcagcccaccgaguccaucguccgcuucccgaacaucaccaaccugugccccuucggcgagguguucaacgccacccgguucgccagcgucuacgccuggaaccgcaagcggaucuccaacugcguggcggacuacagcgugcuguacaacuccgccagcuucuccacguucaagugcuacggcgucagccccaccaagcucaacgaccugugcuucaccaacguguacgccgacuccuucgugauccgcggggacgagguccggcagaucgcccccggccagaccgggaagaucgccgacuacaacuacaagcugccggacgacuucacgggcugcgugaucgcguggaacagcaagaaccucgacuccaaggucgggggcaacuacaacuaccuguaccgccuguuccgcaagagcaaccucaagcccuucgagcgggacaucuccaccgagaucuaccaggccggcagcacccccugcaacgggguggagggcuucaacugcuacuucccccugcaguccuacggguuccagccgaccaacggcgugggguaccagcccuaccggguggucgugcugagcuucgagcuccugcacgcccccgccacggugugcggccccaagaaguccaccaaccuggucaagaacaagugcgugaacuucaacuucaacggccucaccgggaccggcgugcugaccgagagcaacaagaaguuccugccguuccagcaguucgggcgcgacaucgccgacacgaccgacgcgguccgcgacccccagacccuggagauccucgacaucacccccugcagcuucggcgggguguccgugaucacgccgggcaccaacaccagcaaccaggucgccgugcuguaccagggcgugaacugcaccgagguccccguggccauccacgccgaccagcugacgcccaccuggcggguguacuccaccggcagcaacgucuuccagacccgcgccgggugccucaucggcgcggagcacgugaacaacuccuacgagugcgacauccccaucggggccggcaucugcgccagcuaccagacgcagaccaacuccccgcggcgcgcccggagcguggcgucccagagcaucaucgccuacaccaugucccugggcgccgagaacagcgucgccuacuccaacaacagcaucgccauccccaccaacuucacgaucuccgugaccaccgagauccugcccgugagcaugaccaagacgagcgucgacugcaccauguacaucugcggggacuccaccgagugcagcaaccuccugcugcaguacggcuccuucugcacccagcucaaccgcgcgcugacggggaucgccguggagcaggacaagaacacccaggagguguucgcccaggucaagcagaucuacaagacgcccccgaucaaggacuucggcggguucaacuucagccagauccugcccgaccccuccaagcccagcaagcgguccuucaucgaggaccuccuguucaacaaggugacccuggccgacgccggcuucaucaagcaguacggcgacugccucggggacaucgcggcccgcgaccugaucugcgcccagaaguucaacggccugaccgugcucccgccccugcugaccgacgagaugaucgcccaguacaccagcgcccuccuggcggggaccaucacguccggcuggaccuucggggccggcgccgcccugcagauccccuucgcgaugcagauggccuaccgguucaacggcaucggggucacccagaacgugcucuacgagaaccagaagcugaucgccaaccaguucaacagcgccaucggcaagauccaggacucccugagcuccaccgccagcgcgcucgggaagcugcaggacguggucaaccagaacgcccaggcccugaacacgcucgugaagcagcuguccagcaacuucggcgccaucuccagcgugcugaacgacauccucucccgccuggacccgcccgaggccgaggugcagaucgaccggcugaucaccgggcgccuccagagccugcagaccuacgugacccagcagcugauccgggcggccgagauccgcgccagcgccaaccucgccgcgaccaagauguccgagugcguccugggccagagcaagcggguggacuucugcggcaagggguaccaccugauguccuucccccagagcgccccgcacggcguggucuuccuccacgugacguacguccccgcccaggagaagaacuucaccaccgcccccgcgaucugccacgacgggaaggcccacuucccccgcgagggcguguucguguccaacgggacccacugguucgucacgcagcggaacuucuacgagccgcagaucaucaccaccgacaacaccuucgugagcggcaacugcgacguggucaucggcaucgugaacaacacgguguacgacccccugcagcccgagcuggacuccuucaaggaggagcucgacaaguacuucaagaaccacaccagccccgacgucgaccugggggacaucuccggcaucaacgccagcguggugaacauccagaaggagaucgaccgccugaacgaggucgccaagaaccucaacgagucccugaucgaccugcaggagcucgggaaguacgagcaguacaucaaguggccgugguacaucuggcugggcuucaucgccggccugaucgcgaucgugauggugaccaucaugcucugcugcaugaccagcugcugcuccugccugaaggggugcugcagcugcggcuccugcugcaaguucgacgaggacgacagcgagcccguccugaagggggugaagcuccacuacacgugaggacuagucccuguucccagagcccacuuuuuuuucuuuuuuugaaauaaaauagccugucuuucagaucucaaaggcucuuuucagagccaccaaaaaaaaaaaaaaaaaaaaaaaaaaaaaaaaaaaaaaaaaaaaaaaaaaaaaaaaaaaaaaaaaaaaaaaaaaaaaaaaaaaaaaaaaaaaaaaaaaaaa

SEQ ID NO: 22797 - RNA, 4094 nt, Artificial Sequence
  SARS-CoV-2/Wuhan/WIV05/2019__EPI_ISL_402128 spike protein mRNA gc (1-1273)(S477N_D614G) R10287
aggagagucccgcagucggcguccagcggcucugcuuguucgugugugugucguugcaggccuuauucaagcuuaccauguucguguuccugguccuccugccccuggugagcucccagugcgugaaccucaccacccgcacgcagcugccgcccgccuacaccaacagcuucacccggggcgucuacuaccccgacaagguguuccgcuccagcgugcugcacuccacccaggaccucuuccugcccuucuucagcaacgucacgugguuccacgccauccacguguccgggaccaacggcaccaagcgguucgacaacccggugcugcccuucaacgacggggucuacuucgcgagcaccgagaaguccaacaucauccgcggcuggaucuucgggacgacccucgacagcaagacccagucccugcugaucgugaacaacgccaccaacguggucaucaaggugugcgaguuccaguucugcaacgaccccuuccucggcguguacuaccacaagaacaacaagagcuggauggaguccgaguuccgggucuacagcuccgccaacaacugcacguucgaguacgugagccagcccuuccugauggaccuggagggcaagcaggggaacuucaagaaccuccgcgaguucguguucaagaacaucgacggcuacuucaagaucuacuccaagcacaccccgaucaaccugguccgggaccugccccagggguucagcgcccucgagccccugguggaccugcccaucggcaucaacaucacccgcuuccagacccuccuggcccugcaccgguccuaccucacgccgggggacagcagcuccggcuggaccgcgggcgccgccgccuacuacgugggguaccugcagccccgcaccuuccugcucaaguacaacgagaacggcaccaucacggacgcggucgacugcgcccuggacccccugagcgagaccaagugcacccucaaguccuucaccguggagaaggggaucuaccagacgagcaacuuccgggugcagcccaccgaguccaucguccgcuucccgaacaucaccaaccugugccccuucggcgagguguucaacgccacccgguucgccagcgucuacgccuggaaccgcaagcggaucuccaacugcguggcggacuacagcgugcuguacaacuccgccagcuucuccacguucaagugcuacggcgucagccccaccaagcucaacgaccugugcuucaccaacguguacgccgacuccuucgugauccgcggggacgagguccggcagaucgcccccggccagaccgggaagaucgccgacuacaacuacaagcugccggacgacuucacgggcugcgugaucgcguggaacagcaacaaccucgacuccaaggucgggggcaacuacaacuaccuguaccgccuguuccgcaagagcaaccucaagcccuucgagcgggacaucuccaccgagaucuaccaggccggcaacacccccugcaacgggguggagggcuucaacugcuacuucccccugcaguccuacggguuccagccgaccaacggcgugggguaccagcccuaccggguggucgugcugagcuucgagcuccugcacgcccccgccacggugugcggccccaagaaguccaccaaccuggucaagaacaagugcgugaacuucaacuucaacggccucaccgggaccggcgugcugaccgagagcaacaagaaguuccugccguuccagcaguucgggcgcgacaucgccgacacgaccgacgcgguccgcgacccccagacccuggagauccucgacaucacccccugcagcuucggcgggguguccgugaucacgccgggcaccaacaccagcaaccaggucgccgugcuguaccagggcgugaacugcaccgagguccccguggccauccacgccgaccagcugacgcccaccuggcggguguacuccaccggcagcaacgucuuccagacccgcgccgggugccucaucggcgcggagcacgugaacaacuccuacgagugcgacauccccaucggggccggcaucugcgccagcuaccagacgcagaccaacuccccgcggcgcgcccggagcguggcgucccagagcaucaucgccuacaccaugucccugggcgccgagaacagcgucgccuacuccaacaacagcaucgccauccccaccaacuucacgaucuccgugaccaccgagauccugcccgugagcaugaccaagacgagcgucgacugcaccauguacaucugcggggacuccaccgagugcagcaaccuccugcugcaguacggcuccuucugcacccagcucaaccgcgcgcugacggggaucgccguggagcaggacaagaacacccaggagguguucgcccaggucaagcagaucuacaagacgcccccgaucaaggacuucggcggguucaacuucagccagauccugcccgaccccuccaagcccagcaagcgguccuucaucgaggaccuccuguucaacaaggugacccuggccgacgccggcuucaucaagcaguacggcgacugccucggggacaucgcggcccgcgaccugaucugcgcccagaaguucaacggccugaccgugcucccgccccugcugaccgacgagaugaucgcccaguacaccagcgcccuccuggcggggaccaucacguccggcuggaccuucggggccggcgccgcccugcagauccccuucgcgaugcagauggccuaccgguucaacggcaucggggucacccagaacgugcucuacgagaaccagaagcugaucgccaaccaguucaacagcgccaucggcaagauccaggacucccugagcuccaccgccagcgcgcucgggaagcugcaggacguggucaaccagaacgcccaggcccugaacacgcucgugaagcagcuguccagcaacuucggcgccaucuccagcgugcugaacgacauccucucccgccuggacaaggucgaggccgaggugcagaucgaccggcugaucaccgggcgccuccagagccugcagaccuacgugacccagcagcugauccgggcggccgagauccgcgccagcgccaaccucgccgcgaccaagauguccgagugcguccugggccagagcaagcggguggacuucugcggcaagggguaccaccugauguccuucccccagagcgccccgcacggcguggucuuccuccacgugacguacguccccgcccaggagaagaacuucaccaccgcccccgcgaucugccacgacgggaaggcccacuucccccgcgagggcguguucguguccaacgggacccacugguucgucacgcagcggaacuucuacgagccgcagaucaucaccaccgacaacaccuucgugagcggcaacugcgacguggucaucggcaucgugaacaacacgguguacgacccccugcagcccgagcuggacuccuucaaggaggagcucgacaaguacuucaagaaccacaccagccccgacgucgaccugggggacaucuccggcaucaacgccagcguggugaacauccagaaggagaucgaccgccugaacgaggucgccaagaaccucaacgagucccugaucgaccugcaggagcucgggaaguacgagcaguacaucaaguggccgugguacaucuggcugggcuucaucgccggccugaucgcgaucgugauggugaccaucaugcucugcugcaugaccagcugcugcuccugccugaaggggugcugcagcugcggcuccugcugcaaguucgacgaggacgacagcgagcccguccugaagggggugaagcuccacuacacgugaggacuagucccuguucccagagcccacuuuuuuuucuuuuuuugaaauaaaauagccugucuuucagaucucaaaggcucuuuucagagccaccaaaaaaaaaaaaaaaaaaaaaaaaaaaaaaaaaaaaaaaaaaaaaaaaaaaaaaaaaaaaaaaaaaaaaaaaaaaaaaaaaaaaaaaaaaaaaaaaaaaaa

SEQ ID NO: 22798 - RNA, 4094 nt, Artificial Sequence
  SARS-CoV-2/Wuhan/WIV05/2019__EPI_ISL_402128 spike protein mRNA gc (1-1273)(K986P_V987P_S477N_D614G) R10286
aggagagucccgcagucggcguccagcggcucugcuuguucgugugugugucguugcaggccuuauucaagcuuaccauguucguguuccugguccuccugccccuggugagcucccagugcgugaaccucaccacccgcacgcagcugccgcccgccuacaccaacagcuucacccggggcgucuacuaccccgacaagguguuccgcuccagcgugcugcacuccacccaggaccucuuccugcccuucuucagcaacgucacgugguuccacgccauccacguguccgggaccaacggcaccaagcgguucgacaacccggugcugcccuucaacgacggggucuacuucgcgagcaccgagaaguccaacaucauccgcggcuggaucuucgggacgacccucgacagcaagacccagucccugcugaucgugaacaacgccaccaacguggucaucaaggugugcgaguuccaguucugcaacgaccccuuccucggcguguacuaccacaagaacaacaagagcuggauggaguccgaguuccgggucuacagcuccgccaacaacugcacguucgaguacgugagccagcccuuccugauggaccuggagggcaagcaggggaacuucaagaaccuccgcgaguucguguucaagaacaucgacggcuacuucaagaucuacuccaagcacaccccgaucaaccugguccgggaccugccccagggguucagcgcccucgagccccugguggaccugcccaucggcaucaacaucacccgcuuccagacccuccuggcccugcaccgguccuaccucacgccgggggacagcagcuccggcuggaccgcgggcgccgccgccuacuacgugggguaccugcagccccgcaccuuccugcucaaguacaacgagaacggcaccaucacggacgcggucgacugcgcccuggacccccugagcgagaccaagugcacccucaaguccuucaccguggagaaggggaucuaccagacgagcaacuuccgggugcagcccaccgaguccaucguccgcuucccgaacaucaccaaccugugccccuucggcgagguguucaacgccacccgguucgccagcgucuacgccuggaaccgcaagcggaucuccaacugcguggcggacuacagcgugcuguacaacuccgccagcuucuccacguucaagugcuacggcgucagccccaccaagcucaacgaccugugcuucaccaacguguacgccgacuccuucgugauccgcggggacgagguccggcagaucgcccccggccagaccgggaagaucgccgacuacaacuacaagcugccggacgacuucacgggcugcgugaucgcguggaacagcaacaaccucgacuccaaggucgggggcaacuacaacuaccuguaccgccuguuccgcaagagcaaccucaagcccuucgagcgggacaucuccaccgagaucuaccaggccggcaacacccccugcaacgggguggagggcuucaacugcuacuucccccugcaguccuacggguuccagccgaccaacggcgugggguaccagcccuaccggguggucgugcugagcuucgagcuccugcacgcccccgccacggugugcggccccaagaaguccaccaaccuggucaagaacaagugcgugaacuucaacuucaacggccucaccgggaccggcgugcugaccgagagcaacaagaaguuccugccguuccagcaguucgggcgcgacaucgccgacacgaccgacgcgguccgcgacccccagacccuggagauccucgacaucacccccugcagcuucggcgggguguccgugaucacgccgggcaccaacaccagcaaccaggucgccgugcuguaccagggcgugaacugcaccgagguccccguggccauccacgccgaccagcugacgcccaccuggcggguguacuccaccggcagcaacgucuuccagacccgcgccgggugccucaucggcgcggagcacgugaacaacuccuacgagugcgacauccccaucggggccggcaucugcgccagcuaccagacgcagaccaacuccccgcggcgcgcccggagcguggcgucccagagcaucaucgccuacaccaugucccugggcgccgagaacagcgucgccuacuccaacaacagcaucgccauccccaccaacuucacgaucuccgugaccaccgagauccugcccgugagcaugaccaagacgagcgucgacugcaccauguacaucugcggggacuccaccgagugcagcaaccuccugcugcaguacggcuccuucugcacccagcucaaccgcgcgcugacggggaucgccguggagcaggacaagaacacccaggagguguucgcccaggucaagcagaucuacaagacgcccccgaucaaggacuucggcggguucaacuucagccagauccugcccgaccccuccaagcccagcaagcgguccuucaucgaggaccuccuguucaacaaggugacccuggccgacgccggcuucaucaagcaguacggcgacugccucggggacaucgcggcccgcgaccugaucugcgcccagaaguucaacggccugaccgugcucccgccccugcugaccgacgagaugaucgcccaguacaccagcgcccuccuggcggggaccaucacguccggcuggaccuucggggccggcgccgcccugcagauccccuucgcgaugcagauggccuaccgguucaacggcaucggggucacccagaacgugcucuacgagaaccagaagcugaucgccaaccaguucaacagcgccaucggcaagauccaggacucccugagcuccaccgccagcgcgcucgggaagcugcaggacguggucaaccagaacgcccaggcccugaacacgcucgugaagcagcuguccagcaacuucggcgccaucuccagcgugcugaacgacauccucucccgccuggacccgcccgaggccgaggugcagaucgaccggcugaucaccgggcgccuccagagccugcagaccuacgugacccagcagcugauccgggcggccgagauccgcgccagcgccaaccucgccgcgaccaagauguccgagugcguccugggccagagcaagcggguggacuucugcggcaagggguaccaccugauguccuucccccagagcgccccgcacggcguggucuuccuccacgugacguacguccccgcccaggagaagaacuucaccaccgcccccgcgaucugccacgacgggaaggcccacuucccccgcgagggcguguucguguccaacgggacccacugguucgucacgcagcggaacuucuacgagccgcagaucaucaccaccgacaacaccuucgugagcggcaacugcgacguggucaucggcaucgugaacaacacgguguacgacccccugcagcccgagcuggacuccuucaaggaggagcucgacaaguacuucaagaaccacaccagccccgacgucgaccugggggacaucuccggcaucaacgccagcguggugaacauccagaaggagaucgaccgccugaacgaggucgccaagaaccucaacgagucccugaucgaccugcaggagcucgggaaguacgagcaguacaucaaguggccgugguacaucuggcugggcuucaucgccggccugaucgcgaucgugauggugaccaucaugcucugcugcaugaccagcugcugcuccugccugaaggggugcugcagcugcggcuccugcugcaaguucgacgaggacgacagcgagcccguccugaagggggugaagcuccacuacacgugaggacuagucccuguucccagagcccacuuuuuuuucuuuuuuugaaauaaaauagccugucuuucagaucucaaaggcucuuuucagagccaccaaaaaaaaaaaaaaaaaaaaaaaaaaaaaaaaaaaaaaaaaaaaaaaaaaaaaaaaaaaaaaaaaaaaaaaaaaaaaaaaaaaaaaaaaaaaaaaaaaaaa

SEQ ID NO: 22799 - RNA, 4094 nt, Artificial Sequence
  SARS-CoV-2/Wuhan/WIV05/2019__EPI_ISL_402128 spike protein mRNA gc (1-1273)(N501Y_D614G)
aggagagucccgcagucggcguccagcggcucugcuuguucgugugugugucguugcaggccuuauucaagcuuaccauguucguguuccugguccuccugccccuggugagcucccagugcgugaaccucaccacccgcacgcagcugccgcccgccuacaccaacagcuucacccggggcgucuacuaccccgacaagguguuccgcuccagcgugcugcacuccacccaggaccucuuccugcccuucuucagcaacgucacgugguuccacgccauccacguguccgggaccaacggcaccaagcgguucgacaacccggugcugcccuucaacgacggggucuacuucgcgagcaccgagaaguccaacaucauccgcggcuggaucuucgggacgacccucgacagcaagacccagucccugcugaucgugaacaacgccaccaacguggucaucaaggugugcgaguuccaguucugcaacgaccccuuccucggcguguacuaccacaagaacaacaagagcuggauggaguccgaguuccgggucuacagcuccgccaacaacugcacguucgaguacgugagccagcccuuccugauggaccuggagggcaagcaggggaacuucaagaaccuccgcgaguucguguucaagaacaucgacggcuacuucaagaucuacuccaagcacaccccgaucaaccugguccgggaccugccccagggguucagcgcccucgagccccugguggaccugcccaucggcaucaacaucacccgcuuccagacccuccuggcccugcaccgguccuaccucacgccgggggacagcagcuccggcuggaccgcgggcgccgccgccuacuacgugggguaccugcagccccgcaccuuccugcucaaguacaacgagaacggcaccaucacggacgcggucgacugcgcccuggacccccugagcgagaccaagugcacccucaaguccuucaccguggagaaggggaucuaccagacgagcaacuuccgggugcagcccaccgaguccaucguccgcuucccgaacaucaccaaccugugccccuucggcgagguguucaacgccacccgguucgccagcgucuacgccuggaaccgcaagcggaucuccaacugcguggcggacuacagcgugcuguacaacuccgccagcuucuccacguucaagugcuacggcgucagccccaccaagcucaacgaccugugcuucaccaacguguacgccgacuccuucgugauccgcggggacgagguccggcagaucgcccccggccagaccgggaagaucgccgacuacaacuacaagcugccggacgacuucacgggcugcgugaucgcguggaacagcaacaaccucgacuccaaggucgggggcaacuacaacuaccuguaccgccuguuccgcaagagcaaccucaagcccuucgagcgggacaucuccaccgagaucuaccaggccggcagcacccccugcaacgggguggagggcuucaacugcuacuucccccugcaguccuacggguuccagccgaccuacggcgugggguaccagcccuaccggguggucgugcugagcuucgagcuccugcacgcccccgccacggugugcggccccaagaaguccaccaaccuggucaagaacaagugcgugaacuucaacuucaacggccucaccgggaccggcgugcugaccgagagcaacaagaaguuccugccguuccagcaguucgggcgcgacaucgccgacacgaccgacgcgguccgcgacccccagacccuggagauccucgacaucacccccugcagcuucggcgggguguccgugaucacgccgggcaccaacaccagcaaccaggucgccgugcuguaccagggcgugaacugcaccgagguccccguggccauccacgccgaccagcugacgcccaccuggcggguguacuccaccggcagcaacgucuuccagacccgcgccgggugccucaucggcgcggagcacgugaacaacuccuacgagugcgacauccccaucggggccggcaucugcgccagcuaccagacgcagaccaacuccccgcggcgcgcccggagcguggcgucccagagcaucaucgccuacaccaugucccugggcgccgagaacagcgucgccuacuccaacaacagcaucgccauccccaccaacuucacgaucuccgugaccaccgagauccugcccgugagcaugaccaagacgagcgucgacugcaccauguacaucugcggggacuccaccgagugcagcaaccuccugcugcaguacggcuccuucugcacccagcucaaccgcgcgcugacggggaucgccguggagcaggacaagaacacccaggagguguucgcccaggucaagcagaucuacaagacgcccccgaucaaggacuucggcggguucaacuucagccagauccugcccgaccccuccaagcccagcaagcgguccuucaucgaggaccuccuguucaacaaggugacccuggccgacgccggcuucaucaagcaguacggcgacugccucggggacaucgcggcccgcgaccugaucugcgcccagaaguucaacggccugaccgugcucccgccccugcugaccgacgagaugaucgcccaguacaccagcgcccuccuggcggggaccaucacguccggcuggaccuucggggccggcgccgcccugcagauccccuucgcgaugcagauggccuaccgguucaacggcaucggggucacccagaacgugcucuacgagaaccagaagcugaucgccaaccaguucaacagcgccaucggcaagauccaggacucccugagcuccaccgccagcgcgcucgggaagcugcaggacguggucaaccagaacgcccaggcccugaacacgcucgugaagcagcuguccagcaacuucggcgccaucuccagcgugcugaacgacauccucucccgccuggacaaggucgaggccgaggugcagaucgaccggcugaucaccgggcgccuccagagccugcagaccuacgugacccagcagcugauccgggcggccgagauccgcgccagcgccaaccucgccgcgaccaagauguccgagugcguccugggccagagcaagcggguggacuucugcggcaagggguaccaccugauguccuucccccagagcgccccgcacggcguggucuuccuccacgugacguacguccccgcccaggagaagaacuucaccaccgcccccgcgaucugccacgacgggaaggcccacuucccccgcgagggcguguucguguccaacgggacccacugguucgucacgcagcggaacuucuacgagccgcagaucaucaccaccgacaacaccuucgugagcggcaacugcgacguggucaucggcaucgugaacaacacgguguacgacccccugcagcccgagcuggacuccuucaaggaggagcucgacaaguacuucaagaaccacaccagccccgacgucgaccugggggacaucuccggcaucaacgccagcguggugaacauccagaaggagaucgaccgccugaacgaggucgccaagaaccucaacgagucccugaucgaccugcaggagcucgggaaguacgagcaguacaucaaguggccgugguacaucuggcugggcuucaucgccggccugaucgcgaucgugauggugaccaucaugcucugcugcaugaccagcugcugcuccugccugaaggggugcugcagcugcggcuccugcugcaaguucgacgaggacgacagcgagcccguccugaagggggugaagcuccacuacacgugaggacuagucccuguucccagagcccacuuuuuuuucuuuuuuugaaauaaaauagccugucuuucagaucucaaaggcucuuuucagagccaccaaaaaaaaaaaaaaaaaaaaaaaaaaaaaaaaaaaaaaaaaaaaaaaaaaaaaaaaaaaaaaaaaaaaaaaaaaaaaaaaaaaaaaaaaaaaaaaaaaaaa

SEQ ID NO: 22800 - RNA, 4094 nt, Artificial Sequence
  SARS-CoV-2/Wuhan/WIV05/2019__EPI_ISL_402128 spike protein mRNA gc (1-1273)(K986P_V987P_N501Y_D614G)
aggagagucccgcagucggcguccagcggcucugcuuguucgugugugugucguugcaggccuuauucaagcuuaccauguucguguuccugguccuccugccccuggugagcucccagugcgugaaccucaccacccgcacgcagcugccgcccgccuacaccaacagcuucacccggggcgucuacuaccccgacaagguguuccgcuccagcgugcugcacuccacccaggaccucuuccugcccuucuucagcaacgucacgugguuccacgccauccacguguccgggaccaacggcaccaagcgguucgacaacccggugcugcccuucaacgacggggucuacuucgcgagcaccgagaaguccaacaucauccgcggcuggaucuucgggacgacccucgacagcaagacccagucccugcugaucgugaacaacgccaccaacguggucaucaaggugugcgaguuccaguucugcaacgaccccuuccucggcguguacuaccacaagaacaacaagagcuggauggaguccgaguuccgggucuacagcuccgccaacaacugcacguucgaguacgugagccagcccuuccugauggaccuggagggcaagcaggggaacuucaagaaccuccgcgaguucguguucaagaacaucgacggcuacuucaagaucuacuccaagcacaccccgaucaaccugguccgggaccugccccagggguucagcgcccucgagccccugguggaccugcccaucggcaucaacaucacccgcuuccagacccuccuggcccugcaccgguccuaccucacgccgggggacagcagcuccggcuggaccgcgggcgccgccgccuacuacgugggguaccugcagccccgcaccuuccugcucaaguacaacgagaacggcaccaucacggacgcggucgacugcgcccuggacccccugagcgagaccaagugcacccucaaguccuucaccguggagaaggggaucuaccagacgagcaacuuccgggugcagcccaccgaguccaucguccgcuucccgaacaucaccaaccugugccccuucggcgagguguucaacgccacccgguucgccagcgucuacgccuggaaccgcaagcggaucuccaacugcguggcggacuacagcgugcuguacaacuccgccagcuucuccacguucaagugcuacggcgucagccccaccaagcucaacgaccugugcuucaccaacguguacgccgacuccuucgugauccgcggggacgagguccggcagaucgcccccggccagaccgggaagaucgccgacuacaacuacaagcugccggacgacuucacgggcugcgugaucgcguggaacagcaacaaccucgacuccaaggucgggggcaacuacaacuaccuguaccgccuguuccgcaagagcaaccucaagcccuucgagcgggacaucuccaccgagaucuaccaggccggcagcacccccugcaacgggguggagggcuucaacugcuacuucccccugcaguccuacggguuccagccgaccuacggcgugggguaccagcccuaccggguggucgugcugagcuucgagcuccugcacgcccccgccacggugugcggccccaagaaguccaccaaccuggucaagaacaagugcgugaacuucaacuucaacggccucaccgggaccggcgugcugaccgagagcaacaagaaguuccugccguuccagcaguucgggcgcgacaucgccgacacgaccgacgcgguccgcgacccccagacccuggagauccucgacaucacccccugcagcuucggcgggguguccgugaucacgccgggcaccaacaccagcaaccaggucgccgugcuguaccagggcgugaacugcaccgagguccccguggccauccacgccgaccagcugacgcccaccuggcggguguacuccaccggcagcaacgucuuccagacccgcgccgggugccucaucggcgcggagcacgugaacaacuccuacgagugcgacauccccaucggggccggcaucugcgccagcuaccagacgcagaccaacuccccgcggcgcgcccggagcguggcgucccagagcaucaucgccuacaccaugucccugggcgccgagaacagcgucgccuacuccaacaacagcaucgccauccccaccaacuucacgaucuccgugaccaccgagauccugcccgugagcaugaccaagacgagcgucgacugcaccauguacaucugcggggacuccaccgagugcagcaaccuccugcugcaguacggcuccuucugcacccagcucaaccgcgcgcugacggggaucgccguggagcaggacaagaacacccaggagguguucgcccaggucaagcagaucuacaagacgcccccgaucaaggacuucggcggguucaacuucagccagauccugcccgaccccuccaagcccagcaagcgguccuucaucgaggaccuccuguucaacaaggugacccuggccgacgccggcuucaucaagcaguacggcgacugccucggggacaucgcggcccgcgaccugaucugcgcccagaaguucaacggccugaccgugcucccgccccugcugaccgacgagaugaucgcccaguacaccagcgcccuccuggcggggaccaucacguccggcuggaccuucggggccggcgccgcccugcagauccccuucgcgaugcagauggccuaccgguucaacggcaucggggucacccagaacgugcucuacgagaaccagaagcugaucgccaaccaguucaacagcgccaucggcaagauccaggacucccugagcuccaccgccagcgcgcucgggaagcugcaggacguggucaaccagaacgcccaggcccugaacacgcucgugaagcagcuguccagcaacuucggcgccaucuccagcgugcugaacgacauccucucccgccuggacccgcccgaggccgaggugcagaucgaccggcugaucaccgggcgccuccagagccugcagaccuacgugacccagcagcugauccgggcggccgagauccgcgccagcgccaaccucgccgcgaccaagauguccgagugcguccugggccagagcaagcggguggacuucugcggcaagggguaccaccugauguccuucccccagagcgccccgcacggcguggucuuccuccacgugacguacguccccgcccaggagaagaacuucaccaccgcccccgcgaucugccacgacgggaaggcccacuucccccgcgagggcguguucguguccaacgggacccacugguucgucacgcagcggaacuucuacgagccgcagaucaucaccaccgacaacaccuucgugagcggcaacugcgacguggucaucggcaucgugaacaacacgguguacgacccccugcagcccgagcuggacuccuucaaggaggagcucgacaaguacuucaagaaccacaccagccccgacgucgaccugggggacaucuccggcaucaacgccagcguggugaacauccagaaggagaucgaccgccugaacgaggucgccaagaaccucaacgagucccugaucgaccugcaggagcucgggaaguacgagcaguacaucaaguggccgugguacaucuggcugggcuucaucgccggccugaucgcgaucgugauggugaccaucaugcucugcugcaugaccagcugcugcuccugccugaaggggugcugcagcugcggcuccugcugcaaguucgacgaggacgacagcgagcccguccugaagggggugaagcuccacuacacgugaggacuagucccuguucccagagcccacuuuuuuuucuuuuuuugaaauaaaauagccugucuuucagaucucaaaggcucuuuucagagccaccaaaaaaaaaaaaaaaaaaaaaaaaaaaaaaaaaaaaaaaaaaaaaaaaaaaaaaaaaaaaaaaaaaaaaaaaaaaaaaaaaaaaaaaaaaaaaaaaaaaaa

SEQ ID NO: 22801 - RNA, 4088 nt, Artificial Sequence
  SARS-CoV-2/Wuhan/WIV05/2019__EPI_ISL_402128 spike protein mRNA gc (1-1273)(H69del_V70del_D614G) R10274
aggagagucccgcagucggcguccagcggcucugcuuguucgugugugugucguugcaggccuuauucaagcuuaccauguucguguuccugguccuccugccccuggugagcucccagugcgugaaccucaccacccgcacgcagcugccgcccgccuacaccaacagcuucacccggggcgucuacuaccccgacaagguguuccgcuccagcgugcugcacuccacccaggaccucuuccugcccuucuucagcaacgucacgugguuccacgccaucuccgggaccaacggcaccaagcgguucgacaacccggugcugcccuucaacgacggggucuacuucgcgagcaccgagaaguccaacaucauccgcggcuggaucuucgggacgacccucgacagcaagacccagucccugcugaucgugaacaacgccaccaacguggucaucaaggugugcgaguuccaguucugcaacgaccccuuccucggcguguacuaccacaagaacaacaagagcuggauggaguccgaguuccgggucuacagcuccgccaacaacugcacguucgaguacgugagccagcccuuccugauggaccuggagggcaagcaggggaacuucaagaaccuccgcgaguucguguucaagaacaucgacggcuacuucaagaucuacuccaagcacaccccgaucaaccugguccgggaccugccccagggguucagcgcccucgagccccugguggaccugcccaucggcaucaacaucacccgcuuccagacccuccuggcccugcaccgguccuaccucacgccgggggacagcagcuccggcuggaccgcgggcgccgccgccuacuacgugggguaccugcagccccgcaccuuccugcucaaguacaacgagaacggcaccaucacggacgcggucgacugcgcccuggacccccugagcgagaccaagugcacccucaaguccuucaccguggagaaggggaucuaccagacgagcaacuuccgggugcagcccaccgaguccaucguccgcuucccgaacaucaccaaccugugccccuucggcgagguguucaacgccacccgguucgccagcgucuacgccuggaaccgcaagcggaucuccaacugcguggcggacuacagcgugcuguacaacuccgccagcuucuccacguucaagugcuacggcgucagccccaccaagcucaacgaccugugcuucaccaacguguacgccgacuccuucgugauccgcggggacgagguccggcagaucgcccccggccagaccgggaagaucgccgacuacaacuacaagcugccggacgacuucacgggcugcgugaucgcguggaacagcaacaaccucgacuccaaggucgggggcaacuacaacuaccuguaccgccuguuccgcaagagcaaccucaagcccuucgagcgggacaucuccaccgagaucuaccaggccggcagcacccccugcaacgggguggagggcuucaacugcuacuucccccugcaguccuacggguuccagccgaccaacggcgugggguaccagcccuaccggguggucgugcugagcuucgagcuccugcacgcccccgccacggugugcggccccaagaaguccaccaaccuggucaagaacaagugcgugaacuucaacuucaacggccucaccgggaccggcgugcugaccgagagcaacaagaaguuccugccguuccagcaguucgggcgcgacaucgccgacacgaccgacgcgguccgcgacccccagacccuggagauccucgacaucacccccugcagcuucggcgggguguccgugaucacgccgggcaccaacaccagcaaccaggucgccgugcuguaccagggcgugaacugcaccgagguccccguggccauccacgccgaccagcugacgcccaccuggcggguguacuccaccggcagcaacgucuuccagacccgcgccgggugccucaucggcgcggagcacgugaacaacuccuacgagugcgacauccccaucggggccggcaucugcgccagcuaccagacgcagaccaacuccccgcggcgcgcccggagcguggcgucccagagcaucaucgccuacaccaugucccugggcgccgagaacagcgucgccuacuccaacaacagcaucgccauccccaccaacuucacgaucuccgugaccaccgagauccugcccgugagcaugaccaagacgagcgucgacugcaccauguacaucugcggggacuccaccgagugcagcaaccuccugcugcaguacggcuccuucugcacccagcucaaccgcgcgcugacggggaucgccguggagcaggacaagaacacccaggagguguucgcccaggucaagcagaucuacaagacgcccccgaucaaggacuucggcggguucaacuucagccagauccugcccgaccccuccaagcccagcaagcgguccuucaucgaggaccuccuguucaacaaggugacccuggccgacgccggcuucaucaagcaguacggcgacugccucggggacaucgcggcccgcgaccugaucugcgcccagaaguucaacggccugaccgugcucccgccccugcugaccgacgagaugaucgcccaguacaccagcgcccuccuggcggggaccaucacguccggcuggaccuucggggccggcgccgcccugcagauccccuucgcgaugcagauggccuaccgguucaacggcaucggggucacccagaacgugcucuacgagaaccagaagcugaucgccaaccaguucaacagcgccaucggcaagauccaggacucccugagcuccaccgccagcgcgcucgggaagcugcaggacguggucaaccagaacgcccaggcccugaacacgcucgugaagcagcuguccagcaacuucggcgccaucuccagcgugcugaacgacauccucucccgccuggacaaggucgaggccgaggugcagaucgaccggcugaucaccgggcgccuccagagccugcagaccuacgugacccagcagcugauccgggcggccgagauccgcgccagcgccaaccucgccgcgaccaagauguccgagugcguccugggccagagcaagcggguggacuucugcggcaagggguaccaccugauguccuucccccagagcgccccgcacggcguggucuuccuccacgugacguacguccccgcccaggagaagaacuucaccaccgcccccgcgaucugccacgacgggaaggcccacuucccccgcgagggcguguucguguccaacgggacccacugguucgucacgcagcggaacuucuacgagccgcagaucaucaccaccgacaacaccuucgugagcggcaacugcgacguggucaucggcaucgugaacaacacgguguacgacccccugcagcccgagcuggacuccuucaaggaggagcucgacaaguacuucaagaaccacaccagccccgacgucgaccugggggacaucuccggcaucaacgccagcguggugaacauccagaaggagaucgaccgccugaacgaggucgccaagaaccucaacgagucccugaucgaccugcaggagcucgggaaguacgagcaguacaucaaguggccgugguacaucuggcugggcuucaucgccggccugaucgcgaucgugauggugaccaucaugcucugcugcaugaccagcugcugcuccugccugaaggggugcugcagcugcggcuccugcugcaaguucgacgaggacgacagcgagcccguccugaagggggugaagcuccacuacacgugaggacuagucccuguucccagagcccacuuuuuuuucuuuuuuugaaauaaaauagccugucuuucagaucucaaaggcucuuuucagagccaccaaaaaaaaaaaaaaaaaaaaaaaaaaaaaaaaaaaaaaaaaaaaaaaaaaaaaaaaaaaaaaaaaaaaaaaaaaaaaaaaaaaaaaaaaaaaaaaaaaaaa

SEQ ID NO: 22802 - RNA, 4088 nt, Artificial Sequence
  SARS-CoV-2/Wuhan/WIV05/2019__EPI_ISL_402128 spike protein mRNA gc (1-1273)(K986P_V987P_H69del_V70del_D614G) R10275
aggagagucccgcagucggcguccagcggcucugcuuguucgugugugugucguugcaggccuuauucaagcuuaccauguucguguuccugguccuccugccccuggugagcucccagugcgugaaccucaccacccgcacgcagcugccgcccgccuacaccaacagcuucacccggggcgucuacuaccccgacaagguguuccgcuccagcgugcugcacuccacccaggaccucuuccugcccuucuucagcaacgucacgugguuccacgccaucuccgggaccaacggcaccaagcgguucgacaacccggugcugcccuucaacgacggggucuacuucgcgagcaccgagaaguccaacaucauccgcggcuggaucuucgggacgacccucgacagcaagacccagucccugcugaucgugaacaacgccaccaacguggucaucaaggugugcgaguuccaguucugcaacgaccccuuccucggcguguacuaccacaagaacaacaagagcuggauggaguccgaguuccgggucuacagcuccgccaacaacugcacguucgaguacgugagccagcccuuccugauggaccuggagggcaagcaggggaacuucaagaaccuccgcgaguucguguucaagaacaucgacggcuacuucaagaucuacuccaagcacaccccgaucaaccugguccgggaccugccccagggguucagcgcccucgagccccugguggaccugcccaucggcaucaacaucacccgcuuccagacccuccuggcccugcaccgguccuaccucacgccgggggacagcagcuccggcuggaccgcgggcgccgccgccuacuacgugggguaccugcagccccgcaccuuccugcucaaguacaacgagaacggcaccaucacggacgcggucgacugcgcccuggacccccugagcgagaccaagugcacccucaaguccuucaccguggagaaggggaucuaccagacgagcaacuuccgggugcagcccaccgaguccaucguccgcuucccgaacaucaccaaccugugccccuucggcgagguguucaacgccacccgguucgccagcgucuacgccuggaaccgcaagcggaucuccaacugcguggcggacuacagcgugcuguacaacuccgccagcuucuccacguucaagugcuacggcgucagccccaccaagcucaacgaccugugcuucaccaacguguacgccgacuccuucgugauccgcggggacgagguccggcagaucgcccccggccagaccgggaagaucgccgacuacaacuacaagcugccggacgacuucacgggcugcgugaucgcguggaacagcaacaaccucgacuccaaggucgggggcaacuacaacuaccuguaccgccuguuccgcaagagcaaccucaagcccuucgagcgggacaucuccaccgagaucuaccaggccggcagcacccccugcaacgggguggagggcuucaacugcuacuucccccugcaguccuacggguuccagccgaccaacggcgugggguaccagcccuaccggguggucgugcugagcuucgagcuccugcacgcccccgccacggugugcggccccaagaaguccaccaaccuggucaagaacaagugcgugaacuucaacuucaacggccucaccgggaccggcgugcugaccgagagcaacaagaaguuccugccguuccagcaguucgggcgcgacaucgccgacacgaccgacgcgguccgcgacccccagacccuggagauccucgacaucacccccugcagcuucggcgggguguccgugaucacgccgggcaccaacaccagcaaccaggucgccgugcuguaccagggcgugaacugcaccgagguccccguggccauccacgccgaccagcugacgcccaccuggcggguguacuccaccggcagcaacgucuuccagacccgcgccgggugccucaucggcgcggagcacgugaacaacuccuacgagugcgacauccccaucggggccggcaucugcgccagcuaccagacgcagaccaacuccccgcggcgcgcccggagcguggcgucccagagcaucaucgccuacaccaugucccugggcgccgagaacagcgucgccuacuccaacaacagcaucgccauccccaccaacuucacgaucuccgugaccaccgagauccugcccgugagcaugaccaagacgagcgucgacugcaccauguacaucugcggggacuccaccgagugcagcaaccuccugcugcaguacggcuccuucugcacccagcucaaccgcgcgcugacggggaucgccguggagcaggacaagaacacccaggagguguucgcccaggucaagcagaucuacaagacgcccccgaucaaggacuucggcggguucaacuucagccagauccugcccgaccccuccaagcccagcaagcgguccuucaucgaggaccuccuguucaacaaggugacccuggccgacgccggcuucaucaagcaguacggcgacugccucggggacaucgcggcccgcgaccugaucugcgcccagaaguucaacggccugaccgugcucccgccccugcugaccgacgagaugaucgcccaguacaccagcgcccuccuggcggggaccaucacguccggcuggaccuucggggccggcgccgcccugcagauccccuucgcgaugcagauggccuaccgguucaacggcaucggggucacccagaacgugcucuacgagaaccagaagcugaucgccaaccaguucaacagcgccaucggcaagauccaggacucccugagcuccaccgccagcgcgcucgggaagcugcaggacguggucaaccagaacgcccaggcccugaacacgcucgugaagcagcuguccagcaacuucggcgccaucuccagcgugcugaacgacauccucucccgccuggacccgcccgaggccgaggugcagaucgaccggcugaucaccgggcgccuccagagccugcagaccuacgugacccagcagcugauccgggcggccgagauccgcgccagcgccaaccucgccgcgaccaagauguccgagugcguccugggccagagcaagcggguggacuucugcggcaagggguaccaccugauguccuucccccagagcgccccgcacggcguggucuuccuccacgugacguacguccccgcccaggagaagaacuucaccaccgcccccgcgaucugccacgacgggaaggcccacuucccccgcgagggcguguucguguccaacgggacccacugguucgucacgcagcggaacuucuacgagccgcagaucaucaccaccgacaacaccuucgugagcggcaacugcgacguggucaucggcaucgugaacaacacgguguacgacccccugcagcccgagcuggacuccuucaaggaggagcucgacaaguacuucaagaaccacaccagccccgacgucgaccugggggacaucuccggcaucaacgccagcguggugaacauccagaaggagaucgaccgccugaacgaggucgccaagaaccucaacgagucccugaucgaccugcaggagcucgggaaguacgagcaguacaucaaguggccgugguacaucuggcugggcuucaucgccggccugaucgcgaucgugauggugaccaucaugcucugcugcaugaccagcugcugcuccugccugaaggggugcugcagcugcggcuccugcugcaaguucgacgaggacgacagcgagcccguccugaagggggugaagcuccacuacacgugaggacuagucccuguucccagagcccacuuuuuuuucuuuuuuugaaauaaaauagccugucuuucagaucucaaaggcucuuuucagagccaccaaaaaaaaaaaaaaaaaaaaaaaaaaaaaaaaaaaaaaaaaaaaaaaaaaaaaaaaaaaaaaaaaaaaaaaaaaaaaaaaaaaaaaaaaaaaaaaaaaaaa

SEQ ID NO: 22803 - RNA, 4094 nt, Artificial Sequence
  SARS-CoV-2/Wuhan/WIV05/2019__EPI_ISL_402128 spike protein mRNA gc (1-1273)(Y453F_D614G) R10282
aggagagucccgcagucggcguccagcggcucugcuuguucgugugugugucguugcaggccuuauucaagcuuaccauguucguguuccugguccuccugccccuggugagcucccagugcgugaaccucaccacccgcacgcagcugccgcccgccuacaccaacagcuucacccggggcgucuacuaccccgacaagguguuccgcuccagcgugcugcacuccacccaggaccucuuccugcccuucuucagcaacgucacgugguuccacgccauccacguguccgggaccaacggcaccaagcgguucgacaacccggugcugcccuucaacgacggggucuacuucgcgagcaccgagaaguccaacaucauccgcggcuggaucuucgggacgacccucgacagcaagacccagucccugcugaucgugaacaacgccaccaacguggucaucaaggugugcgaguuccaguucugcaacgaccccuuccucggcguguacuaccacaagaacaacaagagcuggauggaguccgaguuccgggucuacagcuccgccaacaacugcacguucgaguacgugagccagcccuuccugauggaccuggagggcaagcaggggaacuucaagaaccuccgcgaguucguguucaagaacaucgacggcuacuucaagaucuacuccaagcacaccccgaucaaccugguccgggaccugccccagggguucagcgcccucgagccccugguggaccugcccaucggcaucaacaucacccgcuuccagacccuccuggcccugcaccgguccuaccucacgccgggggacagcagcuccggcuggaccgcgggcgccgccgccuacuacgugggguaccugcagccccgcaccuuccugcucaaguacaacgagaacggcaccaucacggacgcggucgacugcgcccuggacccccugagcgagaccaagugcacccucaaguccuucaccguggagaaggggaucuaccagacgagcaacuuccgggugcagcccaccgaguccaucguccgcuucccgaacaucaccaaccugugccccuucggcgagguguucaacgccacccgguucgccagcgucuacgccuggaaccgcaagcggaucuccaacugcguggcggacuacagcgugcuguacaacuccgccagcuucuccacguucaagugcuacggcgucagccccaccaagcucaacgaccugugcuucaccaacguguacgccgacuccuucgugauccgcggggacgagguccggcagaucgcccccggccagaccgggaagaucgccgacuacaacuacaagcugccggacgacuucacgggcugcgugaucgcguggaacagcaacaaccucgacuccaaggucgggggcaacuacaacuaccuguuccgccuguuccgcaagagcaaccucaagcccuucgagcgggacaucuccaccgagaucuaccaggccggcagcacccccugcaacgggguggagggcuucaacugcuacuucccccugcaguccuacggguuccagccgaccaacggcgugggguaccagcccuaccggguggucgugcugagcuucgagcuccugcacgcccccgccacggugugcggccccaagaaguccaccaaccuggucaagaacaagugcgugaacuucaacuucaacggccucaccgggaccggcgugcugaccgagagcaacaagaaguuccugccguuccagcaguucgggcgcgacaucgccgacacgaccgacgcgguccgcgacccccagacccuggagauccucgacaucacccccugcagcuucggcgggguguccgugaucacgccgggcaccaacaccagcaaccaggucgccgugcuguaccagggcgugaacugcaccgagguccccguggccauccacgccgaccagcugacgcccaccuggcggguguacuccaccggcagcaacgucuuccagacccgcgccgggugccucaucggcgcggagcacgugaacaacuccuacgagugcgacauccccaucggggccggcaucugcgccagcuaccagacgcagaccaacuccccgcggcgcgcccggagcguggcgucccagagcaucaucgccuacaccaugucccugggcgccgagaacagcgucgccuacuccaacaacagcaucgccauccccaccaacuucacgaucuccgugaccaccgagauccugcccgugagcaugaccaagacgagcgucgacugcaccauguacaucugcggggacuccaccgagugcagcaaccuccugcugcaguacggcuccuucugcacccagcucaaccgcgcgcugacggggaucgccguggagcaggacaagaacacccaggagguguucgcccaggucaagcagaucuacaagacgcccccgaucaaggacuucggcggguucaacuucagccagauccugcccgaccccuccaagcccagcaagcgguccuucaucgaggaccuccuguucaacaaggugacccuggccgacgccggcuucaucaagcaguacggcgacugccucggggacaucgcggcccgcgaccugaucugcgcccagaaguucaacggccugaccgugcucccgccccugcugaccgacgagaugaucgcccaguacaccagcgcccuccuggcggggaccaucacguccggcuggaccuucggggccggcgccgcccugcagauccccuucgcgaugcagauggccuaccgguucaacggcaucggggucacccagaacgugcucuacgagaaccagaagcugaucgccaaccaguucaacagcgccaucggcaagauccaggacucccugagcuccaccgccagcgcgcucgggaagcugcaggacguggucaaccagaacgcccaggcccugaacacgcucgugaagcagcuguccagcaacuucggcgccaucuccagcgugcugaacgacauccucucccgccuggacaaggucgaggccgaggugcagaucgaccggcugaucaccgggcgccuccagagccugcagaccuacgugacccagcagcugauccgggcggccgagauccgcgccagcgccaaccucgccgcgaccaagauguccgagugcguccugggccagagcaagcggguggacuucugcggcaagggguaccaccugauguccuucccccagagcgccccgcacggcguggucuuccuccacgugacguacguccccgcccaggagaagaacuucaccaccgcccccgcgaucugccacgacgggaaggcccacuucccccgcgagggcguguucguguccaacgggacccacugguucgucacgcagcggaacuucuacgagccgcagaucaucaccaccgacaacaccuucgugagcggcaacugcgacguggucaucggcaucgugaacaacacgguguacgacccccugcagcccgagcuggacuccuucaaggaggagcucgacaaguacuucaagaaccacaccagccccgacgucgaccugggggacaucuccggcaucaacgccagcguggugaacauccagaaggagaucgaccgccugaacgaggucgccaagaaccucaacgagucccugaucgaccugcaggagcucgggaaguacgagcaguacaucaaguggccgugguacaucuggcugggcuucaucgccggccugaucgcgaucgugauggugaccaucaugcucugcugcaugaccagcugcugcuccugccugaaggggugcugcagcugcggcuccugcugcaaguucgacgaggacgacagcgagcccguccugaagggggugaagcuccacuacacgugaggacuagucccuguucccagagcccacuuuuuuuucuuuuuuugaaauaaaauagccugucuuucagaucucaaaggcucuuuucagagccaccaaaaaaaaaaaaaaaaaaaaaaaaaaaaaaaaaaaaaaaaaaaaaaaaaaaaaaaaaaaaaaaaaaaaaaaaaaaaaaaaaaaaaaaaaaaaaaaaaaaaa

SEQ ID NO: 22804 - RNA, 4094 nt, Artificial Sequence
  SARS-CoV-2/Wuhan/WIV05/2019__EPI_ISL_402128 spike protein mRNA gc (1-1273)(K986P_V987P_Y453F_D614G) R10283
aggagagucccgcagucggcguccagcggcucugcuuguucgugugugugucguugcaggccuuauucaagcuuaccauguucguguuccugguccuccugccccuggugagcucccagugcgugaaccucaccacccgcacgcagcugccgcccgccuacaccaacagcuucacccggggcgucuacuaccccgacaagguguuccgcuccagcgugcugcacuccacccaggaccucuuccugcccuucuucagcaacgucacgugguuccacgccauccacguguccgggaccaacggcaccaagcgguucgacaacccggugcugcccuucaacgacggggucuacuucgcgagcaccgagaaguccaacaucauccgcggcuggaucuucgggacgacccucgacagcaagacccagucccugcugaucgugaacaacgccaccaacguggucaucaaggugugcgaguuccaguucugcaacgaccccuuccucggcguguacuaccacaagaacaacaagagcuggauggaguccgaguuccgggucuacagcuccgccaacaacugcacguucgaguacgugagccagcccuuccugauggaccuggagggcaagcaggggaacuucaagaaccuccgcgaguucguguucaagaacaucgacggcuacuucaagaucuacuccaagcacaccccgaucaaccugguccgggaccugccccagggguucagcgcccucgagccccugguggaccugcccaucggcaucaacaucacccgcuuccagacccuccuggcccugcaccgguccuaccucacgccgggggacagcagcuccggcuggaccgcgggcgccgccgccuacuacgugggguaccugcagccccgcaccuuccugcucaaguacaacgagaacggcaccaucacggacgcggucgacugcgcccuggacccccugagcgagaccaagugcacccucaaguccuucaccguggagaaggggaucuaccagacgagcaacuuccgggugcagcccaccgaguccaucguccgcuucccgaacaucaccaaccugugccccuucggcgagguguucaacgccacccgguucgccagcgucuacgccuggaaccgcaagcggaucuccaacugcguggcggacuacagcgugcuguacaacuccgccagcuucuccacguucaagugcuacggcgucagccccaccaagcucaacgaccugugcuucaccaacguguacgccgacuccuucgugauccgcggggacgagguccggcagaucgcccccggccagaccgggaagaucgccgacuacaacuacaagcugccggacgacuucacgggcugcgugaucgcguggaacagcaacaaccucgacuccaaggucgggggcaacuacaacuaccuguuccgccuguuccgcaagagcaaccucaagcccuucgagcgggacaucuccaccgagaucuaccaggccggcagcacccccugcaacgggguggagggcuucaacugcuacuucccccugcaguccuacggguuccagccgaccaacggcgugggguaccagcccuaccggguggucgugcugagcuucgagcuccugcacgcccccgccacggugugcggccccaagaaguccaccaaccuggucaagaacaagugcgugaacuucaacuucaacggccucaccgggaccggcgugcugaccgagagcaacaagaaguuccugccguuccagcaguucgggcgcgacaucgccgacacgaccgacgcgguccgcgacccccagacccuggagauccucgacaucacccccugcagcuucggcgggguguccgugaucacgccgggcaccaacaccagcaaccaggucgccgugcuguaccagggcgugaacugcaccgagguccccguggccauccacgccgaccagcugacgcccaccuggcggguguacuccaccggcagcaacgucuuccagacccgcgccgggugccucaucggcgcggagcacgugaacaacuccuacgagugcgacauccccaucggggccggcaucugcgccagcuaccagacgcagaccaacuccccgcggcgcgcccggagcguggcgucccagagcaucaucgccuacaccaugucccugggcgccgagaacagcgucgccuacuccaacaacagcaucgccauccccaccaacuucacgaucuccgugaccaccgagauccugcccgugagcaugaccaagacgagcgucgacugcaccauguacaucugcggggacuccaccgagugcagcaaccuccugcugcaguacggcuccuucugcacccagcucaaccgcgcgcugacggggaucgccguggagcaggacaagaacacccaggagguguucgcccaggucaagcagaucuacaagacgcccccgaucaaggacuucggcggguucaacuucagccagauccugcccgaccccuccaagcccagcaagcgguccuucaucgaggaccuccuguucaacaaggugacccuggccgacgccggcuucaucaagcaguacggcgacugccucggggacaucgcggcccgcgaccugaucugcgcccagaaguucaacggccugaccgugcucccgccccugcugaccgacgagaugaucgcccaguacaccagcgcccuccuggcggggaccaucacguccggcuggaccuucggggccggcgccgcccugcagauccccuucgcgaugcagauggccuaccgguucaacggcaucggggucacccagaacgugcucuacgagaaccagaagcugaucgccaaccaguucaacagcgccaucggcaagauccaggacucccugagcuccaccgccagcgcgcucgggaagcugcaggacguggucaaccagaacgcccaggcccugaacacgcucgugaagcagcuguccagcaacuucggcgccaucuccagcgugcugaacgacauccucucccgccuggacccgcccgaggccgaggugcagaucgaccggcugaucaccgggcgccuccagagccugcagaccuacgugacccagcagcugauccgggcggccgagauccgcgccagcgccaaccucgccgcgaccaagauguccgagugcguccugggccagagcaagcggguggacuucugcggcaagggguaccaccugauguccuucccccagagcgccccgcacggcguggucuuccuccacgugacguacguccccgcccaggagaagaacuucaccaccgcccccgcgaucugccacgacgggaaggcccacuucccccgcgagggcguguucguguccaacgggacccacugguucgucacgcagcggaacuucuacgagccgcagaucaucaccaccgacaacaccuucgugagcggcaacugcgacguggucaucggcaucgugaacaacacgguguacgacccccugcagcccgagcuggacuccuucaaggaggagcucgacaaguacuucaagaaccacaccagccccgacgucgaccugggggacaucuccggcaucaacgccagcguggugaacauccagaaggagaucgaccgccugaacgaggucgccaagaaccucaacgagucccugaucgaccugcaggagcucgggaaguacgagcaguacaucaaguggccgugguacaucuggcugggcuucaucgccggccugaucgcgaucgugauggugaccaucaugcucugcugcaugaccagcugcugcuccugccugaaggggugcugcagcugcggcuccugcugcaaguucgacgaggacgacagcgagcccguccugaagggggugaagcuccacuacacgugaggacuagucccuguucccagagcccacuuuuuuuucuuuuuuugaaauaaaauagccugucuuucagaucucaaaggcucuuuucagagccaccaaaaaaaaaaaaaaaaaaaaaaaaaaaaaaaaaaaaaaaaaaaaaaaaaaaaaaaaaaaaaaaaaaaaaaaaaaaaaaaaaaaaaaaaaaaaaaaaaaaaa

SEQ ID NO: 22805 - RNA, 4094 nt, Artificial Sequence
  SARS-CoV-2/Wuhan/WIV05/2019__EPI_ISL_402128 spike protein mRNA gc (1-1273)(D614G_I692V) R10290
aggagagucccgcagucggcguccagcggcucugcuuguucgugugugugucguugcaggccuuauucaagcuuaccauguucguguuccugguccuccugccccuggugagcucccagugcgugaaccucaccacccgcacgcagcugccgcccgccuacaccaacagcuucacccggggcgucuacuaccccgacaagguguuccgcuccagcgugcugcacuccacccaggaccucuuccugcccuucuucagcaacgucacgugguuccacgccauccacguguccgggaccaacggcaccaagcgguucgacaacccggugcugcccuucaacgacggggucuacuucgcgagcaccgagaaguccaacaucauccgcggcuggaucuucgggacgacccucgacagcaagacccagucccugcugaucgugaacaacgccaccaacguggucaucaaggugugcgaguuccaguucugcaacgaccccuuccucggcguguacuaccacaagaacaacaagagcuggauggaguccgaguuccgggucuacagcuccgccaacaacugcacguucgaguacgugagccagcccuuccugauggaccuggagggcaagcaggggaacuucaagaaccuccgcgaguucguguucaagaacaucgacggcuacuucaagaucuacuccaagcacaccccgaucaaccugguccgggaccugccccagggguucagcgcccucgagccccugguggaccugcccaucggcaucaacaucacccgcuuccagacccuccuggcccugcaccgguccuaccucacgccgggggacagcagcuccggcuggaccgcgggcgccgccgccuacuacgugggguaccugcagccccgcaccuuccugcucaaguacaacgagaacggcaccaucacggacgcggucgacugcgcccuggacccccugagcgagaccaagugcacccucaaguccuucaccguggagaaggggaucuaccagacgagcaacuuccgggugcagcccaccgaguccaucguccgcuucccgaacaucaccaaccugugccccuucggcgagguguucaacgccacccgguucgccagcgucuacgccuggaaccgcaagcggaucuccaacugcguggcggacuacagcgugcuguacaacuccgccagcuucuccacguucaagugcuacggcgucagccccaccaagcucaacgaccugugcuucaccaacguguacgccgacuccuucgugauccgcggggacgagguccggcagaucgcccccggccagaccgggaagaucgccgacuacaacuacaagcugccggacgacuucacgggcugcgugaucgcguggaacagcaacaaccucgacuccaaggucgggggcaacuacaacuaccuguaccgccuguuccgcaagagcaaccucaagcccuucgagcgggacaucuccaccgagaucuaccaggccggcagcacccccugcaacgggguggagggcuucaacugcuacuucccccugcaguccuacggguuccagccgaccaacggcgugggguaccagcccuaccggguggucgugcugagcuucgagcuccugcacgcccccgccacggugugcggccccaagaaguccaccaaccuggucaagaacaagugcgugaacuucaacuucaacggccucaccgggaccggcgugcugaccgagagcaacaagaaguuccugccguuccagcaguucgggcgcgacaucgccgacacgaccgacgcgguccgcgacccccagacccuggagauccucgacaucacccccugcagcuucggcgggguguccgugaucacgccgggcaccaacaccagcaaccaggucgccgugcuguaccagggcgugaacugcaccgagguccccguggccauccacgccgaccagcugacgcccaccuggcggguguacuccaccggcagcaacgucuuccagacccgcgccgggugccucaucggcgcggagcacgugaacaacuccuacgagugcgacauccccaucggggccggcaucugcgccagcuaccagacgcagaccaacuccccgcggcgcgcccggagcguggcgucccagagcgucaucgccuacaccaugucccugggcgccgagaacagcgucgccuacuccaacaacagcaucgccauccccaccaacuucacgaucuccgugaccaccgagauccugcccgugagcaugaccaagacgagcgucgacugcaccauguacaucugcggggacuccaccgagugcagcaaccuccugcugcaguacggcuccuucugcacccagcucaaccgcgcgcugacggggaucgccguggagcaggacaagaacacccaggagguguucgcccaggucaagcagaucuacaagacgcccccgaucaaggacuucggcggguucaacuucagccagauccugcccgaccccuccaagcccagcaagcgguccuucaucgaggaccuccuguucaacaaggugacccuggccgacgccggcuucaucaagcaguacggcgacugccucggggacaucgcggcccgcgaccugaucugcgcccagaaguucaacggccugaccgugcucccgccccugcugaccgacgagaugaucgcccaguacaccagcgcccuccuggcggggaccaucacguccggcuggaccuucggggccggcgccgcccugcagauccccuucgcgaugcagauggccuaccgguucaacggcaucggggucacccagaacgugcucuacgagaaccagaagcugaucgccaaccaguucaacagcgccaucggcaagauccaggacucccugagcuccaccgccagcgcgcucgggaagcugcaggacguggucaaccagaacgcccaggcccugaacacgcucgugaagcagcuguccagcaacuucggcgccaucuccagcgugcugaacgacauccucucccgccuggacaaggucgaggccgaggugcagaucgaccggcugaucaccgggcgccuccagagccugcagaccuacgugacccagcagcugauccgggcggccgagauccgcgccagcgccaaccucgccgcgaccaagauguccgagugcguccugggccagagcaagcggguggacuucugcggcaagggguaccaccugauguccuucccccagagcgccccgcacggcguggucuuccuccacgugacguacguccccgcccaggagaagaacuucaccaccgcccccgcgaucugccacgacgggaaggcccacuucccccgcgagggcguguucguguccaacgggacccacugguucgucacgcagcggaacuucuacgagccgcagaucaucaccaccgacaacaccuucgugagcggcaacugcgacguggucaucggcaucgugaacaacacgguguacgacccccugcagcccgagcuggacuccuucaaggaggagcucgacaaguacuucaagaaccacaccagccccgacgucgaccugggggacaucuccggcaucaacgccagcguggugaacauccagaaggagaucgaccgccugaacgaggucgccaagaaccucaacgagucccugaucgaccugcaggagcucgggaaguacgagcaguacaucaaguggccgugguacaucuggcugggcuucaucgccggccugaucgcgaucgugauggugaccaucaugcucugcugcaugaccagcugcugcuccugccugaaggggugcugcagcugcggcuccugcugcaaguucgacgaggacgacagcgagcccguccugaagggggugaagcuccacuacacgugaggacuagucccuguucccagagcccacuuuuuuuucuuuuuuugaaauaaaauagccugucuuucagaucucaaaggcucuuuucagagccaccaaaaaaaaaaaaaaaaaaaaaaaaaaaaaaaaaaaaaaaaaaaaaaaaaaaaaaaaaaaaaaaaaaaaaaaaaaaaaaaaaaaaaaaaaaaaaaaaaaaaa

SEQ ID NO: 22806 - RNA, 4094 nt, Artificial Sequence
  SARS-CoV-2/Wuhan/WIV05/2019__EPI_ISL_402128 spike protein mRNA gc (1-1273)(K986P_V987P_D614G_I692V) R10291
aggagagucccgcagucggcguccagcggcucugcuuguucgugugugugucguugcaggccuuauucaagcuuaccauguucguguuccugguccuccugccccuggugagcucccagugcgugaaccucaccacccgcacgcagcugccgcccgccuacaccaacagcuucacccggggcgucuacuaccccgacaagguguuccgcuccagcgugcugcacuccacccaggaccucuuccugcccuucuucagcaacgucacgugguuccacgccauccacguguccgggaccaacggcaccaagcgguucgacaacccggugcugcccuucaacgacggggucuacuucgcgagcaccgagaaguccaacaucauccgcggcuggaucuucgggacgacccucgacagcaagacccagucccugcugaucgugaacaacgccaccaacguggucaucaaggugugcgaguuccaguucugcaacgaccccuuccucggcguguacuaccacaagaacaacaagagcuggauggaguccgaguuccgggucuacagcuccgccaacaacugcacguucgaguacgugagccagcccuuccugauggaccuggagggcaagcaggggaacuucaagaaccuccgcgaguucguguucaagaacaucgacggcuacuucaagaucuacuccaagcacaccccgaucaaccugguccgggaccugccccagggguucagcgcccucgagccccugguggaccugcccaucggcaucaacaucacccgcuuccagacccuccuggcccugcaccgguccuaccucacgccgggggacagcagcuccggcuggaccgcgggcgccgccgccuacuacgugggguaccugcagccccgcaccuuccugcucaaguacaacgagaacggcaccaucacggacgcggucgacugcgcccuggacccccugagcgagaccaagugcacccucaaguccuucaccguggagaaggggaucuaccagacgagcaacuuccgggugcagcccaccgaguccaucguccgcuucccgaacaucaccaaccugugccccuucggcgagguguucaacgccacccgguucgccagcgucuacgccuggaaccgcaagcggaucuccaacugcguggcggacuacagcgugcuguacaacuccgccagcuucuccacguucaagugcuacggcgucagccccaccaagcucaacgaccugugcuucaccaacguguacgccgacuccuucgugauccgcggggacgagguccggcagaucgcccccggccagaccgggaagaucgccgacuacaacuacaagcugccggacgacuucacgggcugcgugaucgcguggaacagcaacaaccucgacuccaaggucgggggcaacuacaacuaccuguaccgccuguuccgcaagagcaaccucaagcccuucgagcgggacaucuccaccgagaucuaccaggccggcagcacccccugcaacgggguggagggcuucaacugcuacuucccccugcaguccuacggguuccagccgaccaacggcgugggguaccagcccuaccggguggucgugcugagcuucgagcuccugcacgcccccgccacggugugcggccccaagaaguccaccaaccuggucaagaacaagugcgugaacuucaacuucaacggccucaccgggaccggcgugcugaccgagagcaacaagaaguuccugccguuccagcaguucgggcgcgacaucgccgacacgaccgacgcgguccgcgacccccagacccuggagauccucgacaucacccccugcagcuucggcgggguguccgugaucacgccgggcaccaacaccagcaaccaggucgccgugcuguaccagggcgugaacugcaccgagguccccguggccauccacgccgaccagcugacgcccaccuggcggguguacuccaccggcagcaacgucuuccagacccgcgccgggugccucaucggcgcggagcacgugaacaacuccuacgagugcgacauccccaucggggccggcaucugcgccagcuaccagacgcagaccaacuccccgcggcgcgcccggagcguggcgucccagagcgucaucgccuacaccaugucccugggcgccgagaacagcgucgccuacuccaacaacagcaucgccauccccaccaacuucacgaucuccgugaccaccgagauccugcccgugagcaugaccaagacgagcgucgacugcaccauguacaucugcggggacuccaccgagugcagcaaccuccugcugcaguacggcuccuucugcacccagcucaaccgcgcgcugacggggaucgccguggagcaggacaagaacacccaggagguguucgcccaggucaagcagaucuacaagacgcccccgaucaaggacuucggcggguucaacuucagccagauccugcccgaccccuccaagcccagcaagcgguccuucaucgaggaccuccuguucaacaaggugacccuggccgacgccggcuucaucaagcaguacggcgacugccucggggacaucgcggcccgcgaccugaucugcgcccagaaguucaacggccugaccgugcucccgccccugcugaccgacgagaugaucgcccaguacaccagcgcccuccuggcggggaccaucacguccggcuggaccuucggggccggcgccgcccugcagauccccuucgcgaugcagauggccuaccgguucaacggcaucggggucacccagaacgugcucuacgagaaccagaagcugaucgccaaccaguucaacagcgccaucggcaagauccaggacucccugagcuccaccgccagcgcgcucgggaagcugcaggacguggucaaccagaacgcccaggcccugaacacgcucgugaagcagcuguccagcaacuucggcgccaucuccagcgugcugaacgacauccucucccgccuggacccgcccgaggccgaggugcagaucgaccggcugaucaccgggcgccuccagagccugcagaccuacgugacccagcagcugauccgggcggccgagauccgcgccagcgccaaccucgccgcgaccaagauguccgagugcguccugggccagagcaagcggguggacuucugcggcaagggguaccaccugauguccuucccccagagcgccccgcacggcguggucuuccuccacgugacguacguccccgcccaggagaagaacuucaccaccgcccccgcgaucugccacgacgggaaggcccacuucccccgcgagggcguguucguguccaacgggacccacugguucgucacgcagcggaacuucuacgagccgcagaucaucaccaccgacaacaccuucgugagcggcaacugcgacguggucaucggcaucgugaacaacacgguguacgacccccugcagcccgagcuggacuccuucaaggaggagcucgacaaguacuucaagaaccacaccagccccgacgucgaccugggggacaucuccggcaucaacgccagcguggugaacauccagaaggagaucgaccgccugaacgaggucgccaagaaccucaacgagucccugaucgaccugcaggagcucgggaaguacgagcaguacaucaaguggccgugguacaucuggcugggcuucaucgccggccugaucgcgaucgugauggugaccaucaugcucugcugcaugaccagcugcugcuccugccugaaggggugcugcagcugcggcuccugcugcaaguucgacgaggacgacagcgagcccguccugaagggggugaagcuccacuacacgugaggacuagucccuguucccagagcccacuuuuuuuucuuuuuuugaaauaaaauagccugucuuucagaucucaaaggcucuuuucagagccaccaaaaaaaaaaaaaaaaaaaaaaaaaaaaaaaaaaaaaaaaaaaaaaaaaaaaaaaaaaaaaaaaaaaaaaaaaaaaaaaaaaaaaaaaaaaaaaaaaaaaa

SEQ ID NO: 22807 - RNA, 4094 nt, Artificial Sequence
  SARS-CoV-2/Wuhan/WIV05/2019__EPI_ISL_402128 spike protein mRNA gc (1-1273)(D614G_M1229I)
aggagagucccgcagucggcguccagcggcucugcuuguucgugugugugucguugcaggccuuauucaagcuuaccauguucguguuccugguccuccugccccuggugagcucccagugcgugaaccucaccacccgcacgcagcugccgcccgccuacaccaacagcuucacccggggcgucuacuaccccgacaagguguuccgcuccagcgugcugcacuccacccaggaccucuuccugcccuucuucagcaacgucacgugguuccacgccauccacguguccgggaccaacggcaccaagcgguucgacaacccggugcugcccuucaacgacggggucuacuucgcgagcaccgagaaguccaacaucauccgcggcuggaucuucgggacgacccucgacagcaagacccagucccugcugaucgugaacaacgccaccaacguggucaucaaggugugcgaguuccaguucugcaacgaccccuuccucggcguguacuaccacaagaacaacaagagcuggauggaguccgaguuccgggucuacagcuccgccaacaacugcacguucgaguacgugagccagcccuuccugauggaccuggagggcaagcaggggaacuucaagaaccuccgcgaguucguguucaagaacaucgacggcuacuucaagaucuacuccaagcacaccccgaucaaccugguccgggaccugccccagggguucagcgcccucgagccccugguggaccugcccaucggcaucaacaucacccgcuuccagacccuccuggcccugcaccgguccuaccucacgccgggggacagcagcuccggcuggaccgcgggcgccgccgccuacuacgugggguaccugcagccccgcaccuuccugcucaaguacaacgagaacggcaccaucacggacgcggucgacugcgcccuggacccccugagcgagaccaagugcacccucaaguccuucaccguggagaaggggaucuaccagacgagcaacuuccgggugcagcccaccgaguccaucguccgcuucccgaacaucaccaaccugugccccuucggcgagguguucaacgccacccgguucgccagcgucuacgccuggaaccgcaagcggaucuccaacugcguggcggacuacagcgugcuguacaacuccgccagcuucuccacguucaagugcuacggcgucagccccaccaagcucaacgaccugugcuucaccaacguguacgccgacuccuucgugauccgcggggacgagguccggcagaucgcccccggccagaccgggaagaucgccgacuacaacuacaagcugccggacgacuucacgggcugcgugaucgcguggaacagcaacaaccucgacuccaaggucgggggcaacuacaacuaccuguaccgccuguuccgcaagagcaaccucaagcccuucgagcgggacaucuccaccgagaucuaccaggccggcagcacccccugcaacgggguggagggcuucaacugcuacuucccccugcaguccuacggguuccagccgaccaacggcgugggguaccagcccuaccggguggucgugcugagcuucgagcuccugcacgcccccgccacggugugcggccccaagaaguccaccaaccuggucaagaacaagugcgugaacuucaacuucaacggccucaccgggaccggcgugcugaccgagagcaacaagaaguuccugccguuccagcaguucgggcgcgacaucgccgacacgaccgacgcgguccgcgacccccagacccuggagauccucgacaucacccccugcagcuucggcgggguguccgugaucacgccgggcaccaacaccagcaaccaggucgccgugcuguaccagggcgugaacugcaccgagguccccguggccauccacgccgaccagcugacgcccaccuggcggguguacuccaccggcagcaacgucuuccagacccgcgccgggugccucaucggcgcggagcacgugaacaacuccuacgagugcgacauccccaucggggccggcaucugcgccagcuaccagacgcagaccaacuccccgcggcgcgcccggagcguggcgucccagagcaucaucgccuacaccaugucccugggcgccgagaacagcgucgccuacuccaacaacagcaucgccauccccaccaacuucacgaucuccgugaccaccgagauccugcccgugagcaugaccaagacgagcgucgacugcaccauguacaucugcggggacuccaccgagugcagcaaccuccugcugcaguacggcuccuucugcacccagcucaaccgcgcgcugacggggaucgccguggagcaggacaagaacacccaggagguguucgcccaggucaagcagaucuacaagacgcccccgaucaaggacuucggcggguucaacuucagccagauccugcccgaccccuccaagcccagcaagcgguccuucaucgaggaccuccuguucaacaaggugacccuggccgacgccggcuucaucaagcaguacggcgacugccucggggacaucgcggcccgcgaccugaucugcgcccagaaguucaacggccugaccgugcucccgccccugcugaccgacgagaugaucgcccaguacaccagcgcccuccuggcggggaccaucacguccggcuggaccuucggggccggcgccgcccugcagauccccuucgcgaugcagauggccuaccgguucaacggcaucggggucacccagaacgugcucuacgagaaccagaagcugaucgccaaccaguucaacagcgccaucggcaagauccaggacucccugagcuccaccgccagcgcgcucgggaagcugcaggacguggucaaccagaacgcccaggcccugaacacgcucgugaagcagcuguccagcaacuucggcgccaucuccagcgugcugaacgacauccucucccgccuggacaaggucgaggccgaggugcagaucgaccggcugaucaccgggcgccuccagagccugcagaccuacgugacccagcagcugauccgggcggccgagauccgcgccagcgccaaccucgccgcgaccaagauguccgagugcguccugggccagagcaagcggguggacuucugcggcaagggguaccaccugauguccuucccccagagcgccccgcacggcguggucuuccuccacgugacguacguccccgcccaggagaagaacuucaccaccgcccccgcgaucugccacgacgggaaggcccacuucccccgcgagggcguguucguguccaacgggacccacugguucgucacgcagcggaacuucuacgagccgcagaucaucaccaccgacaacaccuucgugagcggcaacugcgacguggucaucggcaucgugaacaacacgguguacgacccccugcagcccgagcuggacuccuucaaggaggagcucgacaaguacuucaagaaccacaccagccccgacgucgaccugggggacaucuccggcaucaacgccagcguggugaacauccagaaggagaucgaccgccugaacgaggucgccaagaaccucaacgagucccugaucgaccugcaggagcucgggaaguacgagcaguacaucaaguggccgugguacaucuggcugggcuucaucgccggccugaucgcgaucgugaucgugaccaucaugcucugcugcaugaccagcugcugcuccugccugaaggggugcugcagcugcggcuccugcugcaaguucgacgaggacgacagcgagcccguccugaagggggugaagcuccacuacacgugaggacuagucccuguucccagagcccacuuuuuuuucuuuuuuugaaauaaaauagccugucuuucagaucucaaaggcucuuuucagagccaccaaaaaaaaaaaaaaaaaaaaaaaaaaaaaaaaaaaaaaaaaaaaaaaaaaaaaaaaaaaaaaaaaaaaaaaaaaaaaaaaaaaaaaaaaaaaaaaaaaaaa

SEQ ID NO: 22808 - RNA, 4094 nt, Artificial Sequence
  SARS-CoV-2/Wuhan/WIV05/2019__EPI_ISL_402128 spike protein mRNA gc (1-1273)(K986P_V987P_D614G_M1229I)
aggagagucccgcagucggcguccagcggcucugcuuguucgugugugugucguugcaggccuuauucaagcuuaccauguucguguuccugguccuccugccccuggugagcucccagugcgugaaccucaccacccgcacgcagcugccgcccgccuacaccaacagcuucacccggggcgucuacuaccccgacaagguguuccgcuccagcgugcugcacuccacccaggaccucuuccugcccuucuucagcaacgucacgugguuccacgccauccacguguccgggaccaacggcaccaagcgguucgacaacccggugcugcccuucaacgacggggucuacuucgcgagcaccgagaaguccaacaucauccgcggcuggaucuucgggacgacccucgacagcaagacccagucccugcugaucgugaacaacgccaccaacguggucaucaaggugugcgaguuccaguucugcaacgaccccuuccucggcguguacuaccacaagaacaacaagagcuggauggaguccgaguuccgggucuacagcuccgccaacaacugcacguucgaguacgugagccagcccuuccugauggaccuggagggcaagcaggggaacuucaagaaccuccgcgaguucguguucaagaacaucgacggcuacuucaagaucuacuccaagcacaccccgaucaaccugguccgggaccugccccagggguucagcgcccucgagccccugguggaccugcccaucggcaucaacaucacccgcuuccagacccuccuggcccugcaccgguccuaccucacgccgggggacagcagcuccggcuggaccgcgggcgccgccgccuacuacgugggguaccugcagccccgcaccuuccugcucaaguacaacgagaacggcaccaucacggacgcggucgacugcgcccuggacccccugagcgagaccaagugcacccucaaguccuucaccguggagaaggggaucuaccagacgagcaacuuccgggugcagcccaccgaguccaucguccgcuucccgaacaucaccaaccugugccccuucggcgagguguucaacgccacccgguucgccagcgucuacgccuggaaccgcaagcggaucuccaacugcguggcggacuacagcgugcuguacaacuccgccagcuucuccacguucaagugcuacggcgucagccccaccaagcucaacgaccugugcuucaccaacguguacgccgacuccuucgugauccgcggggacgagguccggcagaucgcccccggccagaccgggaagaucgccgacuacaacuacaagcugccggacgacuucacgggcugcgugaucgcguggaacagcaacaaccucgacuccaaggucgggggcaacuacaacuaccuguaccgccuguuccgcaagagcaaccucaagcccuucgagcgggacaucuccaccgagaucuaccaggccggcagcacccccugcaacgggguggagggcuucaacugcuacuucccccugcaguccuacggguuccagccgaccaacggcgugggguaccagcccuaccggguggucgugcugagcuucgagcuccugcacgcccccgccacggugugcggccccaagaaguccaccaaccuggucaagaacaagugcgugaacuucaacuucaacggccucaccgggaccggcgugcugaccgagagcaacaagaaguuccugccguuccagcaguucgggcgcgacaucgccgacacgaccgacgcgguccgcgacccccagacccuggagauccucgacaucacccccugcagcuucggcgggguguccgugaucacgccgggcaccaacaccagcaaccaggucgccgugcuguaccagggcgugaacugcaccgagguccccguggccauccacgccgaccagcugacgcccaccuggcggguguacuccaccggcagcaacgucuuccagacccgcgccgggugccucaucggcgcggagcacgugaacaacuccuacgagugcgacauccccaucggggccggcaucugcgccagcuaccagacgcagaccaacuccccgcggcgcgcccggagcguggcgucccagagcaucaucgccuacaccaugucccugggcgccgagaacagcgucgccuacuccaacaacagcaucgccauccccaccaacuucacgaucuccgugaccaccgagauccugcccgugagcaugaccaagacgagcgucgacugcaccauguacaucugcggggacuccaccgagugcagcaaccuccugcugcaguacggcuccuucugcacccagcucaaccgcgcgcugacggggaucgccguggagcaggacaagaacacccaggagguguucgcccaggucaagcagaucuacaagacgcccccgaucaaggacuucggcggguucaacuucagccagauccugcccgaccccuccaagcccagcaagcgguccuucaucgaggaccuccuguucaacaaggugacccuggccgacgccggcuucaucaagcaguacggcgacugccucggggacaucgcggcccgcgaccugaucugcgcccagaaguucaacggccugaccgugcucccgccccugcugaccgacgagaugaucgcccaguacaccagcgcccuccuggcggggaccaucacguccggcuggaccuucggggccggcgccgcccugcagauccccuucgcgaugcagauggccuaccgguucaacggcaucggggucacccagaacgugcucuacgagaaccagaagcugaucgccaaccaguucaacagcgccaucggcaagauccaggacucccugagcuccaccgccagcgcgcucgggaagcugcaggacguggucaaccagaacgcccaggcccugaacacgcucgugaagcagcuguccagcaacuucggcgccaucuccagcgugcugaacgacauccucucccgccuggacccgcccgaggccgaggugcagaucgaccggcugaucaccgggcgccuccagagccugcagaccuacgugacccagcagcugauccgggcggccgagauccgcgccagcgccaaccucgccgcgaccaagauguccgagugcguccugggccagagcaagcggguggacuucugcggcaagggguaccaccugauguccuucccccagagcgccccgcacggcguggucuuccuccacgugacguacguccccgcccaggagaagaacuucaccaccgcccccgcgaucugccacgacgggaaggcccacuucccccgcgagggcguguucguguccaacgggacccacugguucgucacgcagcggaacuucuacgagccgcagaucaucaccaccgacaacaccuucgugagcggcaacugcgacguggucaucggcaucgugaacaacacgguguacgacccccugcagcccgagcuggacuccuucaaggaggagcucgacaaguacuucaagaaccacaccagccccgacgucgaccugggggacaucuccggcaucaacgccagcguggugaacauccagaaggagaucgaccgccugaacgaggucgccaagaaccucaacgagucccugaucgaccugcaggagcucgggaaguacgagcaguacaucaaguggccgugguacaucuggcugggcuucaucgccggccugaucgcgaucgugaucgugaccaucaugcucugcugcaugaccagcugcugcuccugccugaaggggugcugcagcugcggcuccugcugcaaguucgacgaggacgacagcgagcccguccugaagggggugaagcuccacuacacgugaggacuagucccuguucccagagcccacuuuuuuuucuuuuuuugaaauaaaauagccugucuuucagaucucaaaggcucuuuucagagccaccaaaaaaaaaaaaaaaaaaaaaaaaaaaaaaaaaaaaaaaaaaaaaaaaaaaaaaaaaaaaaaaaaaaaaaaaaaaaaaaaaaaaaaaaaaaaaaaaaaaaa

SEQ ID NO: 22809 - RNA, 4088 nt, Artificial Sequence
  SARS-CoV-2/Wuhan/WIV05/2019__EPI_ISL_402128 spike protein mRNA gc (1-1273)(H69del_V70del_A222V_Y453F_S477N_D614G_I692V) R10294
aggagagucccgcagucggcguccagcggcucugcuuguucgugugugugucguugcaggccuuauucaagcuuaccauguucguguuccugguccuccugccccuggugagcucccagugcgugaaccucaccacccgcacgcagcugccgcccgccuacaccaacagcuucacccggggcgucuacuaccccgacaagguguuccgcuccagcgugcugcacuccacccaggaccucuuccugcccuucuucagcaacgucacgugguuccacgccaucuccgggaccaacggcaccaagcgguucgacaacccggugcugcccuucaacgacggggucuacuucgcgagcaccgagaaguccaacaucauccgcggcuggaucuucgggacgacccucgacagcaagacccagucccugcugaucgugaacaacgccaccaacguggucaucaaggugugcgaguuccaguucugcaacgaccccuuccucggcguguacuaccacaagaacaacaagagcuggauggaguccgaguuccgggucuacagcuccgccaacaacugcacguucgaguacgugagccagcccuuccugauggaccuggagggcaagcaggggaacuucaagaaccuccgcgaguucguguucaagaacaucgacggcuacuucaagaucuacuccaagcacaccccgaucaaccugguccgggaccugccccagggguucagcguccucgagccccugguggaccugcccaucggcaucaacaucacccgcuuccagacccuccuggcccugcaccgguccuaccucacgccgggggacagcagcuccggcuggaccgcgggcgccgccgccuacuacgugggguaccugcagccccgcaccuuccugcucaaguacaacgagaacggcaccaucacggacgcggucgacugcgcccuggacccccugagcgagaccaagugcacccucaaguccuucaccguggagaaggggaucuaccagacgagcaacuuccgggugcagcccaccgaguccaucguccgcuucccgaacaucaccaaccugugccccuucggcgagguguucaacgccacccgguucgccagcgucuacgccuggaaccgcaagcggaucuccaacugcguggcggacuacagcgugcuguacaacuccgccagcuucuccacguucaagugcuacggcgucagccccaccaagcucaacgaccugugcuucaccaacguguacgccgacuccuucgugauccgcggggacgagguccggcagaucgcccccggccagaccgggaagaucgccgacuacaacuacaagcugccggacgacuucacgggcugcgugaucgcguggaacagcaacaaccucgacuccaaggucgggggcaacuacaacuaccuguuccgccuguuccgcaagagcaaccucaagcccuucgagcgggacaucuccaccgagaucuaccaggccggcaacacccccugcaacgggguggagggcuucaacugcuacuucccccugcaguccuacggguuccagccgaccaacggcgugggguaccagcccuaccggguggucgugcugagcuucgagcuccugcacgcccccgccacggugugcggccccaagaaguccaccaaccuggucaagaacaagugcgugaacuucaacuucaacggccucaccgggaccggcgugcugaccgagagcaacaagaaguuccugccguuccagcaguucgggcgcgacaucgccgacacgaccgacgcgguccgcgacccccagacccuggagauccucgacaucacccccugcagcuucggcgggguguccgugaucacgccgggcaccaacaccagcaaccaggucgccgugcuguaccagggcgugaacugcaccgagguccccguggccauccacgccgaccagcugacgcccaccuggcggguguacuccaccggcagcaacgucuuccagacccgcgccgggugccucaucggcgcggagcacgugaacaacuccuacgagugcgacauccccaucggggccggcaucugcgccagcuaccagacgcagaccaacuccccgcggcgcgcccggagcguggcgucccagagcgucaucgccuacaccaugucccugggcgccgagaacagcgucgccuacuccaacaacagcaucgccauccccaccaacuucacgaucuccgugaccaccgagauccugcccgugagcaugaccaagacgagcgucgacugcaccauguacaucugcggggacuccaccgagugcagcaaccuccugcugcaguacggcuccuucugcacccagcucaaccgcgcgcugacggggaucgccguggagcaggacaagaacacccaggagguguucgcccaggucaagcagaucuacaagacgcccccgaucaaggacuucggcggguucaacuucagccagauccugcccgaccccuccaagcccagcaagcgguccuucaucgaggaccuccuguucaacaaggugacccuggccgacgccggcuucaucaagcaguacggcgacugccucggggacaucgcggcccgcgaccugaucugcgcccagaaguucaacggccugaccgugcucccgccccugcugaccgacgagaugaucgcccaguacaccagcgcccuccuggcggggaccaucacguccggcuggaccuucggggccggcgccgcccugcagauccccuucgcgaugcagauggccuaccgguucaacggcaucggggucacccagaacgugcucuacgagaaccagaagcugaucgccaaccaguucaacagcgccaucggcaagauccaggacucccugagcuccaccgccagcgcgcucgggaagcugcaggacguggucaaccagaacgcccaggcccugaacacgcucgugaagcagcuguccagcaacuucggcgccaucuccagcgugcugaacgacauccucucccgccuggacaaggucgaggccgaggugcagaucgaccggcugaucaccgggcgccuccagagccugcagaccuacgugacccagcagcugauccgggcggccgagauccgcgccagcgccaaccucgccgcgaccaagauguccgagugcguccugggccagagcaagcggguggacuucugcggcaagggguaccaccugauguccuucccccagagcgccccgcacggcguggucuuccuccacgugacguacguccccgcccaggagaagaacuucaccaccgcccccgcgaucugccacgacgggaaggcccacuucccccgcgagggcguguucguguccaacgggacccacugguucgucacgcagcggaacuucuacgagccgcagaucaucaccaccgacaacaccuucgugagcggcaacugcgacguggucaucggcaucgugaacaacacgguguacgacccccugcagcccgagcuggacuccuucaaggaggagcucgacaaguacuucaagaaccacaccagccccgacgucgaccugggggacaucuccggcaucaacgccagcguggugaacauccagaaggagaucgaccgccugaacgaggucgccaagaaccucaacgagucccugaucgaccugcaggagcucgggaaguacgagcaguacaucaaguggccgugguacaucuggcugggcuucaucgccggccugaucgcgaucgugauggugaccaucaugcucugcugcaugaccagcugcugcuccugccugaaggggugcugcagcugcggcuccugcugcaaguucgacgaggacgacagcgagcccguccugaagggggugaagcuccacuacacgugaggacuagucccuguucccagagcccacuuuuuuuucuuuuuuugaaauaaaauagccugucuuucagaucucaaaggcucuuuucagagccaccaaaaaaaaaaaaaaaaaaaaaaaaaaaaaaaaaaaaaaaaaaaaaaaaaaaaaaaaaaaaaaaaaaaaaaaaaaaaaaaaaaaaaaaaaaaaaaaaaaaaa

SEQ ID NO: 22810 - RNA, 4088 nt, Artificial Sequence
  SARS-CoV-2/Wuhan/WIV05/2019__EPI_ISL_402128 spike protein mRNA gc (1-1273)(K986P_V987P_H69del_V70del_A222V_Y453F_S477N_D614G_I692V) R10295
aggagagucccgcagucggcguccagcggcucugcuuguucgugugugugucguugcaggccuuauucaagcuuaccauguucguguuccugguccuccugccccuggugagcucccagugcgugaaccucaccacccgcacgcagcugccgcccgccuacaccaacagcuucacccggggcgucuacuaccccgacaagguguuccgcuccagcgugcugcacuccacccaggaccucuuccugcccuucuucagcaacgucacgugguuccacgccaucuccgggaccaacggcaccaagcgguucgacaacccggugcugcccuucaacgacggggucuacuucgcgagcaccgagaaguccaacaucauccgcggcuggaucuucgggacgacccucgacagcaagacccagucccugcugaucgugaacaacgccaccaacguggucaucaaggugugcgaguuccaguucugcaacgaccccuuccucggcguguacuaccacaagaacaacaagagcuggauggaguccgaguuccgggucuacagcuccgccaacaacugcacguucgaguacgugagccagcccuuccugauggaccuggagggcaagcaggggaacuucaagaaccuccgcgaguucguguucaagaacaucgacggcuacuucaagaucuacuccaagcacaccccgaucaaccugguccgggaccugccccagggguucagcguccucgagccccugguggaccugcccaucggcaucaacaucacccgcuuccagacccuccuggcccugcaccgguccuaccucacgccgggggacagcagcuccggcuggaccgcgggcgccgccgccuacuacgugggguaccugcagccccgcaccuuccugcucaaguacaacgagaacggcaccaucacggacgcggucgacugcgcccuggacccccugagcgagaccaagugcacccucaaguccuucaccguggagaaggggaucuaccagacgagcaacuuccgggugcagcccaccgaguccaucguccgcuucccgaacaucaccaaccugugccccuucggcgagguguucaacgccacccgguucgccagcgucuacgccuggaaccgcaagcggaucuccaacugcguggcggacuacagcgugcuguacaacuccgccagcuucuccacguucaagugcuacggcgucagccccaccaagcucaacgaccugugcuucaccaacguguacgccgacuccuucgugauccgcggggacgagguccggcagaucgcccccggccagaccgggaagaucgccgacuacaacuacaagcugccggacgacuucacgggcugcgugaucgcguggaacagcaacaaccucgacuccaaggucgggggcaacuacaacuaccuguuccgccuguuccgcaagagcaaccucaagcccuucgagcgggacaucuccaccgagaucuaccaggccggcaacacccccugcaacgggguggagggcuucaacugcuacuucccccugcaguccuacggguuccagccgaccaacggcgugggguaccagcccuaccggguggucgugcugagcuucgagcuccugcacgcccccgccacggugugcggccccaagaaguccaccaaccuggucaagaacaagugcgugaacuucaacuucaacggccucaccgggaccggcgugcugaccgagagcaacaagaaguuccugccguuccagcaguucgggcgcgacaucgccgacacgaccgacgcgguccgcgacccccagacccuggagauccucgacaucacccccugcagcuucggcgggguguccgugaucacgccgggcaccaacaccagcaaccaggucgccgugcuguaccagggcgugaacugcaccgagguccccguggccauccacgccgaccagcugacgcccaccuggcggguguacuccaccggcagcaacgucuuccagacccgcgccgggugccucaucggcgcggagcacgugaacaacuccuacgagugcgacauccccaucggggccggcaucugcgccagcuaccagacgcagaccaacuccccgcggcgcgcccggagcguggcgucccagagcgucaucgccuacaccaugucccugggcgccgagaacagcgucgccuacuccaacaacagcaucgccauccccaccaacuucacgaucuccgugaccaccgagauccugcccgugagcaugaccaagacgagcgucgacugcaccauguacaucugcggggacuccaccgagugcagcaaccuccugcugcaguacggcuccuucugcacccagcucaaccgcgcgcugacggggaucgccguggagcaggacaagaacacccaggagguguucgcccaggucaagcagaucuacaagacgcccccgaucaaggacuucggcggguucaacuucagccagauccugcccgaccccuccaagcccagcaagcgguccuucaucgaggaccuccuguucaacaaggugacccuggccgacgccggcuucaucaagcaguacggcgacugccucggggacaucgcggcccgcgaccugaucugcgcccagaaguucaacggccugaccgugcucccgccccugcugaccgacgagaugaucgcccaguacaccagcgcccuccuggcggggaccaucacguccggcuggaccuucggggccggcgccgcccugcagauccccuucgcgaugcagauggccuaccgguucaacggcaucggggucacccagaacgugcucuacgagaaccagaagcugaucgccaaccaguucaacagcgccaucggcaagauccaggacucccugagcuccaccgccagcgcgcucgggaagcugcaggacguggucaaccagaacgcccaggcccugaacacgcucgugaagcagcuguccagcaacuucggcgccaucuccagcgugcugaacgacauccucucccgccuggacccgcccgaggccgaggugcagaucgaccggcugaucaccgggcgccuccagagccugcagaccuacgugacccagcagcugauccgggcggccgagauccgcgccagcgccaaccucgccgcgaccaagauguccgagugcguccugggccagagcaagcggguggacuucugcggcaagggguaccaccugauguccuucccccagagcgccccgcacggcguggucuuccuccacgugacguacguccccgcccaggagaagaacuucaccaccgcccccgcgaucugccacgacgggaaggcccacuucccccgcgagggcguguucguguccaacgggacccacugguucgucacgcagcggaacuucuacgagccgcagaucaucaccaccgacaacaccuucgugagcggcaacugcgacguggucaucggcaucgugaacaacacgguguacgacccccugcagcccgagcuggacuccuucaaggaggagcucgacaaguacuucaagaaccacaccagccccgacgucgaccugggggacaucuccggcaucaacgccagcguggugaacauccagaaggagaucgaccgccugaacgaggucgccaagaaccucaacgagucccugaucgaccugcaggagcucgggaaguacgagcaguacaucaaguggccgugguacaucuggcugggcuucaucgccggccugaucgcgaucgugauggugaccaucaugcucugcugcaugaccagcugcugcuccugccugaaggggugcugcagcugcggcuccugcugcaaguucgacgaggacgacagcgagcccguccugaagggggugaagcuccacuacacgugaggacuagucccuguucccagagcccacuuuuuuuucuuuuuuugaaauaaaauagccugucuuucagaucucaaaggcucuuuucagagccaccaaaaaaaaaaaaaaaaaaaaaaaaaaaaaaaaaaaaaaaaaaaaaaaaaaaaaaaaaaaaaaaaaaaaaaaaaaaaaaaaaaaaaaaaaaaaaaaaaaaaa

SEQ ID NO: 22811 - RNA, 4088 nt, Artificial Sequence
  SARS-CoV-2/Wuhan/WIV05/2019__EPI_ISL_402128 spike protein mRNA gc (1-1273)(H69del_V70del_Y453F_D614G_I692V_M1229I)
aggagagucccgcagucggcguccagcggcucugcuuguucgugugugugucguugcaggccuuauucaagcuuaccauguucguguuccugguccuccugccccuggugagcucccagugcgugaaccucaccacccgcacgcagcugccgcccgccuacaccaacagcuucacccggggcgucuacuaccccgacaagguguuccgcuccagcgugcugcacuccacccaggaccucuuccugcccuucuucagcaacgucacgugguuccacgccaucuccgggaccaacggcaccaagcgguucgacaacccggugcugcccuucaacgacggggucuacuucgcgagcaccgagaaguccaacaucauccgcggcuggaucuucgggacgacccucgacagcaagacccagucccugcugaucgugaacaacgccaccaacguggucaucaaggugugcgaguuccaguucugcaacgaccccuuccucggcguguacuaccacaagaacaacaagagcuggauggaguccgaguuccgggucuacagcuccgccaacaacugcacguucgaguacgugagccagcccuuccugauggaccuggagggcaagcaggggaacuucaagaaccuccgcgaguucguguucaagaacaucgacggcuacuucaagaucuacuccaagcacaccccgaucaaccugguccgggaccugccccagggguucagcgcccucgagccccugguggaccugcccaucggcaucaacaucacccgcuuccagacccuccuggcccugcaccgguccuaccucacgccgggggacagcagcuccggcuggaccgcgggcgccgccgccuacuacgugggguaccugcagccccgcaccuuccugcucaaguacaacgagaacggcaccaucacggacgcggucgacugcgcccuggacccccugagcgagaccaagugcacccucaaguccuucaccguggagaaggggaucuaccagacgagcaacuuccgggugcagcccaccgaguccaucguccgcuucccgaacaucaccaaccugugccccuucggcgagguguucaacgccacccgguucgccagcgucuacgccuggaaccgcaagcggaucuccaacugcguggcggacuacagcgugcuguacaacuccgccagcuucuccacguucaagugcuacggcgucagccccaccaagcucaacgaccugugcuucaccaacguguacgccgacuccuucgugauccgcggggacgagguccggcagaucgcccccggccagaccgggaagaucgccgacuacaacuacaagcugccggacgacuucacgggcugcgugaucgcguggaacagcaacaaccucgacuccaaggucgggggcaacuacaacuaccuguuccgccuguuccgcaagagcaaccucaagcccuucgagcgggacaucuccaccgagaucuaccaggccggcagcacccccugcaacgggguggagggcuucaacugcuacuucccccugcaguccuacggguuccagccgaccaacggcgugggguaccagcccuaccggguggucgugcugagcuucgagcuccugcacgcccccgccacggugugcggccccaagaaguccaccaaccuggucaagaacaagugcgugaacuucaacuucaacggccucaccgggaccggcgugcugaccgagagcaacaagaaguuccugccguuccagcaguucgggcgcgacaucgccgacacgaccgacgcgguccgcgacccccagacccuggagauccucgacaucacccccugcagcuucggcgggguguccgugaucacgccgggcaccaacaccagcaaccaggucgccgugcuguaccagggcgugaacugcaccgagguccccguggccauccacgccgaccagcugacgcccaccuggcggguguacuccaccggcagcaacgucuuccagacccgcgccgggugccucaucggcgcggagcacgugaacaacuccuacgagugcgacauccccaucggggccggcaucugcgccagcuaccagacgcagaccaacuccccgcggcgcgcccggagcguggcgucccagagcgugaucgccuacaccaugucccugggcgccgagaacagcgucgccuacuccaacaacagcaucgccauccccaccaacuucacgaucuccgugaccaccgagauccugcccgugagcaugaccaagacgagcgucgacugcaccauguacaucugcggggacuccaccgagugcagcaaccuccugcugcaguacggcuccuucugcacccagcucaaccgcgcgcugacggggaucgccguggagcaggacaagaacacccaggagguguucgcccaggucaagcagaucuacaagacgcccccgaucaaggacuucggcggguucaacuucagccagauccugcccgaccccuccaagcccagcaagcgguccuucaucgaggaccuccuguucaacaaggugacccuggccgacgccggcuucaucaagcaguacggcgacugccucggggacaucgcggcccgcgaccugaucugcgcccagaaguucaacggccugaccgugcucccgccccugcugaccgacgagaugaucgcccaguacaccagcgcccuccuggcggggaccaucacguccggcuggaccuucggggccggcgccgcccugcagauccccuucgcgaugcagauggccuaccgguucaacggcaucggggucacccagaacgugcucuacgagaaccagaagcugaucgccaaccaguucaacagcgccaucggcaagauccaggacucccugagcuccaccgccagcgcgcucgggaagcugcaggacguggucaaccagaacgcccaggcccugaacacgcucgugaagcagcuguccagcaacuucggcgccaucuccagcgugcugaacgacauccucucccgccuggacaaggucgaggccgaggugcagaucgaccggcugaucaccgggcgccuccagagccugcagaccuacgugacccagcagcugauccgggcggccgagauccgcgccagcgccaaccucgccgcgaccaagauguccgagugcguccugggccagagcaagcggguggacuucugcggcaagggguaccaccugauguccuucccccagagcgccccgcacggcguggucuuccuccacgugacguacguccccgcccaggagaagaacuucaccaccgcccccgcgaucugccacgacgggaaggcccacuucccccgcgagggcguguucguguccaacgggacccacugguucgucacgcagcggaacuucuacgagccgcagaucaucaccaccgacaacaccuucgugagcggcaacugcgacguggucaucggcaucgugaacaacacgguguacgacccccugcagcccgagcuggacuccuucaaggaggagcucgacaaguacuucaagaaccacaccagccccgacgucgaccugggggacaucuccggcaucaacgccagcguggugaacauccagaaggagaucgaccgccugaacgaggucgccaagaaccucaacgagucccugaucgaccugcaggagcucgggaaguacgagcaguacaucaaguggccgugguacaucuggcugggcuucaucgccggccugaucgcgaucgugaucgugaccaucaugcucugcugcaugaccagcugcugcuccugccugaaggggugcugcagcugcggcuccugcugcaaguucgacgaggacgacagcgagcccguccugaagggggugaagcuccacuacacgugaggacuagucccuguucccagagcccacuuuuuuuucuuuuuuugaaauaaaauagccugucuuucagaucucaaaggcucuuuucagagccaccaaaaaaaaaaaaaaaaaaaaaaaaaaaaaaaaaaaaaaaaaaaaaaaaaaaaaaaaaaaaaaaaaaaaaaaaaaaaaaaaaaaaaaaaaaaaaaaaaaaaa

SEQ ID NO: 22812 - RNA, 4088 nt, Artificial Sequence
  SARS-CoV-2/Wuhan/WIV05/2019__EPI_ISL_402128 spike protein mRNA gc (1-1273)(K986P_V987P_H69del_V70del_Y453F_D614G_I692V_M1229I)
aggagagucccgcagucggcguccagcggcucugcuuguucgugugugugucguugcaggccuuauucaagcuuaccauguucguguuccugguccuccugccccuggugagcucccagugcgugaaccucaccacccgcacgcagcugccgcccgccuacaccaacagcuucacccggggcgucuacuaccccgacaagguguuccgcuccagcgugcugcacuccacccaggaccucuuccugcccuucuucagcaacgucacgugguuccacgccaucuccgggaccaacggcaccaagcgguucgacaacccggugcugcccuucaacgacggggucuacuucgcgagcaccgagaaguccaacaucauccgcggcuggaucuucgggacgacccucgacagcaagacccagucccugcugaucgugaacaacgccaccaacguggucaucaaggugugcgaguuccaguucugcaacgaccccuuccucggcguguacuaccacaagaacaacaagagcuggauggaguccgaguuccgggucuacagcuccgccaacaacugcacguucgaguacgugagccagcccuuccugauggaccuggagggcaagcaggggaacuucaagaaccuccgcgaguucguguucaagaacaucgacggcuacuucaagaucuacuccaagcacaccccgaucaaccugguccgggaccugccccagggguucagcgcccucgagccccugguggaccugcccaucggcaucaacaucacccgcuuccagacccuccuggcccugcaccgguccuaccucacgccgggggacagcagcuccggcuggaccgcgggcgccgccgccuacuacgugggguaccugcagccccgcaccuuccugcucaaguacaacgagaacggcaccaucacggacgcggucgacugcgcccuggacccccugagcgagaccaagugcacccucaaguccuucaccguggagaaggggaucuaccagacgagcaacuuccgggugcagcccaccgaguccaucguccgcuucccgaacaucaccaaccugugccccuucggcgagguguucaacgccacccgguucgccagcgucuacgccuggaaccgcaagcggaucuccaacugcguggcggacuacagcgugcuguacaacuccgccagcuucuccacguucaagugcuacggcgucagccccaccaagcucaacgaccugugcuucaccaacguguacgccgacuccuucgugauccgcggggacgagguccggcagaucgcccccggccagaccgggaagaucgccgacuacaacuacaagcugccggacgacuucacgggcugcgugaucgcguggaacagcaacaaccucgacuccaaggucgggggcaacuacaacuaccuguuccgccuguuccgcaagagcaaccucaagcccuucgagcgggacaucuccaccgagaucuaccaggccggcagcacccccugcaacgggguggagggcuucaacugcuacuucccccugcaguccuacggguuccagccgaccaacggcgugggguaccagcccuaccggguggucgugcugagcuucgagcuccugcacgcccccgccacggugugcggccccaagaaguccaccaaccuggucaagaacaagugcgugaacuucaacuucaacggccucaccgggaccggcgugcugaccgagagcaacaagaaguuccugccguuccagcaguucgggcgcgacaucgccgacacgaccgacgcgguccgcgacccccagacccuggagauccucgacaucacccccugcagcuucggcgggguguccgugaucacgccgggcaccaacaccagcaaccaggucgccgugcuguaccagggcgugaacugcaccgagguccccguggccauccacgccgaccagcugacgcccaccuggcggguguacuccaccggcagcaacgucuuccagacccgcgccgggugccucaucggcgcggagcacgugaacaacuccuacgagugcgacauccccaucggggccggcaucugcgccagcuaccagacgcagaccaacuccccgcggcgcgcccggagcguggcgucccagagcgugaucgccuacaccaugucccugggcgccgagaacagcgucgccuacuccaacaacagcaucgccauccccaccaacuucacgaucuccgugaccaccgagauccugcccgugagcaugaccaagacgagcgucgacugcaccauguacaucugcggggacuccaccgagugcagcaaccuccugcugcaguacggcuccuucugcacccagcucaaccgcgcgcugacggggaucgccguggagcaggacaagaacacccaggagguguucgcccaggucaagcagaucuacaagacgcccccgaucaaggacuucggcggguucaacuucagccagauccugcccgaccccuccaagcccagcaagcgguccuucaucgaggaccuccuguucaacaaggugacccuggccgacgccggcuucaucaagcaguacggcgacugccucggggacaucgcggcccgcgaccugaucugcgcccagaaguucaacggccugaccgugcucccgccccugcugaccgacgagaugaucgcccaguacaccagcgcccuccuggcggggaccaucacguccggcuggaccuucggggccggcgccgcccugcagauccccuucgcgaugcagauggccuaccgguucaacggcaucggggucacccagaacgugcucuacgagaaccagaagcugaucgccaaccaguucaacagcgccaucggcaagauccaggacucccugagcuccaccgccagcgcgcucgggaagcugcaggacguggucaaccagaacgcccaggcccugaacacgcucgugaagcagcuguccagcaacuucggcgccaucuccagcgugcugaacgacauccucucccgccuggacccgcccgaggccgaggugcagaucgaccggcugaucaccgggcgccuccagagccugcagaccuacgugacccagcagcugauccgggcggccgagauccgcgccagcgccaaccucgccgcgaccaagauguccgagugcguccugggccagagcaagcggguggacuucugcggcaagggguaccaccugauguccuucccccagagcgccccgcacggcguggucuuccuccacgugacguacguccccgcccaggagaagaacuucaccaccgcccccgcgaucugccacgacgggaaggcccacuucccccgcgagggcguguucguguccaacgggacccacugguucgucacgcagcggaacuucuacgagccgcagaucaucaccaccgacaacaccuucgugagcggcaacugcgacguggucaucggcaucgugaacaacacgguguacgacccccugcagcccgagcuggacuccuucaaggaggagcucgacaaguacuucaagaaccacaccagccccgacgucgaccugggggacaucuccggcaucaacgccagcguggugaacauccagaaggagaucgaccgccugaacgaggucgccaagaaccucaacgagucccugaucgaccugcaggagcucgggaaguacgagcaguacaucaaguggccgugguacaucuggcugggcuucaucgccggccugaucgcgaucgugaucgugaccaucaugcucugcugcaugaccagcugcugcuccugccugaaggggugcugcagcugcggcuccugcugcaaguucgacgaggacgacagcgagcccguccugaagggggugaagcuccacuacacgugaggacuagucccuguucccagagcccacuuuuuuuucuuuuuuugaaauaaaauagccugucuuucagaucucaaaggcucuuuucagagccaccaaaaaaaaaaaaaaaaaaaaaaaaaaaaaaaaaaaaaaaaaaaaaaaaaaaaaaaaaaaaaaaaaaaaaaaaaaaaaaaaaaaaaaaaaaaaaaaaaaaaa

SEQ ID NO: 22813 - RNA, 4039 nt, Artificial Sequence
  SARS-CoV-2/Wuhan/WIV05/2019__EPI_ISL_402128 spike protein mRNA gc (1-1273)(K986P_V987P_F817P_A892P_A899P_A942P) R9848
aggagaaagcuuaccauguucguguuccugguccuccugccccuggugagcucccagugcgugaaccucaccacccgcacgcagcugccgcccgccuacaccaacagcuucacccggggcgucuacuaccccgacaagguguuccgcuccagcgugcugcacuccacccaggaccucuuccugcccuucuucagcaacgucacgugguuccacgccauccacguguccgggaccaacggcaccaagcgguucgacaacccggugcugcccuucaacgacggggucuacuucgcgagcaccgagaaguccaacaucauccgcggcuggaucuucgggacgacccucgacagcaagacccagucccugcugaucgugaacaacgccaccaacguggucaucaaggugugcgaguuccaguucugcaacgaccccuuccucggcguguacuaccacaagaacaacaagagcuggauggaguccgaguuccgggucuacagcuccgccaacaacugcacguucgaguacgugagccagcccuuccugauggaccuggagggcaagcaggggaacuucaagaaccuccgcgaguucguguucaagaacaucgacggcuacuucaagaucuacuccaagcacaccccgaucaaccugguccgggaccugccccagggguucagcgcccucgagccccugguggaccugcccaucggcaucaacaucacccgcuuccagacccuccuggcccugcaccgguccuaccucacgccgggggacagcagcuccggcuggaccgcgggcgccgccgccuacuacgugggguaccugcagccccgcaccuuccugcucaaguacaacgagaacggcaccaucacggacgcggucgacugcgcccuggacccccugagcgagaccaagugcacccucaaguccuucaccguggagaaggggaucuaccagacgagcaacuuccgggugcagcccaccgaguccaucguccgcuucccgaacaucaccaaccugugccccuucggcgagguguucaacgccacccgguucgccagcgucuacgccuggaaccgcaagcggaucuccaacugcguggcggacuacagcgugcuguacaacuccgccagcuucuccacguucaagugcuacggcgucagccccaccaagcucaacgaccugugcuucaccaacguguacgccgacuccuucgugauccgcggggacgagguccggcagaucgcccccggccagaccgggaagaucgccgacuacaacuacaagcugccggacgacuucacgggcugcgugaucgcguggaacagcaacaaccucgacuccaaggucgggggcaacuacaacuaccuguaccgccuguuccgcaagagcaaccucaagcccuucgagcgggacaucuccaccgagaucuaccaggccggcagcacccccugcaacgggguggagggcuucaacugcuacuucccccugcaguccuacggguuccagccgaccaacggcgugggguaccagcccuaccggguggucgugcugagcuucgagcuccugcacgcccccgccacggugugcggccccaagaaguccaccaaccuggucaagaacaagugcgugaacuucaacuucaacggccucaccgggaccggcgugcugaccgagagcaacaagaaguuccugccguuccagcaguucgggcgcgacaucgccgacacgaccgacgcgguccgcgacccccagacccuggagauccucgacaucacccccugcagcuucggcgggguguccgugaucacgccgggcaccaacaccagcaaccaggucgccgugcuguaccaggacgugaacugcaccgagguccccguggccauccacgccgaccagcugacgcccaccuggcggguguacuccaccggcagcaacgucuuccagacccgcgccgggugccucaucggcgcggagcacgugaacaacuccuacgagugcgacauccccaucggggccggcaucugcgccagcuaccagacgcagaccaacuccccgcggcgcgcccggagcguggcgucccagagcaucaucgccuacaccaugucccugggcgccgagaacagcgucgccuacuccaacaacagcaucgccauccccaccaacuucacgaucuccgugaccaccgagauccugcccgugagcaugaccaagacgagcgucgacugcaccauguacaucugcggggacuccaccgagugcagcaaccuccugcugcaguacggcuccuucugcacccagcucaaccgcgcgcugacggggaucgccguggagcaggacaagaacacccaggagguguucgcccaggucaagcagaucuacaagacgcccccgaucaaggacuucggcggguucaacuucagccagauccugcccgaccccuccaagcccagcaagcggucccccaucgaggaccuccuguucaacaaggugacccuggccgacgccggcuucaucaagcaguacggcgacugccucggggacaucgcggcccgcgaccugaucugcgcccagaaguucaacggccugaccgugcucccgccccugcugaccgacgagaugaucgcccaguacaccagcgcccuccuggcggggaccaucacguccggcuggaccuucggggccggccccgcccugcagauccccuucccgaugcagauggccuaccgguucaacggcaucggggucacccagaacgugcucuacgagaaccagaagcugaucgccaaccaguucaacagcgccaucggcaagauccaggacucccugagcuccacccccagcgcgcucgggaagcugcaggacguggucaaccagaacgcccaggcccugaacacgcucgugaagcagcuguccagcaacuucggcgccaucuccagcgugcugaacgacauccucucccgccuggacccgcccgaggccgaggugcagaucgaccggcugaucaccgggcgccuccagagccugcagaccuacgugacccagcagcugauccgggcggccgagauccgcgccagcgccaaccucgccgcgaccaagauguccgagugcguccugggccagagcaagcggguggacuucugcggcaagggguaccaccugauguccuucccccagagcgccccgcacggcguggucuuccuccacgugacguacguccccgcccaggagaagaacuucaccaccgcccccgcgaucugccacgacgggaaggcccacuucccccgcgagggcguguucguguccaacgggacccacugguucgucacgcagcggaacuucuacgagccgcagaucaucaccaccgacaacaccuucgugagcggcaacugcgacguggucaucggcaucgugaacaacacgguguacgacccccugcagcccgagcuggacuccuucaaggaggagcucgacaaguacuucaagaaccacaccagccccgacgucgaccugggggacaucuccggcaucaacgccagcguggugaacauccagaaggagaucgaccgccugaacgaggucgccaagaaccucaacgagucccugaucgaccugcaggagcucgggaaguacgagcaguacaucaaguggccgugguacaucuggcugggcuucaucgccggccugaucgcgaucgugauggugaccaucaugcucugcugcaugaccagcugcugcuccugccugaaggggugcugcagcugcggcuccugcugcaaguucgacgaggacgacagcgagcccguccugaagggggugaagcuccacuacacgugaggacuaguuauaagacugacuagcccgaugggccucccaacgggcccuccuccccuccuugcaccgagauuaauaaaaaaaaaaaaaaaaaaaaaaaaaaaaaaaaaaaaaaaaaaaaaaaaaaaaaaaaaaaaaaaaugcaucccccccccccccccccccccccccccccccaaaggcucuuuucagagccaccagaauu

SEQ ID NO: 22814 - RNA, 1369 nt, Artificial Sequence
  SARS-CoV-2/Wuhan/WIV05/2019__EPI_ISL_402128 spike protein mRNA gc (1-15,334-528) Ferritin construct R10337
aggagaaagcuuaccauguucguguuccugguccuccugccccuggugagcucccagugcaaccugugccccuucggcgagguguucaacgccacccgguucgccagcgucuacgccuggaaccgcaagcggaucuccaacugcguggcggacuacagcgugcuguacaacuccgccagcuucuccacguucaagugcuacggcgucagccccaccaagcucaacgaccugugcuucaccaacguguacgccgacuccuucgugauccgcggggacgagguccggcagaucgcccccggccagaccgggaagaucgccgacuacaacuacaagcugccggacgacuucacgggcugcgugaucgcguggaacagcaacaaccucgacuccaaggucgggggcaacuacaacuaccuguaccgccuguuccgcaagagcaaccucaagcccuucgagcgggacaucuccaccgagaucuaccaggccggcagcacccccugcaacgggguggagggcuucaacugcuacuucccccugcaguccuacggguuccagccgaccaacggcgugggguaccagcccuaccggguggucgugcugagcuucgagcuccugcacgcccccgccacggugugcggccccaagggcggggguggaagcggcggggguggaagugacaucaucaagcuccugaacgagcaggucaacaaggagaugcaguccagcaaccuguacauguccaugagcuccuggugcuacacccacagccucgacggcgccgggcuguuccuguucgaccacgccgcggaggaguacgagcacgccaagaagcucaucaucuuccugaacgagaacaacgugcccgugcagcugaccuccaucagcgccccggagcacaaguucgagggccucacgcagaucuuccagaaggccuacgagcacgagcagcacaucuccgagagcaucaacaacaucguggaccacgccaucaaguccaaggaccacgcgaccuucaacuuccugcagugguacgucgccgagcagcacgaggaggaggugcuguucaaggacauccucgacaagaucgagcugaucgggaacgagaaccacggccuguaccucgccgaccaguacgugaaggggaucgccaagagccgcaaguccugaggacuaguuauaagacugacuagcccgaugggccucccaacgggcccuccuccccuccuugcaccgagauuaauaaaaaaaaaaaaaaaaaaaaaaaaaaaaaaaaaaaaaaaaaaaaaaaaaaaaaaaaaaaaaaaaugcaucccccccccccccccccccccccccccccccaaaggcucuuuucagagccaccagaauu

SEQ ID NO: 22815 - RNA, 967 nt, Artificial Sequence
  SARS-CoV-2/Wuhan/WIV05/2019__EPI_ISL_402128 spike protein mRNA gc (334-528) Foldon construct R9926
aggagaaagcuuaccaugcccaugggcagccugcagccgcucgccacccuguaccugcucgggaugcugguggccuccguccuggcgaaccugugccccuucggcgagguguucaacgccacccgguucgccagcgucuacgccuggaaccgcaagcggaucuccaacugcguggcggacuacagcgugcuguacaacuccgccagcuucuccacguucaagugcuacggcgucagccccaccaagcucaacgaccugugcuucaccaacguguacgccgacuccuucgugauccgcggggacgagguccggcagaucgcccccggccagaccgggaagaucgccgacuacaacuacaagcugccggacgacuucacgggcugcgugaucgcguggaacagcaacaaccucgacuccaaggucgggggcaacuacaacuaccuguaccgccuguuccgcaagagcaaccucaagcccuucgagcgggacaucuccaccgagaucuaccaggccggcagcacccccugcaacgggguggagggcuucaacugcuacuucccccugcaguccuacggguuccagccgaccaacggcgugggguaccagcccuaccggguggucgugcugagcuucgagcuccugcacgcccccgccacggugugcggccccaagggcagcggcggguacauccccgaggccccgcgcgacggccaggccuacgugcggaaggacggcgaguggguccugcugagcaccuuccucugaggacuaguuauaagacugacuagcccgaugggccucccaacgggcccuccuccccuccuugcaccgagauuaauaaaaaaaaaaaaaaaaaaaaaaaaaaaaaaaaaaaaaaaaaaaaaaaaaaaaaaaaaaaaaaaaugcaucccccccccccccccccccccccccccccccaaaggcucuuuucagagccaccagaauu

SEQ ID NO: 22816 - RNA, 1345 nt, Artificial Sequence
  SARS-CoV-2/Wuhan/WIV05/2019__EPI_ISL_402128 spike protein mRNA gc (1-15,334-528) LumSynth construct R10335
aggagaaagcuuaccauguucguguuccugguccuccugccccuggugagcucccagugcaaccugugccccuucggcgagguguucaacgccacccgguucgccagcgucuacgccuggaaccgcaagcggaucuccaacugcguggcggacuacagcgugcuguacaacuccgccagcuucuccacguucaagugcuacggcgucagccccaccaagcucaacgaccugugcuucaccaacguguacgccgacuccuucgugauccgcggggacgagguccggcagaucgcccccggccagaccgggaagaucgccgacuacaacuacaagcugccggacgacuucacgggcugcgugaucgcguggaacagcaacaaccucgacuccaaggucgggggcaacuacaacuaccuguaccgccuguuccgcaagagcaaccucaagcccuucgagcgggacaucuccaccgagaucuaccaggccggcagcacccccugcaacgggguggagggcuucaacugcuacuucccccugcaguccuacggguuccagccgaccaacggcgugggguaccagcccuaccggguggucgugcugagcuucgagcuccugcacgcccccgccacggugugcggccccaagggcggcggcggcuccggaggcggagguagcgggggacagaucuacgagggcaagcugaccgccgaggggcuccgcuucggcaucguggccagccgguucaaccacgcgcuggucgaccgccugguggagggggccaucgacgccaucgugcggcacggcgggcgcgaggaggacaucacccucguccgggugcccggcuccugggagaucccgguggccgccggcgagcuggcccgcaaggaggacaucgacgcggucaucgccaucggggugcugauccggggcgccacgccccacuucgacuacaucgccagcgagguguccaaggggcucgcggaccugagccuggagcuccgcaagcccaucaccuucggcgucaucaccgccgacacccuggagcaggccaucgagcgggccgggacgaagcacggcaacaagggcugggaggccgcgcuguccgccaucgagauggccaaccucuucaagagccugcgcugaggacuaguuauaagacugacuagcccgaugggccucccaacgggcccuccuccccuccuugcaccgagauuaauaaaaaaaaaaaaaaaaaaaaaaaaaaaaaaaaaaaaaaaaaaaaaaaaaaaaaaaaaaaaaaaaugcaucccccccccccccccccccccccccccccccaaaggcucuuuucagagccaccagaauu

SEQ ID NO: 22817 - RNA, 1306 nt, Artificial Sequence
  SARS-CoV-2/Wuhan/WIV05/2019__EPI_ISL_402128 spike protein mRNA gc (334-528) LumSynth construct R10336
aggagaaagcuuaccaugcagaucuacgagggcaagcugaccgccgaggggcuccgcuucggcaucguggccagccgguucaaccacgcgcuggucgaccgccugguggagggggccaucgacgccaucgugcggcacggcgggcgcgaggaggacaucacccucguccgggugcccggcuccugggagaucccgguggccgccggcgagcuggcccgcaaggaggacaucgacgcggucaucgccaucggggugcugauccggggcgccacgccccacuucgacuacaucgccagcgagguguccaaggggcucgcggaccugagccuggagcuccgcaagcccaucaccuucggcgucaucaccgccgacacccuggagcaggccaucgagcgggccgggacgaagcacggcaacaagggcugggaggccgcgcuguccgccaucgagauggccaaccucuucaagagccugcgcggcgggggcgggagcggcgggggcggcuccgggggcgggaaccugugccccuucggcgagguguucaacgccacccgguucgccagcgucuacgccuggaaccgcaagcggaucuccaacugcguggcggacuacagcgugcuguacaacuccgccagcuucuccacguucaagugcuacggcgucagccccaccaagcucaacgaccugugcuucaccaacguguacgccgacuccuucgugauccgcggggacgagguccggcagaucgcccccggccagaccgggaagaucgccgacuacaacuacaagcugccggacgacuucacgggcugcgugaucgcguggaacagcaacaaccucgacuccaaggucgggggcaacuacaacuaccuguaccgccuguuccgcaagagcaaccucaagcccuucgagcgggacaucuccaccgagaucuaccaggccggcagcacccccugcaacgggguggagggcuucaacugcuacuucccccugcaguccuacggguuccagccgaccaacggcgugggguaccagcccuaccggguggucgugcugagcuucgagcuccugcacgcccccgccacggugugcggccccaagugaggacuaguuauaagacugacuagcccgaugggccucccaacgggcccuccuccccuccuugcaccgagauuaauaaaaaaaaaaaaaaaaaaaaaaaaaaaaaaaaaaaaaaaaaaaaaaaaaaaaaaaaaaaaaaaaugcaucccccccccccccccccccccccccccccccaaaggcucuuuucagagccaccagaauu

SEQ ID NO: 22818 - RNA, 4039 nt, Artificial Sequence
  SARS-CoV-2/Wuhan/WIV05/2019__EPI_ISL_402128 spike protein mRNA gc (1-1273)(D614G)
aggagaaagcuuaccauguucguguuccugguccuccugccccuggugagcucccagugcgugaaccucaccacccgcacgcagcugccgcccgccuacaccaacagcuucacccggggcgucuacuaccccgacaagguguuccgcuccagcgugcugcacuccacccaggaccucuuccugcccuucuucagcaacgucacgugguuccacgccauccacguguccgggaccaacggcaccaagcgguucgacaacccggugcugcccuucaacgacggggucuacuucgcgagcaccgagaaguccaacaucauccgcggcuggaucuucgggacgacccucgacagcaagacccagucccugcugaucgugaacaacgccaccaacguggucaucaaggugugcgaguuccaguucugcaacgaccccuuccucggcguguacuaccacaagaacaacaagagcuggauggaguccgaguuccgggucuacagcuccgccaacaacugcacguucgaguacgugagccagcccuuccugauggaccuggagggcaagcaggggaacuucaagaaccuccgcgaguucguguucaagaacaucgacggcuacuucaagaucuacuccaagcacaccccgaucaaccugguccgggaccugccccagggguucagcgcccucgagccccugguggaccugcccaucggcaucaacaucacccgcuuccagacccuccuggcccugcaccgguccuaccucacgccgggggacagcagcuccggcuggaccgcgggcgccgccgccuacuacgugggguaccugcagccccgcaccuuccugcucaaguacaacgagaacggcaccaucacggacgcggucgacugcgcccuggacccccugagcgagaccaagugcacccucaaguccuucaccguggagaaggggaucuaccagacgagcaacuuccgggugcagcccaccgaguccaucguccgcuucccgaacaucaccaaccugugccccuucggcgagguguucaacgccacccgguucgccagcgucuacgccuggaaccgcaagcggaucuccaacugcguggcggacuacagcgugcuguacaacuccgccagcuucuccacguucaagugcuacggcgucagccccaccaagcucaacgaccugugcuucaccaacguguacgccgacuccuucgugauccgcggggacgagguccggcagaucgcccccggccagaccgggaagaucgccgacuacaacuacaagcugccggacgacuucacgggcugcgugaucgcguggaacagcaacaaccucgacuccaaggucgggggcaacuacaacuaccuguaccgccuguuccgcaagagcaaccucaagcccuucgagcgggacaucuccaccgagaucuaccaggccggcagcacccccugcaacgggguggagggcuucaacugcuacuucccccugcaguccuacggguuccagccgaccaacggcgugggguaccagcccuaccggguggucgugcugagcuucgagcuccugcacgcccccgccacggugugcggccccaagaaguccaccaaccuggucaagaacaagugcgugaacuucaacuucaacggccucaccgggaccggcgugcugaccgagagcaacaagaaguuccugccguuccagcaguucgggcgcgacaucgccgacacgaccgacgcgguccgcgacccccagacccuggagauccucgacaucacccccugcagcuucggcgggguguccgugaucacgccgggcaccaacaccagcaaccaggucgccgugcuguaccagggcgugaacugcaccgagguccccguggccauccacgccgaccagcugacgcccaccuggcggguguacuccaccggcagcaacgucuuccagacccgcgccgggugccucaucggcgcggagcacgugaacaacuccuacgagugcgacauccccaucggggccggcaucugcgccagcuaccagacgcagaccaacuccccgcggcgcgcccggagcguggcgucccagagcaucaucgccuacaccaugucccugggcgccgagaacagcgucgccuacuccaacaacagcaucgccauccccaccaacuucacgaucuccgugaccaccgagauccugcccgugagcaugaccaagacgagcgucgacugcaccauguacaucugcggggacuccaccgagugcagcaaccuccugcugcaguacggcuccuucugcacccagcucaaccgcgcgcugacggggaucgccguggagcaggacaagaacacccaggagguguucgcccaggucaagcagaucuacaagacgcccccgaucaaggacuucggcggguucaacuucagccagauccugcccgaccccuccaagcccagcaagcgguccuucaucgaggaccuccuguucaacaaggugacccuggccgacgccggcuucaucaagcaguacggcgacugccucggggacaucgcggcccgcgaccugaucugcgcccagaaguucaacggccugaccgugcucccgccccugcugaccgacgagaugaucgcccaguacaccagcgcccuccuggcggggaccaucacguccggcuggaccuucggggccggcgccgcccugcagauccccuucgcgaugcagauggccuaccgguucaacggcaucggggucacccagaacgugcucuacgagaaccagaagcugaucgccaaccaguucaacagcgccaucggcaagauccaggacucccugagcuccaccgccagcgcgcucgggaagcugcaggacguggucaaccagaacgcccaggcccugaacacgcucgugaagcagcuguccagcaacuucggcgccaucuccagcgugcugaacgacauccucucccgccuggacaaggucgaggccgaggugcagaucgaccggcugaucaccgggcgccuccagagccugcagaccuacgugacccagcagcugauccgggcggccgagauccgcgccagcgccaaccucgccgcgaccaagauguccgagugcguccugggccagagcaagcggguggacuucugcggcaagggguaccaccugauguccuucccccagagcgccccgcacggcguggucuuccuccacgugacguacguccccgcccaggagaagaacuucaccaccgcccccgcgaucugccacgacgggaaggcccacuucccccgcgagggcguguucguguccaacgggacccacugguucgucacgcagcggaacuucuacgagccgcagaucaucaccaccgacaacaccuucgugagcggcaacugcgacguggucaucggcaucgugaacaacacgguguacgacccccugcagcccgagcuggacuccuucaaggaggagcucgacaaguacuucaagaaccacaccagccccgacgucgaccugggggacaucuccggcaucaacgccagcguggugaacauccagaaggagaucgaccgccugaacgaggucgccaagaaccucaacgagucccugaucgaccugcaggagcucgggaaguacgagcaguacaucaaguggccgugguacaucuggcugggcuucaucgccggccugaucgcgaucgugauggugaccaucaugcucugcugcaugaccagcugcugcuccugccugaaggggugcugcagcugcggcuccugcugcaaguucgacgaggacgacagcgagcccguccugaagggggugaagcuccacuacacgugaggacuaguuauaagacugacuagcccgaugggccucccaacgggcccuccuccccuccuugcaccgagauuaauaaaaaaaaaaaaaaaaaaaaaaaaaaaaaaaaaaaaaaaaaaaaaaaaaaaaaaaaaaaaaaaaugcaucccccccccccccccccccccccccccccccaaaggcucuuuucagagccaccagaauu

SEQ ID NO: 22819 - RNA, 4039 nt, Artificial Sequence
  SARS-CoV-2/Wuhan/WIV05/2019__EPI_ISL_402128 spike protein mRNA gc (1-1273)(K986P_V987P_ D614G) R10165
aggagaaagcuuaccauguucguguuccugguccuccugccccuggugagcucccagugcgugaaccucaccacccgcacgcagcugccgcccgccuacaccaacagcuucacccggggcgucuacuaccccgacaagguguuccgcuccagcgugcugcacuccacccaggaccucuuccugcccuucuucagcaacgucacgugguuccacgccauccacguguccgggaccaacggcaccaagcgguucgacaacccggugcugcccuucaacgacggggucuacuucgcgagcaccgagaaguccaacaucauccgcggcuggaucuucgggacgacccucgacagcaagacccagucccugcugaucgugaacaacgccaccaacguggucaucaaggugugcgaguuccaguucugcaacgaccccuuccucggcguguacuaccacaagaacaacaagagcuggauggaguccgaguuccgggucuacagcuccgccaacaacugcacguucgaguacgugagccagcccuuccugauggaccuggagggcaagcaggggaacuucaagaaccuccgcgaguucguguucaagaacaucgacggcuacuucaagaucuacuccaagcacaccccgaucaaccugguccgggaccugccccagggguucagcgcccucgagccccugguggaccugcccaucggcaucaacaucacccgcuuccagacccuccuggcccugcaccgguccuaccucacgccgggggacagcagcuccggcuggaccgcgggcgccgccgccuacuacgugggguaccugcagccccgcaccuuccugcucaaguacaacgagaacggcaccaucacggacgcggucgacugcgcccuggacccccugagcgagaccaagugcacccucaaguccuucaccguggagaaggggaucuaccagacgagcaacuuccgggugcagcccaccgaguccaucguccgcuucccgaacaucaccaaccugugccccuucggcgagguguucaacgccacccgguucgccagcgucuacgccuggaaccgcaagcggaucuccaacugcguggcggacuacagcgugcuguacaacuccgccagcuucuccacguucaagugcuacggcgucagccccaccaagcucaacgaccugugcuucaccaacguguacgccgacuccuucgugauccgcggggacgagguccggcagaucgcccccggccagaccgggaagaucgccgacuacaacuacaagcugccggacgacuucacgggcugcgugaucgcguggaacagcaacaaccucgacuccaaggucgggggcaacuacaacuaccuguaccgccuguuccgcaagagcaaccucaagcccuucgagcgggacaucuccaccgagaucuaccaggccggcagcacccccugcaacgggguggagggcuucaacugcuacuucccccugcaguccuacggguuccagccgaccaacggcgugggguaccagcccuaccggguggucgugcugagcuucgagcuccugcacgcccccgccacggugugcggccccaagaaguccaccaaccuggucaagaacaagugcgugaacuucaacuucaacggccucaccgggaccggcgugcugaccgagagcaacaagaaguuccugccguuccagcaguucgggcgcgacaucgccgacacgaccgacgcgguccgcgacccccagacccuggagauccucgacaucacccccugcagcuucggcgggguguccgugaucacgccgggcaccaacaccagcaaccaggucgccgugcuguaccagggcgugaacugcaccgagguccccguggccauccacgccgaccagcugacgcccaccuggcggguguacuccaccggcagcaacgucuuccagacccgcgccgggugccucaucggcgcggagcacgugaacaacuccuacgagugcgacauccccaucggggccggcaucugcgccagcuaccagacgcagaccaacuccccgcggcgcgcccggagcguggcgucccagagcaucaucgccuacaccaugucccugggcgccgagaacagcgucgccuacuccaacaacagcaucgccauccccaccaacuucacgaucuccgugaccaccgagauccugcccgugagcaugaccaagacgagcgucgacugcaccauguacaucugcggggacuccaccgagugcagcaaccuccugcugcaguacggcuccuucugcacccagcucaaccgcgcgcugacggggaucgccguggagcaggacaagaacacccaggagguguucgcccaggucaagcagaucuacaagacgcccccgaucaaggacuucggcggguucaacuucagccagauccugcccgaccccuccaagcccagcaagcgguccuucaucgaggaccuccuguucaacaaggugacccuggccgacgccggcuucaucaagcaguacggcgacugccucggggacaucgcggcccgcgaccugaucugcgcccagaaguucaacggccugaccgugcucccgccccugcugaccgacgagaugaucgcccaguacaccagcgcccuccuggcggggaccaucacguccggcuggaccuucggggccggcgccgcccugcagauccccuucgcgaugcagauggccuaccgguucaacggcaucggggucacccagaacgugcucuacgagaaccagaagcugaucgccaaccaguucaacagcgccaucggcaagauccaggacucccugagcuccaccgccagcgcgcucgggaagcugcaggacguggucaaccagaacgcccaggcccugaacacgcucgugaagcagcuguccagcaacuucggcgccaucuccagcgugcugaacgacauccucucccgccuggacccgcccgaggccgaggugcagaucgaccggcugaucaccgggcgccuccagagccugcagaccuacgugacccagcagcugauccgggcggccgagauccgcgccagcgccaaccucgccgcgaccaagauguccgagugcguccugggccagagcaagcggguggacuucugcggcaagggguaccaccugauguccuucccccagagcgccccgcacggcguggucuuccuccacgugacguacguccccgcccaggagaagaacuucaccaccgcccccgcgaucugccacgacgggaaggcccacuucccccgcgagggcguguucguguccaacgggacccacugguucgucacgcagcggaacuucuacgagccgcagaucaucaccaccgacaacaccuucgugagcggcaacugcgacguggucaucggcaucgugaacaacacgguguacgacccccugcagcccgagcuggacuccuucaaggaggagcucgacaaguacuucaagaaccacaccagccccgacgucgaccugggggacaucuccggcaucaacgccagcguggugaacauccagaaggagaucgaccgccugaacgaggucgccaagaaccucaacgagucccugaucgaccugcaggagcucgggaaguacgagcaguacaucaaguggccgugguacaucuggcugggcuucaucgccggccugaucgcgaucgugauggugaccaucaugcucugcugcaugaccagcugcugcuccugccugaaggggugcugcagcugcggcuccugcugcaaguucgacgaggacgacagcgagcccguccugaagggggugaagcuccacuacacgugaggacuaguuauaagacugacuagcccgaugggccucccaacgggcccuccuccccuccuugcaccgagauuaauaaaaaaaaaaaaaaaaaaaaaaaaaaaaaaaaaaaaaaaaaaaaaaaaaaaaaaaaaaaaaaaaugcaucccccccccccccccccccccccccccccccaaaggcucuuuucagagccaccagaauu

SEQ ID NO: 22820 - RNA, 4039 nt, Artificial Sequence
  SARS-CoV-2/Wuhan/WIV05/2019__EPI_ISL_402128 spike protein mRNA gc (1-1273)(A222V_D614G) R10276
aggagaaagcuuaccauguucguguuccugguccuccugccccuggugagcucccagugcgugaaccucaccacccgcacgcagcugccgcccgccuacaccaacagcuucacccggggcgucuacuaccccgacaagguguuccgcuccagcgugcugcacuccacccaggaccucuuccugcccuucuucagcaacgucacgugguuccacgccauccacguguccgggaccaacggcaccaagcgguucgacaacccggugcugcccuucaacgacggggucuacuucgcgagcaccgagaaguccaacaucauccgcggcuggaucuucgggacgacccucgacagcaagacccagucccugcugaucgugaacaacgccaccaacguggucaucaaggugugcgaguuccaguucugcaacgaccccuuccucggcguguacuaccacaagaacaacaagagcuggauggaguccgaguuccgggucuacagcuccgccaacaacugcacguucgaguacgugagccagcccuuccugauggaccuggagggcaagcaggggaacuucaagaaccuccgcgaguucguguucaagaacaucgacggcuacuucaagaucuacuccaagcacaccccgaucaaccugguccgggaccugccccagggguucagcguccucgagccccugguggaccugcccaucggcaucaacaucacccgcuuccagacccuccuggcccugcaccgguccuaccucacgccgggggacagcagcuccggcuggaccgcgggcgccgccgccuacuacgugggguaccugcagccccgcaccuuccugcucaaguacaacgagaacggcaccaucacggacgcggucgacugcgcccuggacccccugagcgagaccaagugcacccucaaguccuucaccguggagaaggggaucuaccagacgagcaacuuccgggugcagcccaccgaguccaucguccgcuucccgaacaucaccaaccugugccccuucggcgagguguucaacgccacccgguucgccagcgucuacgccuggaaccgcaagcggaucuccaacugcguggcggacuacagcgugcuguacaacuccgccagcuucuccacguucaagugcuacggcgucagccccaccaagcucaacgaccugugcuucaccaacguguacgccgacuccuucgugauccgcggggacgagguccggcagaucgcccccggccagaccgggaagaucgccgacuacaacuacaagcugccggacgacuucacgggcugcgugaucgcguggaacagcaacaaccucgacuccaaggucgggggcaacuacaacuaccuguaccgccuguuccgcaagagcaaccucaagcccuucgagcgggacaucuccaccgagaucuaccaggccggcagcacccccugcaacgggguggagggcuucaacugcuacuucccccugcaguccuacggguuccagccgaccaacggcgugggguaccagcccuaccggguggucgugcugagcuucgagcuccugcacgcccccgccacggugugcggccccaagaaguccaccaaccuggucaagaacaagugcgugaacuucaacuucaacggccucaccgggaccggcgugcugaccgagagcaacaagaaguuccugccguuccagcaguucgggcgcgacaucgccgacacgaccgacgcgguccgcgacccccagacccuggagauccucgacaucacccccugcagcuucggcgggguguccgugaucacgccgggcaccaacaccagcaaccaggucgccgugcuguaccagggcgugaacugcaccgagguccccguggccauccacgccgaccagcugacgcccaccuggcggguguacuccaccggcagcaacgucuuccagacccgcgccgggugccucaucggcgcggagcacgugaacaacuccuacgagugcgacauccccaucggggccggcaucugcgccagcuaccagacgcagaccaacuccccgcggcgcgcccggagcguggcgucccagagcaucaucgccuacaccaugucccugggcgccgagaacagcgucgccuacuccaacaacagcaucgccauccccaccaacuucacgaucuccgugaccaccgagauccugcccgugagcaugaccaagacgagcgucgacugcaccauguacaucugcggggacuccaccgagugcagcaaccuccugcugcaguacggcuccuucugcacccagcucaaccgcgcgcugacggggaucgccguggagcaggacaagaacacccaggagguguucgcccaggucaagcagaucuacaagacgcccccgaucaaggacuucggcggguucaacuucagccagauccugcccgaccccuccaagcccagcaagcgguccuucaucgaggaccuccuguucaacaaggugacccuggccgacgccggcuucaucaagcaguacggcgacugccucggggacaucgcggcccgcgaccugaucugcgcccagaaguucaacggccugaccgugcucccgccccugcugaccgacgagaugaucgcccaguacaccagcgcccuccuggcggggaccaucacguccggcuggaccuucggggccggcgccgcccugcagauccccuucgcgaugcagauggccuaccgguucaacggcaucggggucacccagaacgugcucuacgagaaccagaagcugaucgccaaccaguucaacagcgccaucggcaagauccaggacucccugagcuccaccgccagcgcgcucgggaagcugcaggacguggucaaccagaacgcccaggcccugaacacgcucgugaagcagcuguccagcaacuucggcgccaucuccagcgugcugaacgacauccucucccgccuggacaaggucgaggccgaggugcagaucgaccggcugaucaccgggcgccuccagagccugcagaccuacgugacccagcagcugauccgggcggccgagauccgcgccagcgccaaccucgccgcgaccaagauguccgagugcguccugggccagagcaagcggguggacuucugcggcaagggguaccaccugauguccuucccccagagcgccccgcacggcguggucuuccuccacgugacguacguccccgcccaggagaagaacuucaccaccgcccccgcgaucugccacgacgggaaggcccacuucccccgcgagggcguguucguguccaacgggacccacugguucgucacgcagcggaacuucuacgagccgcagaucaucaccaccgacaacaccuucgugagcggcaacugcgacguggucaucggcaucgugaacaacacgguguacgacccccugcagcccgagcuggacuccuucaaggaggagcucgacaaguacuucaagaaccacaccagccccgacgucgaccugggggacaucuccggcaucaacgccagcguggugaacauccagaaggagaucgaccgccugaacgaggucgccaagaaccucaacgagucccugaucgaccugcaggagcucgggaaguacgagcaguacaucaaguggccgugguacaucuggcugggcuucaucgccggccugaucgcgaucgugauggugaccaucaugcucugcugcaugaccagcugcugcuccugccugaaggggugcugcagcugcggcuccugcugcaaguucgacgaggacgacagcgagcccguccugaagggggugaagcuccacuacacgugaggacuaguuauaagacugacuagcccgaugggccucccaacgggcccuccuccccuccuugcaccgagauuaauaaaaaaaaaaaaaaaaaaaaaaaaaaaaaaaaaaaaaaaaaaaaaaaaaaaaaaaaaaaaaaaaugcaucccccccccccccccccccccccccccccccaaaggcucuuuucagagccaccagaauu

SEQ ID NO: 22821 - RNA, 4039 nt, Artificial Sequence
  SARS-CoV-2/Wuhan/WIV05/2019__EPI_ISL_402128 spike protein mRNA gc (1-1273)(K986P_V987P_A222V_D614G) R10277
aggagaaagcuuaccauguucguguuccugguccuccugccccuggugagcucccagugcgugaaccucaccacccgcacgcagcugccgcccgccuacaccaacagcuucacccggggcgucuacuaccccgacaagguguuccgcuccagcgugcugcacuccacccaggaccucuuccugcccuucuucagcaacgucacgugguuccacgccauccacguguccgggaccaacggcaccaagcgguucgacaacccggugcugcccuucaacgacggggucuacuucgcgagcaccgagaaguccaacaucauccgcggcuggaucuucgggacgacccucgacagcaagacccagucccugcugaucgugaacaacgccaccaacguggucaucaaggugugcgaguuccaguucugcaacgaccccuuccucggcguguacuaccacaagaacaacaagagcuggauggaguccgaguuccgggucuacagcuccgccaacaacugcacguucgaguacgugagccagcccuuccugauggaccuggagggcaagcaggggaacuucaagaaccuccgcgaguucguguucaagaacaucgacggcuacuucaagaucuacuccaagcacaccccgaucaaccugguccgggaccugccccagggguucagcguccucgagccccugguggaccugcccaucggcaucaacaucacccgcuuccagacccuccuggcccugcaccgguccuaccucacgccgggggacagcagcuccggcuggaccgcgggcgccgccgccuacuacgugggguaccugcagccccgcaccuuccugcucaaguacaacgagaacggcaccaucacggacgcggucgacugcgcccuggacccccugagcgagaccaagugcacccucaaguccuucaccguggagaaggggaucuaccagacgagcaacuuccgggugcagcccaccgaguccaucguccgcuucccgaacaucaccaaccugugccccuucggcgagguguucaacgccacccgguucgccagcgucuacgccuggaaccgcaagcggaucuccaacugcguggcggacuacagcgugcuguacaacuccgccagcuucuccacguucaagugcuacggcgucagccccaccaagcucaacgaccugugcuucaccaacguguacgccgacuccuucgugauccgcggggacgagguccggcagaucgcccccggccagaccgggaagaucgccgacuacaacuacaagcugccggacgacuucacgggcugcgugaucgcguggaacagcaacaaccucgacuccaaggucgggggcaacuacaacuaccuguaccgccuguuccgcaagagcaaccucaagcccuucgagcgggacaucuccaccgagaucuaccaggccggcagcacccccugcaacgggguggagggcuucaacugcuacuucccccugcaguccuacggguuccagccgaccaacggcgugggguaccagcccuaccggguggucgugcugagcuucgagcuccugcacgcccccgccacggugugcggccccaagaaguccaccaaccuggucaagaacaagugcgugaacuucaacuucaacggccucaccgggaccggcgugcugaccgagagcaacaagaaguuccugccguuccagcaguucgggcgcgacaucgccgacacgaccgacgcgguccgcgacccccagacccuggagauccucgacaucacccccugcagcuucggcgggguguccgugaucacgccgggcaccaacaccagcaaccaggucgccgugcuguaccagggcgugaacugcaccgagguccccguggccauccacgccgaccagcugacgcccaccuggcggguguacuccaccggcagcaacgucuuccagacccgcgccgggugccucaucggcgcggagcacgugaacaacuccuacgagugcgacauccccaucggggccggcaucugcgccagcuaccagacgcagaccaacuccccgcggcgcgcccggagcguggcgucccagagcaucaucgccuacaccaugucccugggcgccgagaacagcgucgccuacuccaacaacagcaucgccauccccaccaacuucacgaucuccgugaccaccgagauccugcccgugagcaugaccaagacgagcgucgacugcaccauguacaucugcggggacuccaccgagugcagcaaccuccugcugcaguacggcuccuucugcacccagcucaaccgcgcgcugacggggaucgccguggagcaggacaagaacacccaggagguguucgcccaggucaagcagaucuacaagacgcccccgaucaaggacuucggcggguucaacuucagccagauccugcccgaccccuccaagcccagcaagcgguccuucaucgaggaccuccuguucaacaaggugacccuggccgacgccggcuucaucaagcaguacggcgacugccucggggacaucgcggcccgcgaccugaucugcgcccagaaguucaacggccugaccgugcucccgccccugcugaccgacgagaugaucgcccaguacaccagcgcccuccuggcggggaccaucacguccggcuggaccuucggggccggcgccgcccugcagauccccuucgcgaugcagauggccuaccgguucaacggcaucggggucacccagaacgugcucuacgagaaccagaagcugaucgccaaccaguucaacagcgccaucggcaagauccaggacucccugagcuccaccgccagcgcgcucgggaagcugcaggacguggucaaccagaacgcccaggcccugaacacgcucgugaagcagcuguccagcaacuucggcgccaucuccagcgugcugaacgacauccucucccgccuggacccgcccgaggccgaggugcagaucgaccggcugaucaccgggcgccuccagagccugcagaccuacgugacccagcagcugauccgggcggccgagauccgcgccagcgccaaccucgccgcgaccaagauguccgagugcguccugggccagagcaagcggguggacuucugcggcaagggguaccaccugauguccuucccccagagcgccccgcacggcguggucuuccuccacgugacguacguccccgcccaggagaagaacuucaccaccgcccccgcgaucugccacgacgggaaggcccacuucccccgcgagggcguguucguguccaacgggacccacugguucgucacgcagcggaacuucuacgagccgcagaucaucaccaccgacaacaccuucgugagcggcaacugcgacguggucaucggcaucgugaacaacacgguguacgacccccugcagcccgagcuggacuccuucaaggaggagcucgacaaguacuucaagaaccacaccagccccgacgucgaccugggggacaucuccggcaucaacgccagcguggugaacauccagaaggagaucgaccgccugaacgaggucgccaagaaccucaacgagucccugaucgaccugcaggagcucgggaaguacgagcaguacaucaaguggccgugguacaucuggcugggcuucaucgccggccugaucgcgaucgugauggugaccaucaugcucugcugcaugaccagcugcugcuccugccugaaggggugcugcagcugcggcuccugcugcaaguucgacgaggacgacagcgagcccguccugaagggggugaagcuccacuacacgugaggacuaguuauaagacugacuagcccgaugggccucccaacgggcccuccuccccuccuugcaccgagauuaauaaaaaaaaaaaaaaaaaaaaaaaaaaaaaaaaaaaaaaaaaaaaaaaaaaaaaaaaaaaaaaaaugcaucccccccccccccccccccccccccccccccaaaggcucuuuucagagccaccagaauu

SEQ ID NO: 22822 - RNA, 4039 nt, Artificial Sequence
  SARS-CoV-2/Wuhan/WIV05/2019__EPI_ISL_402128 spike protein mRNA gc (1-1273)(N439K_D614G) R10296
aggagaaagcuuaccauguucguguuccugguccuccugccccuggugagcucccagugcgugaaccucaccacccgcacgcagcugccgcccgccuacaccaacagcuucacccggggcgucuacuaccccgacaagguguuccgcuccagcgugcugcacuccacccaggaccucuuccugcccuucuucagcaacgucacgugguuccacgccauccacguguccgggaccaacggcaccaagcgguucgacaacccggugcugcccuucaacgacggggucuacuucgcgagcaccgagaaguccaacaucauccgcggcuggaucuucgggacgacccucgacagcaagacccagucccugcugaucgugaacaacgccaccaacguggucaucaaggugugcgaguuccaguucugcaacgaccccuuccucggcguguacuaccacaagaacaacaagagcuggauggaguccgaguuccgggucuacagcuccgccaacaacugcacguucgaguacgugagccagcccuuccugauggaccuggagggcaagcaggggaacuucaagaaccuccgcgaguucguguucaagaacaucgacggcuacuucaagaucuacuccaagcacaccccgaucaaccugguccgggaccugccccagggguucagcgcccucgagccccugguggaccugcccaucggcaucaacaucacccgcuuccagacccuccuggcccugcaccgguccuaccucacgccgggggacagcagcuccggcuggaccgcgggcgccgccgccuacuacgugggguaccugcagccccgcaccuuccugcucaaguacaacgagaacggcaccaucacggacgcggucgacugcgcccuggacccccugagcgagaccaagugcacccucaaguccuucaccguggagaaggggaucuaccagacgagcaacuuccgggugcagcccaccgaguccaucguccgcuucccgaacaucaccaaccugugccccuucggcgagguguucaacgccacccgguucgccagcgucuacgccuggaaccgcaagcggaucuccaacugcguggcggacuacagcgugcuguacaacuccgccagcuucuccacguucaagugcuacggcgucagccccaccaagcucaacgaccugugcuucaccaacguguacgccgacuccuucgugauccgcggggacgagguccggcagaucgcccccggccagaccgggaagaucgccgacuacaacuacaagcugccggacgacuucacgggcugcgugaucgcguggaacagcaagaaccucgacuccaaggucgggggcaacuacaacuaccuguaccgccuguuccgcaagagcaaccucaagcccuucgagcgggacaucuccaccgagaucuaccaggccggcagcacccccugcaacgggguggagggcuucaacugcuacuucccccugcaguccuacggguuccagccgaccaacggcgugggguaccagcccuaccggguggucgugcugagcuucgagcuccugcacgcccccgccacggugugcggccccaagaaguccaccaaccuggucaagaacaagugcgugaacuucaacuucaacggccucaccgggaccggcgugcugaccgagagcaacaagaaguuccugccguuccagcaguucgggcgcgacaucgccgacacgaccgacgcgguccgcgacccccagacccuggagauccucgacaucacccccugcagcuucggcgggguguccgugaucacgccgggcaccaacaccagcaaccaggucgccgugcuguaccagggcgugaacugcaccgagguccccguggccauccacgccgaccagcugacgcccaccuggcggguguacuccaccggcagcaacgucuuccagacccgcgccgggugccucaucggcgcggagcacgugaacaacuccuacgagugcgacauccccaucggggccggcaucugcgccagcuaccagacgcagaccaacuccccgcggcgcgcccggagcguggcgucccagagcaucaucgccuacaccaugucccugggcgccgagaacagcgucgccuacuccaacaacagcaucgccauccccaccaacuucacgaucuccgugaccaccgagauccugcccgugagcaugaccaagacgagcgucgacugcaccauguacaucugcggggacuccaccgagugcagcaaccuccugcugcaguacggcuccuucugcacccagcucaaccgcgcgcugacggggaucgccguggagcaggacaagaacacccaggagguguucgcccaggucaagcagaucuacaagacgcccccgaucaaggacuucggcggguucaacuucagccagauccugcccgaccccuccaagcccagcaagcgguccuucaucgaggaccuccuguucaacaaggugacccuggccgacgccggcuucaucaagcaguacggcgacugccucggggacaucgcggcccgcgaccugaucugcgcccagaaguucaacggccugaccgugcucccgccccugcugaccgacgagaugaucgcccaguacaccagcgcccuccuggcggggaccaucacguccggcuggaccuucggggccggcgccgcccugcagauccccuucgcgaugcagauggccuaccgguucaacggcaucggggucacccagaacgugcucuacgagaaccagaagcugaucgccaaccaguucaacagcgccaucggcaagauccaggacucccugagcuccaccgccagcgcgcucgggaagcugcaggacguggucaaccagaacgcccaggcccugaacacgcucgugaagcagcuguccagcaacuucggcgccaucuccagcgugcugaacgacauccucucccgccuggacaaggucgaggccgaggugcagaucgaccggcugaucaccgggcgccuccagagccugcagaccuacgugacccagcagcugauccgggcggccgagauccgcgccagcgccaaccucgccgcgaccaagauguccgagugcguccugggccagagcaagcggguggacuucugcggcaagggguaccaccugauguccuucccccagagcgccccgcacggcguggucuuccuccacgugacguacguccccgcccaggagaagaacuucaccaccgcccccgcgaucugccacgacgggaaggcccacuucccccgcgagggcguguucguguccaacgggacccacugguucgucacgcagcggaacuucuacgagccgcagaucaucaccaccgacaacaccuucgugagcggcaacugcgacguggucaucggcaucgugaacaacacgguguacgacccccugcagcccgagcuggacuccuucaaggaggagcucgacaaguacuucaagaaccacaccagccccgacgucgaccugggggacaucuccggcaucaacgccagcguggugaacauccagaaggagaucgaccgccugaacgaggucgccaagaaccucaacgagucccugaucgaccugcaggagcucgggaaguacgagcaguacaucaaguggccgugguacaucuggcugggcuucaucgccggccugaucgcgaucgugauggugaccaucaugcucugcugcaugaccagcugcugcuccugccugaaggggugcugcagcugcggcuccugcugcaaguucgacgaggacgacagcgagcccguccugaagggggugaagcuccacuacacgugaggacuaguuauaagacugacuagcccgaugggccucccaacgggcccuccuccccuccuugcaccgagauuaauaaaaaaaaaaaaaaaaaaaaaaaaaaaaaaaaaaaaaaaaaaaaaaaaaaaaaaaaaaaaaaaaugcaucccccccccccccccccccccccccccccccaaaggcucuuuucagagccaccagaauu

SEQ ID NO: 22823 - RNA, 4039 nt, Artificial Sequence
  SARS-CoV-2/Wuhan/WIV05/2019__EPI_ISL_402128 spike protein mRNA gc (1-1273)(K986P_V987P_N439K_D614G) R10297
aggagaaagcuuaccauguucguguuccugguccuccugccccuggugagcucccagugcgugaaccucaccacccgcacgcagcugccgcccgccuacaccaacagcuucacccggggcgucuacuaccccgacaagguguuccgcuccagcgugcugcacuccacccaggaccucuuccugcccuucuucagcaacgucacgugguuccacgccauccacguguccgggaccaacggcaccaagcgguucgacaacccggugcugcccuucaacgacggggucuacuucgcgagcaccgagaaguccaacaucauccgcggcuggaucuucgggacgacccucgacagcaagacccagucccugcugaucgugaacaacgccaccaacguggucaucaaggugugcgaguuccaguucugcaacgaccccuuccucggcguguacuaccacaagaacaacaagagcuggauggaguccgaguuccgggucuacagcuccgccaacaacugcacguucgaguacgugagccagcccuuccugauggaccuggagggcaagcaggggaacuucaagaaccuccgcgaguucguguucaagaacaucgacggcuacuucaagaucuacuccaagcacaccccgaucaaccugguccgggaccugccccagggguucagcgcccucgagccccugguggaccugcccaucggcaucaacaucacccgcuuccagacccuccuggcccugcaccgguccuaccucacgccgggggacagcagcuccggcuggaccgcgggcgccgccgccuacuacgugggguaccugcagccccgcaccuuccugcucaaguacaacgagaacggcaccaucacggacgcggucgacugcgcccuggacccccugagcgagaccaagugcacccucaaguccuucaccguggagaaggggaucuaccagacgagcaacuuccgggugcagcccaccgaguccaucguccgcuucccgaacaucaccaaccugugccccuucggcgagguguucaacgccacccgguucgccagcgucuacgccuggaaccgcaagcggaucuccaacugcguggcggacuacagcgugcuguacaacuccgccagcuucuccacguucaagugcuacggcgucagccccaccaagcucaacgaccugugcuucaccaacguguacgccgacuccuucgugauccgcggggacgagguccggcagaucgcccccggccagaccgggaagaucgccgacuacaacuacaagcugccggacgacuucacgggcugcgugaucgcguggaacagcaagaaccucgacuccaaggucgggggcaacuacaacuaccuguaccgccuguuccgcaagagcaaccucaagcccuucgagcgggacaucuccaccgagaucuaccaggccggcagcacccccugcaacgggguggagggcuucaacugcuacuucccccugcaguccuacggguuccagccgaccaacggcgugggguaccagcccuaccggguggucgugcugagcuucgagcuccugcacgcccccgccacggugugcggccccaagaaguccaccaaccuggucaagaacaagugcgugaacuucaacuucaacggccucaccgggaccggcgugcugaccgagagcaacaagaaguuccugccguuccagcaguucgggcgcgacaucgccgacacgaccgacgcgguccgcgacccccagacccuggagauccucgacaucacccccugcagcuucggcgggguguccgugaucacgccgggcaccaacaccagcaaccaggucgccgugcuguaccagggcgugaacugcaccgagguccccguggccauccacgccgaccagcugacgcccaccuggcggguguacuccaccggcagcaacgucuuccagacccgcgccgggugccucaucggcgcggagcacgugaacaacuccuacgagugcgacauccccaucggggccggcaucugcgccagcuaccagacgcagaccaacuccccgcggcgcgcccggagcguggcgucccagagcaucaucgccuacaccaugucccugggcgccgagaacagcgucgccuacuccaacaacagcaucgccauccccaccaacuucacgaucuccgugaccaccgagauccugcccgugagcaugaccaagacgagcgucgacugcaccauguacaucugcggggacuccaccgagugcagcaaccuccugcugcaguacggcuccuucugcacccagcucaaccgcgcgcugacggggaucgccguggagcaggacaagaacacccaggagguguucgcccaggucaagcagaucuacaagacgcccccgaucaaggacuucggcggguucaacuucagccagauccugcccgaccccuccaagcccagcaagcgguccuucaucgaggaccuccuguucaacaaggugacccuggccgacgccggcuucaucaagcaguacggcgacugccucggggacaucgcggcccgcgaccugaucugcgcccagaaguucaacggccugaccgugcucccgccccugcugaccgacgagaugaucgcccaguacaccagcgcccuccuggcggggaccaucacguccggcuggaccuucggggccggcgccgcccugcagauccccuucgcgaugcagauggccuaccgguucaacggcaucggggucacccagaacgugcucuacgagaaccagaagcugaucgccaaccaguucaacagcgccaucggcaagauccaggacucccugagcuccaccgccagcgcgcucgggaagcugcaggacguggucaaccagaacgcccaggcccugaacacgcucgugaagcagcuguccagcaacuucggcgccaucuccagcgugcugaacgacauccucucccgccuggacccgcccgaggccgaggugcagaucgaccggcugaucaccgggcgccuccagagccugcagaccuacgugacccagcagcugauccgggcggccgagauccgcgccagcgccaaccucgccgcgaccaagauguccgagugcguccugggccagagcaagcggguggacuucugcggcaagggguaccaccugauguccuucccccagagcgccccgcacggcguggucuuccuccacgugacguacguccccgcccaggagaagaacuucaccaccgcccccgcgaucugccacgacgggaaggcccacuucccccgcgagggcguguucguguccaacgggacccacugguucgucacgcagcggaacuucuacgagccgcagaucaucaccaccgacaacaccuucgugagcggcaacugcgacguggucaucggcaucgugaacaacacgguguacgacccccugcagcccgagcuggacuccuucaaggaggagcucgacaaguacuucaagaaccacaccagccccgacgucgaccugggggacaucuccggcaucaacgccagcguggugaacauccagaaggagaucgaccgccugaacgaggucgccaagaaccucaacgagucccugaucgaccugcaggagcucgggaaguacgagcaguacaucaaguggccgugguacaucuggcugggcuucaucgccggccugaucgcgaucgugauggugaccaucaugcucugcugcaugaccagcugcugcuccugccugaaggggugcugcagcugcggcuccugcugcaaguucgacgaggacgacagcgagcccguccugaagggggugaagcuccacuacacgugaggacuaguuauaagacugacuagcccgaugggccucccaacgggcccuccuccccuccuugcaccgagauuaauaaaaaaaaaaaaaaaaaaaaaaaaaaaaaaaaaaaaaaaaaaaaaaaaaaaaaaaaaaaaaaaaugcaucccccccccccccccccccccccccccccccaaaggcucuuuucagagccaccagaauu

SEQ ID NO: 22824 - RNA, 4039 nt, Artificial Sequence
  SARS-CoV-2/Wuhan/WIV05/2019__EPI_ISL_402128 spike protein mRNA gc (1-1273)(S477N_D614G) R10284
aggagaaagcuuaccauguucguguuccugguccuccugccccuggugagcucccagugcgugaaccucaccacccgcacgcagcugccgcccgccuacaccaacagcuucacccggggcgucuacuaccccgacaagguguuccgcuccagcgugcugcacuccacccaggaccucuuccugcccuucuucagcaacgucacgugguuccacgccauccacguguccgggaccaacggcaccaagcgguucgacaacccggugcugcccuucaacgacggggucuacuucgcgagcaccgagaaguccaacaucauccgcggcuggaucuucgggacgacccucgacagcaagacccagucccugcugaucgugaacaacgccaccaacguggucaucaaggugugcgaguuccaguucugcaacgaccccuuccucggcguguacuaccacaagaacaacaagagcuggauggaguccgaguuccgggucuacagcuccgccaacaacugcacguucgaguacgugagccagcccuuccugauggaccuggagggcaagcaggggaacuucaagaaccuccgcgaguucguguucaagaacaucgacggcuacuucaagaucuacuccaagcacaccccgaucaaccugguccgggaccugccccagggguucagcgcccucgagccccugguggaccugcccaucggcaucaacaucacccgcuuccagacccuccuggcccugcaccgguccuaccucacgccgggggacagcagcuccggcuggaccgcgggcgccgccgccuacuacgugggguaccugcagccccgcaccuuccugcucaaguacaacgagaacggcaccaucacggacgcggucgacugcgcccuggacccccugagcgagaccaagugcacccucaaguccuucaccguggagaaggggaucuaccagacgagcaacuuccgggugcagcccaccgaguccaucguccgcuucccgaacaucaccaaccugugccccuucggcgagguguucaacgccacccgguucgccagcgucuacgccuggaaccgcaagcggaucuccaacugcguggcggacuacagcgugcuguacaacuccgccagcuucuccacguucaagugcuacggcgucagccccaccaagcucaacgaccugugcuucaccaacguguacgccgacuccuucgugauccgcggggacgagguccggcagaucgcccccggccagaccgggaagaucgccgacuacaacuacaagcugccggacgacuucacgggcugcgugaucgcguggaacagcaacaaccucgacuccaaggucgggggcaacuacaacuaccuguaccgccuguuccgcaagagcaaccucaagcccuucgagcgggacaucuccaccgagaucuaccaggccggcaacacccccugcaacgggguggagggcuucaacugcuacuucccccugcaguccuacggguuccagccgaccaacggcgugggguaccagcccuaccggguggucgugcugagcuucgagcuccugcacgcccccgccacggugugcggccccaagaaguccaccaaccuggucaagaacaagugcgugaacuucaacuucaacggccucaccgggaccggcgugcugaccgagagcaacaagaaguuccugccguuccagcaguucgggcgcgacaucgccgacacgaccgacgcgguccgcgacccccagacccuggagauccucgacaucacccccugcagcuucggcgggguguccgugaucacgccgggcaccaacaccagcaaccaggucgccgugcuguaccagggcgugaacugcaccgagguccccguggccauccacgccgaccagcugacgcccaccuggcggguguacuccaccggcagcaacgucuuccagacccgcgccgggugccucaucggcgcggagcacgugaacaacuccuacgagugcgacauccccaucggggccggcaucugcgccagcuaccagacgcagaccaacuccccgcggcgcgcccggagcguggcgucccagagcaucaucgccuacaccaugucccugggcgccgagaacagcgucgccuacuccaacaacagcaucgccauccccaccaacuucacgaucuccgugaccaccgagauccugcccgugagcaugaccaagacgagcgucgacugcaccauguacaucugcggggacuccaccgagugcagcaaccuccugcugcaguacggcuccuucugcacccagcucaaccgcgcgcugacggggaucgccguggagcaggacaagaacacccaggagguguucgcccaggucaagcagaucuacaagacgcccccgaucaaggacuucggcggguucaacuucagccagauccugcccgaccccuccaagcccagcaagcgguccuucaucgaggaccuccuguucaacaaggugacccuggccgacgccggcuucaucaagcaguacggcgacugccucggggacaucgcggcccgcgaccugaucugcgcccagaaguucaacggccugaccgugcucccgccccugcugaccgacgagaugaucgcccaguacaccagcgcccuccuggcggggaccaucacguccggcuggaccuucggggccggcgccgcccugcagauccccuucgcgaugcagauggccuaccgguucaacggcaucggggucacccagaacgugcucuacgagaaccagaagcugaucgccaaccaguucaacagcgccaucggcaagauccaggacucccugagcuccaccgccagcgcgcucgggaagcugcaggacguggucaaccagaacgcccaggcccugaacacgcucgugaagcagcuguccagcaacuucggcgccaucuccagcgugcugaacgacauccucucccgccuggacaaggucgaggccgaggugcagaucgaccggcugaucaccgggcgccuccagagccugcagaccuacgugacccagcagcugauccgggcggccgagauccgcgccagcgccaaccucgccgcgaccaagauguccgagugcguccugggccagagcaagcggguggacuucugcggcaagggguaccaccugauguccuucccccagagcgccccgcacggcguggucuuccuccacgugacguacguccccgcccaggagaagaacuucaccaccgcccccgcgaucugccacgacgggaaggcccacuucccccgcgagggcguguucguguccaacgggacccacugguucgucacgcagcggaacuucuacgagccgcagaucaucaccaccgacaacaccuucgugagcggcaacugcgacguggucaucggcaucgugaacaacacgguguacgacccccugcagcccgagcuggacuccuucaaggaggagcucgacaaguacuucaagaaccacaccagccccgacgucgaccugggggacaucuccggcaucaacgccagcguggugaacauccagaaggagaucgaccgccugaacgaggucgccaagaaccucaacgagucccugaucgaccugcaggagcucgggaaguacgagcaguacaucaaguggccgugguacaucuggcugggcuucaucgccggccugaucgcgaucgugauggugaccaucaugcucugcugcaugaccagcugcugcuccugccugaaggggugcugcagcugcggcuccugcugcaaguucgacgaggacgacagcgagcccguccugaagggggugaagcuccacuacacgugaggacuaguuauaagacugacuagcccgaugggccucccaacgggcccuccuccccuccuugcaccgagauuaauaaaaaaaaaaaaaaaaaaaaaaaaaaaaaaaaaaaaaaaaaaaaaaaaaaaaaaaaaaaaaaaaugcaucccccccccccccccccccccccccccccccaaaggcucuuuucagagccaccagaauu

SEQ ID NO: 22825 - RNA, 4039 nt, Artificial Sequence
  SARS-CoV-2/Wuhan/WIV05/2019__EPI_ISL_402128 spike protein mRNA gc (1-1273)(K986P_V987P_S477N_D614G) R10285
aggagaaagcuuaccauguucguguuccugguccuccugccccuggugagcucccagugcgugaaccucaccacccgcacgcagcugccgcccgccuacaccaacagcuucacccggggcgucuacuaccccgacaagguguuccgcuccagcgugcugcacuccacccaggaccucuuccugcccuucuucagcaacgucacgugguuccacgccauccacguguccgggaccaacggcaccaagcgguucgacaacccggugcugcccuucaacgacggggucuacuucgcgagcaccgagaaguccaacaucauccgcggcuggaucuucgggacgacccucgacagcaagacccagucccugcugaucgugaacaacgccaccaacguggucaucaaggugugcgaguuccaguucugcaacgaccccuuccucggcguguacuaccacaagaacaacaagagcuggauggaguccgaguuccgggucuacagcuccgccaacaacugcacguucgaguacgugagccagcccuuccugauggaccuggagggcaagcaggggaacuucaagaaccuccgcgaguucguguucaagaacaucgacggcuacuucaagaucuacuccaagcacaccccgaucaaccugguccgggaccugccccagggguucagcgcccucgagccccugguggaccugcccaucggcaucaacaucacccgcuuccagacccuccuggcccugcaccgguccuaccucacgccgggggacagcagcuccggcuggaccgcgggcgccgccgccuacuacgugggguaccugcagccccgcaccuuccugcucaaguacaacgagaacggcaccaucacggacgcggucgacugcgcccuggacccccugagcgagaccaagugcacccucaaguccuucaccguggagaaggggaucuaccagacgagcaacuuccgggugcagcccaccgaguccaucguccgcuucccgaacaucaccaaccugugccccuucggcgagguguucaacgccacccgguucgccagcgucuacgccuggaaccgcaagcggaucuccaacugcguggcggacuacagcgugcuguacaacuccgccagcuucuccacguucaagugcuacggcgucagccccaccaagcucaacgaccugugcuucaccaacguguacgccgacuccuucgugauccgcggggacgagguccggcagaucgcccccggccagaccgggaagaucgccgacuacaacuacaagcugccggacgacuucacgggcugcgugaucgcguggaacagcaacaaccucgacuccaaggucgggggcaacuacaacuaccuguaccgccuguuccgcaagagcaaccucaagcccuucgagcgggacaucuccaccgagaucuaccaggccggcaacacccccugcaacgggguggagggcuucaacugcuacuucccccugcaguccuacggguuccagccgaccaacggcgugggguaccagcccuaccggguggucgugcugagcuucgagcuccugcacgcccccgccacggugugcggccccaagaaguccaccaaccuggucaagaacaagugcgugaacuucaacuucaacggccucaccgggaccggcgugcugaccgagagcaacaagaaguuccugccguuccagcaguucgggcgcgacaucgccgacacgaccgacgcgguccgcgacccccagacccuggagauccucgacaucacccccugcagcuucggcgggguguccgugaucacgccgggcaccaacaccagcaaccaggucgccgugcuguaccagggcgugaacugcaccgagguccccguggccauccacgccgaccagcugacgcccaccuggcggguguacuccaccggcagcaacgucuuccagacccgcgccgggugccucaucggcgcggagcacgugaacaacuccuacgagugcgacauccccaucggggccggcaucugcgccagcuaccagacgcagaccaacuccccgcggcgcgcccggagcguggcgucccagagcaucaucgccuacaccaugucccugggcgccgagaacagcgucgccuacuccaacaacagcaucgccauccccaccaacuucacgaucuccgugaccaccgagauccugcccgugagcaugaccaagacgagcgucgacugcaccauguacaucugcggggacuccaccgagugcagcaaccuccugcugcaguacggcuccuucugcacccagcucaaccgcgcgcugacggggaucgccguggagcaggacaagaacacccaggagguguucgcccaggucaagcagaucuacaagacgcccccgaucaaggacuucggcggguucaacuucagccagauccugcccgaccccuccaagcccagcaagcgguccuucaucgaggaccuccuguucaacaaggugacccuggccgacgccggcuucaucaagcaguacggcgacugccucggggacaucgcggcccgcgaccugaucugcgcccagaaguucaacggccugaccgugcucccgccccugcugaccgacgagaugaucgcccaguacaccagcgcccuccuggcggggaccaucacguccggcuggaccuucggggccggcgccgcccugcagauccccuucgcgaugcagauggccuaccgguucaacggcaucggggucacccagaacgugcucuacgagaaccagaagcugaucgccaaccaguucaacagcgccaucggcaagauccaggacucccugagcuccaccgccagcgcgcucgggaagcugcaggacguggucaaccagaacgcccaggcccugaacacgcucgugaagcagcuguccagcaacuucggcgccaucuccagcgugcugaacgacauccucucccgccuggacccgcccgaggccgaggugcagaucgaccggcugaucaccgggcgccuccagagccugcagaccuacgugacccagcagcugauccgggcggccgagauccgcgccagcgccaaccucgccgcgaccaagauguccgagugcguccugggccagagcaagcggguggacuucugcggcaagggguaccaccugauguccuucccccagagcgccccgcacggcguggucuuccuccacgugacguacguccccgcccaggagaagaacuucaccaccgcccccgcgaucugccacgacgggaaggcccacuucccccgcgagggcguguucguguccaacgggacccacugguucgucacgcagcggaacuucuacgagccgcagaucaucaccaccgacaacaccuucgugagcggcaacugcgacguggucaucggcaucgugaacaacacgguguacgacccccugcagcccgagcuggacuccuucaaggaggagcucgacaaguacuucaagaaccacaccagccccgacgucgaccugggggacaucuccggcaucaacgccagcguggugaacauccagaaggagaucgaccgccugaacgaggucgccaagaaccucaacgagucccugaucgaccugcaggagcucgggaaguacgagcaguacaucaaguggccgugguacaucuggcugggcuucaucgccggccugaucgcgaucgugauggugaccaucaugcucugcugcaugaccagcugcugcuccugccugaaggggugcugcagcugcggcuccugcugcaaguucgacgaggacgacagcgagcccguccugaagggggugaagcuccacuacacgugaggacuaguuauaagacugacuagcccgaugggccucccaacgggcccuccuccccuccuugcaccgagauuaauaaaaaaaaaaaaaaaaaaaaaaaaaaaaaaaaaaaaaaaaaaaaaaaaaaaaaaaaaaaaaaaaugcaucccccccccccccccccccccccccccccccaaaggcucuuuucagagccaccagaauu

SEQ ID NO: 22826 - RNA, 4039 nt, Artificial Sequence
  SARS-CoV-2/Wuhan/WIV05/2019__EPI_ISL_402128 spike protein mRNA gc (1-1273)(N501Y_D614G) R10350
aggagaaagcuuaccauguucguguuccugguccuccugccccuggugagcucccagugcgugaaccucaccacccgcacgcagcugccgcccgccuacaccaacagcuucacccggggcgucuacuaccccgacaagguguuccgcuccagcgugcugcacuccacccaggaccucuuccugcccuucuucagcaacgucacgugguuccacgccauccacguguccgggaccaacggcaccaagcgguucgacaacccggugcugcccuucaacgacggggucuacuucgcgagcaccgagaaguccaacaucauccgcggcuggaucuucgggacgacccucgacagcaagacccagucccugcugaucgugaacaacgccaccaacguggucaucaaggugugcgaguuccaguucugcaacgaccccuuccucggcguguacuaccacaagaacaacaagagcuggauggaguccgaguuccgggucuacagcuccgccaacaacugcacguucgaguacgugagccagcccuuccugauggaccuggagggcaagcaggggaacuucaagaaccuccgcgaguucguguucaagaacaucgacggcuacuucaagaucuacuccaagcacaccccgaucaaccugguccgggaccugccccagggguucagcgcccucgagccccugguggaccugcccaucggcaucaacaucacccgcuuccagacccuccuggcccugcaccgguccuaccucacgccgggggacagcagcuccggcuggaccgcgggcgccgccgccuacuacgugggguaccugcagccccgcaccuuccugcucaaguacaacgagaacggcaccaucacggacgcggucgacugcgcccuggacccccugagcgagaccaagugcacccucaaguccuucaccguggagaaggggaucuaccagacgagcaacuuccgggugcagcccaccgaguccaucguccgcuucccgaacaucaccaaccugugccccuucggcgagguguucaacgccacccgguucgccagcgucuacgccuggaaccgcaagcggaucuccaacugcguggcggacuacagcgugcuguacaacuccgccagcuucuccacguucaagugcuacggcgucagccccaccaagcucaacgaccugugcuucaccaacguguacgccgacuccuucgugauccgcggggacgagguccggcagaucgcccccggccagaccgggaagaucgccgacuacaacuacaagcugccggacgacuucacgggcugcgugaucgcguggaacagcaacaaccucgacuccaaggucgggggcaacuacaacuaccuguaccgccuguuccgcaagagcaaccucaagcccuucgagcgggacaucuccaccgagaucuaccaggccggcagcacccccugcaacgggguggagggcuucaacugcuacuucccccugcaguccuacggguuccagccgaccuacggcgugggguaccagcccuaccggguggucgugcugagcuucgagcuccugcacgcccccgccacggugugcggccccaagaaguccaccaaccuggucaagaacaagugcgugaacuucaacuucaacggccucaccgggaccggcgugcugaccgagagcaacaagaaguuccugccguuccagcaguucgggcgcgacaucgccgacacgaccgacgcgguccgcgacccccagacccuggagauccucgacaucacccccugcagcuucggcgggguguccgugaucacgccgggcaccaacaccagcaaccaggucgccgugcuguaccagggcgugaacugcaccgagguccccguggccauccacgccgaccagcugacgcccaccuggcggguguacuccaccggcagcaacgucuuccagacccgcgccgggugccucaucggcgcggagcacgugaacaacuccuacgagugcgacauccccaucggggccggcaucugcgccagcuaccagacgcagaccaacuccccgcggcgcgcccggagcguggcgucccagagcaucaucgccuacaccaugucccugggcgccgagaacagcgucgccuacuccaacaacagcaucgccauccccaccaacuucacgaucuccgugaccaccgagauccugcccgugagcaugaccaagacgagcgucgacugcaccauguacaucugcggggacuccaccgagugcagcaaccuccugcugcaguacggcuccuucugcacccagcucaaccgcgcgcugacggggaucgccguggagcaggacaagaacacccaggagguguucgcccaggucaagcagaucuacaagacgcccccgaucaaggacuucggcggguucaacuucagccagauccugcccgaccccuccaagcccagcaagcgguccuucaucgaggaccuccuguucaacaaggugacccuggccgacgccggcuucaucaagcaguacggcgacugccucggggacaucgcggcccgcgaccugaucugcgcccagaaguucaacggccugaccgugcucccgccccugcugaccgacgagaugaucgcccaguacaccagcgcccuccuggcggggaccaucacguccggcuggaccuucggggccggcgccgcccugcagauccccuucgcgaugcagauggccuaccgguucaacggcaucggggucacccagaacgugcucuacgagaaccagaagcugaucgccaaccaguucaacagcgccaucggcaagauccaggacucccugagcuccaccgccagcgcgcucgggaagcugcaggacguggucaaccagaacgcccaggcccugaacacgcucgugaagcagcuguccagcaacuucggcgccaucuccagcgugcugaacgacauccucucccgccuggacaaggucgaggccgaggugcagaucgaccggcugaucaccgggcgccuccagagccugcagaccuacgugacccagcagcugauccgggcggccgagauccgcgccagcgccaaccucgccgcgaccaagauguccgagugcguccugggccagagcaagcggguggacuucugcggcaagggguaccaccugauguccuucccccagagcgccccgcacggcguggucuuccuccacgugacguacguccccgcccaggagaagaacuucaccaccgcccccgcgaucugccacgacgggaaggcccacuucccccgcgagggcguguucguguccaacgggacccacugguucgucacgcagcggaacuucuacgagccgcagaucaucaccaccgacaacaccuucgugagcggcaacugcgacguggucaucggcaucgugaacaacacgguguacgacccccugcagcccgagcuggacuccuucaaggaggagcucgacaaguacuucaagaaccacaccagccccgacgucgaccugggggacaucuccggcaucaacgccagcguggugaacauccagaaggagaucgaccgccugaacgaggucgccaagaaccucaacgagucccugaucgaccugcaggagcucgggaaguacgagcaguacaucaaguggccgugguacaucuggcugggcuucaucgccggccugaucgcgaucgugauggugaccaucaugcucugcugcaugaccagcugcugcuccugccugaaggggugcugcagcugcggcuccugcugcaaguucgacgaggacgacagcgagcccguccugaagggggugaagcuccacuacacgugaggacuaguuauaagacugacuagcccgaugggccucccaacgggcccuccuccccuccuugcaccgagauuaauaaaaaaaaaaaaaaaaaaaaaaaaaaaaaaaaaaaaaaaaaaaaaaaaaaaaaaaaaaaaaaaaugcaucccccccccccccccccccccccccccccccaaaggcucuuuucagagccaccagaauu

SEQ ID NO: 22827 - RNA, 4039 nt, Artificial Sequence
  SARS-CoV-2/Wuhan/WIV05/2019__EPI_ISL_402128 spike protein mRNA gc (1-1273)(K986P_V987P_N501Y_D614G) R10351
aggagaaagcuuaccauguucguguuccugguccuccugccccuggugagcucccagugcgugaaccucaccacccgcacgcagcugccgcccgccuacaccaacagcuucacccggggcgucuacuaccccgacaagguguuccgcuccagcgugcugcacuccacccaggaccucuuccugcccuucuucagcaacgucacgugguuccacgccauccacguguccgggaccaacggcaccaagcgguucgacaacccggugcugcccuucaacgacggggucuacuucgcgagcaccgagaaguccaacaucauccgcggcuggaucuucgggacgacccucgacagcaagacccagucccugcugaucgugaacaacgccaccaacguggucaucaaggugugcgaguuccaguucugcaacgaccccuuccucggcguguacuaccacaagaacaacaagagcuggauggaguccgaguuccgggucuacagcuccgccaacaacugcacguucgaguacgugagccagcccuuccugauggaccuggagggcaagcaggggaacuucaagaaccuccgcgaguucguguucaagaacaucgacggcuacuucaagaucuacuccaagcacaccccgaucaaccugguccgggaccugccccagggguucagcgcccucgagccccugguggaccugcccaucggcaucaacaucacccgcuuccagacccuccuggcccugcaccgguccuaccucacgccgggggacagcagcuccggcuggaccgcgggcgccgccgccuacuacgugggguaccugcagccccgcaccuuccugcucaaguacaacgagaacggcaccaucacggacgcggucgacugcgcccuggacccccugagcgagaccaagugcacccucaaguccuucaccguggagaaggggaucuaccagacgagcaacuuccgggugcagcccaccgaguccaucguccgcuucccgaacaucaccaaccugugccccuucggcgagguguucaacgccacccgguucgccagcgucuacgccuggaaccgcaagcggaucuccaacugcguggcggacuacagcgugcuguacaacuccgccagcuucuccacguucaagugcuacggcgucagccccaccaagcucaacgaccugugcuucaccaacguguacgccgacuccuucgugauccgcggggacgagguccggcagaucgcccccggccagaccgggaagaucgccgacuacaacuacaagcugccggacgacuucacgggcugcgugaucgcguggaacagcaacaaccucgacuccaaggucgggggcaacuacaacuaccuguaccgccuguuccgcaagagcaaccucaagcccuucgagcgggacaucuccaccgagaucuaccaggccggcagcacccccugcaacgggguggagggcuucaacugcuacuucccccugcaguccuacggguuccagccgaccuacggcgugggguaccagcccuaccggguggucgugcugagcuucgagcuccugcacgcccccgccacggugugcggccccaagaaguccaccaaccuggucaagaacaagugcgugaacuucaacuucaacggccucaccgggaccggcgugcugaccgagagcaacaagaaguuccugccguuccagcaguucgggcgcgacaucgccgacacgaccgacgcgguccgcgacccccagacccuggagauccucgacaucacccccugcagcuucggcgggguguccgugaucacgccgggcaccaacaccagcaaccaggucgccgugcuguaccagggcgugaacugcaccgagguccccguggccauccacgccgaccagcugacgcccaccuggcggguguacuccaccggcagcaacgucuuccagacccgcgccgggugccucaucggcgcggagcacgugaacaacuccuacgagugcgacauccccaucggggccggcaucugcgccagcuaccagacgcagaccaacuccccgcggcgcgcccggagcguggcgucccagagcaucaucgccuacaccaugucccugggcgccgagaacagcgucgccuacuccaacaacagcaucgccauccccaccaacuucacgaucuccgugaccaccgagauccugcccgugagcaugaccaagacgagcgucgacugcaccauguacaucugcggggacuccaccgagugcagcaaccuccugcugcaguacggcuccuucugcacccagcucaaccgcgcgcugacggggaucgccguggagcaggacaagaacacccaggagguguucgcccaggucaagcagaucuacaagacgcccccgaucaaggacuucggcggguucaacuucagccagauccugcccgaccccuccaagcccagcaagcgguccuucaucgaggaccuccuguucaacaaggugacccuggccgacgccggcuucaucaagcaguacggcgacugccucggggacaucgcggcccgcgaccugaucugcgcccagaaguucaacggccugaccgugcucccgccccugcugaccgacgagaugaucgcccaguacaccagcgcccuccuggcggggaccaucacguccggcuggaccuucggggccggcgccgcccugcagauccccuucgcgaugcagauggccuaccgguucaacggcaucggggucacccagaacgugcucuacgagaaccagaagcugaucgccaaccaguucaacagcgccaucggcaagauccaggacucccugagcuccaccgccagcgcgcucgggaagcugcaggacguggucaaccagaacgcccaggcccugaacacgcucgugaagcagcuguccagcaacuucggcgccaucuccagcgugcugaacgacauccucucccgccuggacccgcccgaggccgaggugcagaucgaccggcugaucaccgggcgccuccagagccugcagaccuacgugacccagcagcugauccgggcggccgagauccgcgccagcgccaaccucgccgcgaccaagauguccgagugcguccugggccagagcaagcggguggacuucugcggcaagggguaccaccugauguccuucccccagagcgccccgcacggcguggucuuccuccacgugacguacguccccgcccaggagaagaacuucaccaccgcccccgcgaucugccacgacgggaaggcccacuucccccgcgagggcguguucguguccaacgggacccacugguucgucacgcagcggaacuucuacgagccgcagaucaucaccaccgacaacaccuucgugagcggcaacugcgacguggucaucggcaucgugaacaacacgguguacgacccccugcagcccgagcuggacuccuucaaggaggagcucgacaaguacuucaagaaccacaccagccccgacgucgaccugggggacaucuccggcaucaacgccagcguggugaacauccagaaggagaucgaccgccugaacgaggucgccaagaaccucaacgagucccugaucgaccugcaggagcucgggaaguacgagcaguacaucaaguggccgugguacaucuggcugggcuucaucgccggccugaucgcgaucgugauggugaccaucaugcucugcugcaugaccagcugcugcuccugccugaaggggugcugcagcugcggcuccugcugcaaguucgacgaggacgacagcgagcccguccugaagggggugaagcuccacuacacgugaggacuaguuauaagacugacuagcccgaugggccucccaacgggcccuccuccccuccuugcaccgagauuaauaaaaaaaaaaaaaaaaaaaaaaaaaaaaaaaaaaaaaaaaaaaaaaaaaaaaaaaaaaaaaaaaugcaucccccccccccccccccccccccccccccccaaaggcucuuuucagagccaccagaauu

SEQ ID NO: 22828 - RNA, 4033 nt, Artificial Sequence
  SARS-CoV-2/Wuhan/WIV05/2019__EPI_ISL_402128 spike protein mRNA gc (1-1273)(H69del_V70del_D614G) R10272
aggagaaagcuuaccauguucguguuccugguccuccugccccuggugagcucccagugcgugaaccucaccacccgcacgcagcugccgcccgccuacaccaacagcuucacccggggcgucuacuaccccgacaagguguuccgcuccagcgugcugcacuccacccaggaccucuuccugcccuucuucagcaacgucacgugguuccacgccaucuccgggaccaacggcaccaagcgguucgacaacccggugcugcccuucaacgacggggucuacuucgcgagcaccgagaaguccaacaucauccgcggcuggaucuucgggacgacccucgacagcaagacccagucccugcugaucgugaacaacgccaccaacguggucaucaaggugugcgaguuccaguucugcaacgaccccuuccucggcguguacuaccacaagaacaacaagagcuggauggaguccgaguuccgggucuacagcuccgccaacaacugcacguucgaguacgugagccagcccuuccugauggaccuggagggcaagcaggggaacuucaagaaccuccgcgaguucguguucaagaacaucgacggcuacuucaagaucuacuccaagcacaccccgaucaaccugguccgggaccugccccagggguucagcgcccucgagccccugguggaccugcccaucggcaucaacaucacccgcuuccagacccuccuggcccugcaccgguccuaccucacgccgggggacagcagcuccggcuggaccgcgggcgccgccgccuacuacgugggguaccugcagccccgcaccuuccugcucaaguacaacgagaacggcaccaucacggacgcggucgacugcgcccuggacccccugagcgagaccaagugcacccucaaguccuucaccguggagaaggggaucuaccagacgagcaacuuccgggugcagcccaccgaguccaucguccgcuucccgaacaucaccaaccugugccccuucggcgagguguucaacgccacccgguucgccagcgucuacgccuggaaccgcaagcggaucuccaacugcguggcggacuacagcgugcuguacaacuccgccagcuucuccacguucaagugcuacggcgucagccccaccaagcucaacgaccugugcuucaccaacguguacgccgacuccuucgugauccgcggggacgagguccggcagaucgcccccggccagaccgggaagaucgccgacuacaacuacaagcugccggacgacuucacgggcugcgugaucgcguggaacagcaacaaccucgacuccaaggucgggggcaacuacaacuaccuguaccgccuguuccgcaagagcaaccucaagcccuucgagcgggacaucuccaccgagaucuaccaggccggcagcacccccugcaacgggguggagggcuucaacugcuacuucccccugcaguccuacggguuccagccgaccaacggcgugggguaccagcccuaccggguggucgugcugagcuucgagcuccugcacgcccccgccacggugugcggccccaagaaguccaccaaccuggucaagaacaagugcgugaacuucaacuucaacggccucaccgggaccggcgugcugaccgagagcaacaagaaguuccugccguuccagcaguucgggcgcgacaucgccgacacgaccgacgcgguccgcgacccccagacccuggagauccucgacaucacccccugcagcuucggcgggguguccgugaucacgccgggcaccaacaccagcaaccaggucgccgugcuguaccagggcgugaacugcaccgagguccccguggccauccacgccgaccagcugacgcccaccuggcggguguacuccaccggcagcaacgucuuccagacccgcgccgggugccucaucggcgcggagcacgugaacaacuccuacgagugcgacauccccaucggggccggcaucugcgccagcuaccagacgcagaccaacuccccgcggcgcgcccggagcguggcgucccagagcaucaucgccuacaccaugucccugggcgccgagaacagcgucgccuacuccaacaacagcaucgccauccccaccaacuucacgaucuccgugaccaccgagauccugcccgugagcaugaccaagacgagcgucgacugcaccauguacaucugcggggacuccaccgagugcagcaaccuccugcugcaguacggcuccuucugcacccagcucaaccgcgcgcugacggggaucgccguggagcaggacaagaacacccaggagguguucgcccaggucaagcagaucuacaagacgcccccgaucaaggacuucggcggguucaacuucagccagauccugcccgaccccuccaagcccagcaagcgguccuucaucgaggaccuccuguucaacaaggugacccuggccgacgccggcuucaucaagcaguacggcgacugccucggggacaucgcggcccgcgaccugaucugcgcccagaaguucaacggccugaccgugcucccgccccugcugaccgacgagaugaucgcccaguacaccagcgcccuccuggcggggaccaucacguccggcuggaccuucggggccggcgccgcccugcagauccccuucgcgaugcagauggccuaccgguucaacggcaucggggucacccagaacgugcucuacgagaaccagaagcugaucgccaaccaguucaacagcgccaucggcaagauccaggacucccugagcuccaccgccagcgcgcucgggaagcugcaggacguggucaaccagaacgcccaggcccugaacacgcucgugaagcagcuguccagcaacuucggcgccaucuccagcgugcugaacgacauccucucccgccuggacaaggucgaggccgaggugcagaucgaccggcugaucaccgggcgccuccagagccugcagaccuacgugacccagcagcugauccgggcggccgagauccgcgccagcgccaaccucgccgcgaccaagauguccgagugcguccugggccagagcaagcggguggacuucugcggcaagggguaccaccugauguccuucccccagagcgccccgcacggcguggucuuccuccacgugacguacguccccgcccaggagaagaacuucaccaccgcccccgcgaucugccacgacgggaaggcccacuucccccgcgagggcguguucguguccaacgggacccacugguucgucacgcagcggaacuucuacgagccgcagaucaucaccaccgacaacaccuucgugagcggcaacugcgacguggucaucggcaucgugaacaacacgguguacgacccccugcagcccgagcuggacuccuucaaggaggagcucgacaaguacuucaagaaccacaccagccccgacgucgaccugggggacaucuccggcaucaacgccagcguggugaacauccagaaggagaucgaccgccugaacgaggucgccaagaaccucaacgagucccugaucgaccugcaggagcucgggaaguacgagcaguacaucaaguggccgugguacaucuggcugggcuucaucgccggccugaucgcgaucgugauggugaccaucaugcucugcugcaugaccagcugcugcuccugccugaaggggugcugcagcugcggcuccugcugcaaguucgacgaggacgacagcgagcccguccugaagggggugaagcuccacuacacgugaggacuaguuauaagacugacuagcccgaugggccucccaacgggcccuccuccccuccuugcaccgagauuaauaaaaaaaaaaaaaaaaaaaaaaaaaaaaaaaaaaaaaaaaaaaaaaaaaaaaaaaaaaaaaaaaugcaucccccccccccccccccccccccccccccccaaaggcucuuuucagagccaccagaauu

SEQ ID NO: 22829 - RNA, 4033 nt, Artificial Sequence
  SARS-CoV-2/Wuhan/WIV05/2019__EPI_ISL_402128 spike protein mRNA gc (1-1273)(K986P_V987P_H69del_V70del_D614G) R10273
aggagaaagcuuaccauguucguguuccugguccuccugccccuggugagcucccagugcgugaaccucaccacccgcacgcagcugccgcccgccuacaccaacagcuucacccggggcgucuacuaccccgacaagguguuccgcuccagcgugcugcacuccacccaggaccucuuccugcccuucuucagcaacgucacgugguuccacgccaucuccgggaccaacggcaccaagcgguucgacaacccggugcugcccuucaacgacggggucuacuucgcgagcaccgagaaguccaacaucauccgcggcuggaucuucgggacgacccucgacagcaagacccagucccugcugaucgugaacaacgccaccaacguggucaucaaggugugcgaguuccaguucugcaacgaccccuuccucggcguguacuaccacaagaacaacaagagcuggauggaguccgaguuccgggucuacagcuccgccaacaacugcacguucgaguacgugagccagcccuuccugauggaccuggagggcaagcaggggaacuucaagaaccuccgcgaguucguguucaagaacaucgacggcuacuucaagaucuacuccaagcacaccccgaucaaccugguccgggaccugccccagggguucagcgcccucgagccccugguggaccugcccaucggcaucaacaucacccgcuuccagacccuccuggcccugcaccgguccuaccucacgccgggggacagcagcuccggcuggaccgcgggcgccgccgccuacuacgugggguaccugcagccccgcaccuuccugcucaaguacaacgagaacggcaccaucacggacgcggucgacugcgcccuggacccccugagcgagaccaagugcacccucaaguccuucaccguggagaaggggaucuaccagacgagcaacuuccgggugcagcccaccgaguccaucguccgcuucccgaacaucaccaaccugugccccuucggcgagguguucaacgccacccgguucgccagcgucuacgccuggaaccgcaagcggaucuccaacugcguggcggacuacagcgugcuguacaacuccgccagcuucuccacguucaagugcuacggcgucagccccaccaagcucaacgaccugugcuucaccaacguguacgccgacuccuucgugauccgcggggacgagguccggcagaucgcccccggccagaccgggaagaucgccgacuacaacuacaagcugccggacgacuucacgggcugcgugaucgcguggaacagcaacaaccucgacuccaaggucgggggcaacuacaacuaccuguaccgccuguuccgcaagagcaaccucaagcccuucgagcgggacaucuccaccgagaucuaccaggccggcagcacccccugcaacgggguggagggcuucaacugcuacuucccccugcaguccuacggguuccagccgaccaacggcgugggguaccagcccuaccggguggucgugcugagcuucgagcuccugcacgcccccgccacggugugcggccccaagaaguccaccaaccuggucaagaacaagugcgugaacuucaacuucaacggccucaccgggaccggcgugcugaccgagagcaacaagaaguuccugccguuccagcaguucgggcgcgacaucgccgacacgaccgacgcgguccgcgacccccagacccuggagauccucgacaucacccccugcagcuucggcgggguguccgugaucacgccgggcaccaacaccagcaaccaggucgccgugcuguaccagggcgugaacugcaccgagguccccguggccauccacgccgaccagcugacgcccaccuggcggguguacuccaccggcagcaacgucuuccagacccgcgccgggugccucaucggcgcggagcacgugaacaacuccuacgagugcgacauccccaucggggccggcaucugcgccagcuaccagacgcagaccaacuccccgcggcgcgcccggagcguggcgucccagagcaucaucgccuacaccaugucccugggcgccgagaacagcgucgccuacuccaacaacagcaucgccauccccaccaacuucacgaucuccgugaccaccgagauccugcccgugagcaugaccaagacgagcgucgacugcaccauguacaucugcggggacuccaccgagugcagcaaccuccugcugcaguacggcuccuucugcacccagcucaaccgcgcgcugacggggaucgccguggagcaggacaagaacacccaggagguguucgcccaggucaagcagaucuacaagacgcccccgaucaaggacuucggcggguucaacuucagccagauccugcccgaccccuccaagcccagcaagcgguccuucaucgaggaccuccuguucaacaaggugacccuggccgacgccggcuucaucaagcaguacggcgacugccucggggacaucgcggcccgcgaccugaucugcgcccagaaguucaacggccugaccgugcucccgccccugcugaccgacgagaugaucgcccaguacaccagcgcccuccuggcggggaccaucacguccggcuggaccuucggggccggcgccgcccugcagauccccuucgcgaugcagauggccuaccgguucaacggcaucggggucacccagaacgugcucuacgagaaccagaagcugaucgccaaccaguucaacagcgccaucggcaagauccaggacucccugagcuccaccgccagcgcgcucgggaagcugcaggacguggucaaccagaacgcccaggcccugaacacgcucgugaagcagcuguccagcaacuucggcgccaucuccagcgugcugaacgacauccucucccgccuggacccgcccgaggccgaggugcagaucgaccggcugaucaccgggcgccuccagagccugcagaccuacgugacccagcagcugauccgggcggccgagauccgcgccagcgccaaccucgccgcgaccaagauguccgagugcguccugggccagagcaagcggguggacuucugcggcaagggguaccaccugauguccuucccccagagcgccccgcacggcguggucuuccuccacgugacguacguccccgcccaggagaagaacuucaccaccgcccccgcgaucugccacgacgggaaggcccacuucccccgcgagggcguguucguguccaacgggacccacugguucgucacgcagcggaacuucuacgagccgcagaucaucaccaccgacaacaccuucgugagcggcaacugcgacguggucaucggcaucgugaacaacacgguguacgacccccugcagcccgagcuggacuccuucaaggaggagcucgacaaguacuucaagaaccacaccagccccgacgucgaccugggggacaucuccggcaucaacgccagcguggugaacauccagaaggagaucgaccgccugaacgaggucgccaagaaccucaacgagucccugaucgaccugcaggagcucgggaaguacgagcaguacaucaaguggccgugguacaucuggcugggcuucaucgccggccugaucgcgaucgugauggugaccaucaugcucugcugcaugaccagcugcugcuccugccugaaggggugcugcagcugcggcuccugcugcaaguucgacgaggacgacagcgagcccguccugaagggggugaagcuccacuacacgugaggacuaguuauaagacugacuagcccgaugggccucccaacgggcccuccuccccuccuugcaccgagauuaauaaaaaaaaaaaaaaaaaaaaaaaaaaaaaaaaaaaaaaaaaaaaaaaaaaaaaaaaaaaaaaaaugcaucccccccccccccccccccccccccccccccaaaggcucuuuucagagccaccagaauu

SEQ ID NO: 22830 - RNA, 4039 nt, Artificial Sequence
  SARS-CoV-2/Wuhan/WIV05/2019__EPI_ISL_402128 spike protein mRNA gc (1-1273)(Y453F_D614G) R10280
aggagaaagcuuaccauguucguguuccugguccuccugccccuggugagcucccagugcgugaaccucaccacccgcacgcagcugccgcccgccuacaccaacagcuucacccggggcgucuacuaccccgacaagguguuccgcuccagcgugcugcacuccacccaggaccucuuccugcccuucuucagcaacgucacgugguuccacgccauccacguguccgggaccaacggcaccaagcgguucgacaacccggugcugcccuucaacgacggggucuacuucgcgagcaccgagaaguccaacaucauccgcggcuggaucuucgggacgacccucgacagcaagacccagucccugcugaucgugaacaacgccaccaacguggucaucaaggugugcgaguuccaguucugcaacgaccccuuccucggcguguacuaccacaagaacaacaagagcuggauggaguccgaguuccgggucuacagcuccgccaacaacugcacguucgaguacgugagccagcccuuccugauggaccuggagggcaagcaggggaacuucaagaaccuccgcgaguucguguucaagaacaucgacggcuacuucaagaucuacuccaagcacaccccgaucaaccugguccgggaccugccccagggguucagcgcccucgagccccugguggaccugcccaucggcaucaacaucacccgcuuccagacccuccuggcccugcaccgguccuaccucacgccgggggacagcagcuccggcuggaccgcgggcgccgccgccuacuacgugggguaccugcagccccgcaccuuccugcucaaguacaacgagaacggcaccaucacggacgcggucgacugcgcccuggacccccugagcgagaccaagugcacccucaaguccuucaccguggagaaggggaucuaccagacgagcaacuuccgggugcagcccaccgaguccaucguccgcuucccgaacaucaccaaccugugccccuucggcgagguguucaacgccacccgguucgccagcgucuacgccuggaaccgcaagcggaucuccaacugcguggcggacuacagcgugcuguacaacuccgccagcuucuccacguucaagugcuacggcgucagccccaccaagcucaacgaccugugcuucaccaacguguacgccgacuccuucgugauccgcggggacgagguccggcagaucgcccccggccagaccgggaagaucgccgacuacaacuacaagcugccggacgacuucacgggcugcgugaucgcguggaacagcaacaaccucgacuccaaggucgggggcaacuacaacuaccuguuccgccuguuccgcaagagcaaccucaagcccuucgagcgggacaucuccaccgagaucuaccaggccggcagcacccccugcaacgggguggagggcuucaacugcuacuucccccugcaguccuacggguuccagccgaccaacggcgugggguaccagcccuaccggguggucgugcugagcuucgagcuccugcacgcccccgccacggugugcggccccaagaaguccaccaaccuggucaagaacaagugcgugaacuucaacuucaacggccucaccgggaccggcgugcugaccgagagcaacaagaaguuccugccguuccagcaguucgggcgcgacaucgccgacacgaccgacgcgguccgcgacccccagacccuggagauccucgacaucacccccugcagcuucggcgggguguccgugaucacgccgggcaccaacaccagcaaccaggucgccgugcuguaccagggcgugaacugcaccgagguccccguggccauccacgccgaccagcugacgcccaccuggcggguguacuccaccggcagcaacgucuuccagacccgcgccgggugccucaucggcgcggagcacgugaacaacuccuacgagugcgacauccccaucggggccggcaucugcgccagcuaccagacgcagaccaacuccccgcggcgcgcccggagcguggcgucccagagcaucaucgccuacaccaugucccugggcgccgagaacagcgucgccuacuccaacaacagcaucgccauccccaccaacuucacgaucuccgugaccaccgagauccugcccgugagcaugaccaagacgagcgucgacugcaccauguacaucugcggggacuccaccgagugcagcaaccuccugcugcaguacggcuccuucugcacccagcucaaccgcgcgcugacggggaucgccguggagcaggacaagaacacccaggagguguucgcccaggucaagcagaucuacaagacgcccccgaucaaggacuucggcggguucaacuucagccagauccugcccgaccccuccaagcccagcaagcgguccuucaucgaggaccuccuguucaacaaggugacccuggccgacgccggcuucaucaagcaguacggcgacugccucggggacaucgcggcccgcgaccugaucugcgcccagaaguucaacggccugaccgugcucccgccccugcugaccgacgagaugaucgcccaguacaccagcgcccuccuggcggggaccaucacguccggcuggaccuucggggccggcgccgcccugcagauccccuucgcgaugcagauggccuaccgguucaacggcaucggggucacccagaacgugcucuacgagaaccagaagcugaucgccaaccaguucaacagcgccaucggcaagauccaggacucccugagcuccaccgccagcgcgcucgggaagcugcaggacguggucaaccagaacgcccaggcccugaacacgcucgugaagcagcuguccagcaacuucggcgccaucuccagcgugcugaacgacauccucucccgccuggacaaggucgaggccgaggugcagaucgaccggcugaucaccgggcgccuccagagccugcagaccuacgugacccagcagcugauccgggcggccgagauccgcgccagcgccaaccucgccgcgaccaagauguccgagugcguccugggccagagcaagcggguggacuucugcggcaagggguaccaccugauguccuucccccagagcgccccgcacggcguggucuuccuccacgugacguacguccccgcccaggagaagaacuucaccaccgcccccgcgaucugccacgacgggaaggcccacuucccccgcgagggcguguucguguccaacgggacccacugguucgucacgcagcggaacuucuacgagccgcagaucaucaccaccgacaacaccuucgugagcggcaacugcgacguggucaucggcaucgugaacaacacgguguacgacccccugcagcccgagcuggacuccuucaaggaggagcucgacaaguacuucaagaaccacaccagccccgacgucgaccugggggacaucuccggcaucaacgccagcguggugaacauccagaaggagaucgaccgccugaacgaggucgccaagaaccucaacgagucccugaucgaccugcaggagcucgggaaguacgagcaguacaucaaguggccgugguacaucuggcugggcuucaucgccggccugaucgcgaucgugauggugaccaucaugcucugcugcaugaccagcugcugcuccugccugaaggggugcugcagcugcggcuccugcugcaaguucgacgaggacgacagcgagcccguccugaagggggugaagcuccacuacacgugaggacuaguuauaagacugacuagcccgaugggccucccaacgggcccuccuccccuccuugcaccgagauuaauaaaaaaaaaaaaaaaaaaaaaaaaaaaaaaaaaaaaaaaaaaaaaaaaaaaaaaaaaaaaaaaaugcaucccccccccccccccccccccccccccccccaaaggcucuuuucagagccaccagaauu

SEQ ID NO: 22831 - RNA, 4039 nt, Artificial Sequence
  SARS-CoV-2/Wuhan/WIV05/2019__EPI_ISL_402128 spike protein mRNA gc (1-1273)(K986P_V987P_Y453F_D614G) R10281
aggagaaagcuuaccauguucguguuccugguccuccugccccuggugagcucccagugcgugaaccucaccacccgcacgcagcugccgcccgccuacaccaacagcuucacccggggcgucuacuaccccgacaagguguuccgcuccagcgugcugcacuccacccaggaccucuuccugcccuucuucagcaacgucacgugguuccacgccauccacguguccgggaccaacggcaccaagcgguucgacaacccggugcugcccuucaacgacggggucuacuucgcgagcaccgagaaguccaacaucauccgcggcuggaucuucgggacgacccucgacagcaagacccagucccugcugaucgugaacaacgccaccaacguggucaucaaggugugcgaguuccaguucugcaacgaccccuuccucggcguguacuaccacaagaacaacaagagcuggauggaguccgaguuccgggucuacagcuccgccaacaacugcacguucgaguacgugagccagcccuuccugauggaccuggagggcaagcaggggaacuucaagaaccuccgcgaguucguguucaagaacaucgacggcuacuucaagaucuacuccaagcacaccccgaucaaccugguccgggaccugccccagggguucagcgcccucgagccccugguggaccugcccaucggcaucaacaucacccgcuuccagacccuccuggcccugcaccgguccuaccucacgccgggggacagcagcuccggcuggaccgcgggcgccgccgccuacuacgugggguaccugcagccccgcaccuuccugcucaaguacaacgagaacggcaccaucacggacgcggucgacugcgcccuggacccccugagcgagaccaagugcacccucaaguccuucaccguggagaaggggaucuaccagacgagcaacuuccgggugcagcccaccgaguccaucguccgcuucccgaacaucaccaaccugugccccuucggcgagguguucaacgccacccgguucgccagcgucuacgccuggaaccgcaagcggaucuccaacugcguggcggacuacagcgugcuguacaacuccgccagcuucuccacguucaagugcuacggcgucagccccaccaagcucaacgaccugugcuucaccaacguguacgccgacuccuucgugauccgcggggacgagguccggcagaucgcccccggccagaccgggaagaucgccgacuacaacuacaagcugccggacgacuucacgggcugcgugaucgcguggaacagcaacaaccucgacuccaaggucgggggcaacuacaacuaccuguuccgccuguuccgcaagagcaaccucaagcccuucgagcgggacaucuccaccgagaucuaccaggccggcagcacccccugcaacgggguggagggcuucaacugcuacuucccccugcaguccuacggguuccagccgaccaacggcgugggguaccagcccuaccggguggucgugcugagcuucgagcuccugcacgcccccgccacggugugcggccccaagaaguccaccaaccuggucaagaacaagugcgugaacuucaacuucaacggccucaccgggaccggcgugcugaccgagagcaacaagaaguuccugccguuccagcaguucgggcgcgacaucgccgacacgaccgacgcgguccgcgacccccagacccuggagauccucgacaucacccccugcagcuucggcgggguguccgugaucacgccgggcaccaacaccagcaaccaggucgccgugcuguaccagggcgugaacugcaccgagguccccguggccauccacgccgaccagcugacgcccaccuggcggguguacuccaccggcagcaacgucuuccagacccgcgccgggugccucaucggcgcggagcacgugaacaacuccuacgagugcgacauccccaucggggccggcaucugcgccagcuaccagacgcagaccaacuccccgcggcgcgcccggagcguggcgucccagagcaucaucgccuacaccaugucccugggcgccgagaacagcgucgccuacuccaacaacagcaucgccauccccaccaacuucacgaucuccgugaccaccgagauccugcccgugagcaugaccaagacgagcgucgacugcaccauguacaucugcggggacuccaccgagugcagcaaccuccugcugcaguacggcuccuucugcacccagcucaaccgcgcgcugacggggaucgccguggagcaggacaagaacacccaggagguguucgcccaggucaagcagaucuacaagacgcccccgaucaaggacuucggcggguucaacuucagccagauccugcccgaccccuccaagcccagcaagcgguccuucaucgaggaccuccuguucaacaaggugacccuggccgacgccggcuucaucaagcaguacggcgacugccucggggacaucgcggcccgcgaccugaucugcgcccagaaguucaacggccugaccgugcucccgccccugcugaccgacgagaugaucgcccaguacaccagcgcccuccuggcggggaccaucacguccggcuggaccuucggggccggcgccgcccugcagauccccuucgcgaugcagauggccuaccgguucaacggcaucggggucacccagaacgugcucuacgagaaccagaagcugaucgccaaccaguucaacagcgccaucggcaagauccaggacucccugagcuccaccgccagcgcgcucgggaagcugcaggacguggucaaccagaacgcccaggcccugaacacgcucgugaagcagcuguccagcaacuucggcgccaucuccagcgugcugaacgacauccucucccgccuggacccgcccgaggccgaggugcagaucgaccggcugaucaccgggcgccuccagagccugcagaccuacgugacccagcagcugauccgggcggccgagauccgcgccagcgccaaccucgccgcgaccaagauguccgagugcguccugggccagagcaagcggguggacuucugcggcaagggguaccaccugauguccuucccccagagcgccccgcacggcguggucuuccuccacgugacguacguccccgcccaggagaagaacuucaccaccgcccccgcgaucugccacgacgggaaggcccacuucccccgcgagggcguguucguguccaacgggacccacugguucgucacgcagcggaacuucuacgagccgcagaucaucaccaccgacaacaccuucgugagcggcaacugcgacguggucaucggcaucgugaacaacacgguguacgacccccugcagcccgagcuggacuccuucaaggaggagcucgacaaguacuucaagaaccacaccagccccgacgucgaccugggggacaucuccggcaucaacgccagcguggugaacauccagaaggagaucgaccgccugaacgaggucgccaagaaccucaacgagucccugaucgaccugcaggagcucgggaaguacgagcaguacaucaaguggccgugguacaucuggcugggcuucaucgccggccugaucgcgaucgugauggugaccaucaugcucugcugcaugaccagcugcugcuccugccugaaggggugcugcagcugcggcuccugcugcaaguucgacgaggacgacagcgagcccguccugaagggggugaagcuccacuacacgugaggacuaguuauaagacugacuagcccgaugggccucccaacgggcccuccuccccuccuugcaccgagauuaauaaaaaaaaaaaaaaaaaaaaaaaaaaaaaaaaaaaaaaaaaaaaaaaaaaaaaaaaaaaaaaaaugcaucccccccccccccccccccccccccccccccaaaggcucuuuucagagccaccagaauu

SEQ ID NO: 22832 - RNA, 4039 nt, Artificial Sequence
  SARS-CoV-2/Wuhan/WIV05/2019__EPI_ISL_402128 spike protein mRNA gc (1-1273)(D614G_I692V) R10288
aggagaaagcuuaccauguucguguuccugguccuccugccccuggugagcucccagugcgugaaccucaccacccgcacgcagcugccgcccgccuacaccaacagcuucacccggggcgucuacuaccccgacaagguguuccgcuccagcgugcugcacuccacccaggaccucuuccugcccuucuucagcaacgucacgugguuccacgccauccacguguccgggaccaacggcaccaagcgguucgacaacccggugcugcccuucaacgacggggucuacuucgcgagcaccgagaaguccaacaucauccgcggcuggaucuucgggacgacccucgacagcaagacccagucccugcugaucgugaacaacgccaccaacguggucaucaaggugugcgaguuccaguucugcaacgaccccuuccucggcguguacuaccacaagaacaacaagagcuggauggaguccgaguuccgggucuacagcuccgccaacaacugcacguucgaguacgugagccagcccuuccugauggaccuggagggcaagcaggggaacuucaagaaccuccgcgaguucguguucaagaacaucgacggcuacuucaagaucuacuccaagcacaccccgaucaaccugguccgggaccugccccagggguucagcgcccucgagccccugguggaccugcccaucggcaucaacaucacccgcuuccagacccuccuggcccugcaccgguccuaccucacgccgggggacagcagcuccggcuggaccgcgggcgccgccgccuacuacgugggguaccugcagccccgcaccuuccugcucaaguacaacgagaacggcaccaucacggacgcggucgacugcgcccuggacccccugagcgagaccaagugcacccucaaguccuucaccguggagaaggggaucuaccagacgagcaacuuccgggugcagcccaccgaguccaucguccgcuucccgaacaucaccaaccugugccccuucggcgagguguucaacgccacccgguucgccagcgucuacgccuggaaccgcaagcggaucuccaacugcguggcggacuacagcgugcuguacaacuccgccagcuucuccacguucaagugcuacggcgucagccccaccaagcucaacgaccugugcuucaccaacguguacgccgacuccuucgugauccgcggggacgagguccggcagaucgcccccggccagaccgggaagaucgccgacuacaacuacaagcugccggacgacuucacgggcugcgugaucgcguggaacagcaacaaccucgacuccaaggucgggggcaacuacaacuaccuguaccgccuguuccgcaagagcaaccucaagcccuucgagcgggacaucuccaccgagaucuaccaggccggcagcacccccugcaacgggguggagggcuucaacugcuacuucccccugcaguccuacggguuccagccgaccaacggcgugggguaccagcccuaccggguggucgugcugagcuucgagcuccugcacgcccccgccacggugugcggccccaagaaguccaccaaccuggucaagaacaagugcgugaacuucaacuucaacggccucaccgggaccggcgugcugaccgagagcaacaagaaguuccugccguuccagcaguucgggcgcgacaucgccgacacgaccgacgcgguccgcgacccccagacccuggagauccucgacaucacccccugcagcuucggcgggguguccgugaucacgccgggcaccaacaccagcaaccaggucgccgugcuguaccagggcgugaacugcaccgagguccccguggccauccacgccgaccagcugacgcccaccuggcggguguacuccaccggcagcaacgucuuccagacccgcgccgggugccucaucggcgcggagcacgugaacaacuccuacgagugcgacauccccaucggggccggcaucugcgccagcuaccagacgcagaccaacuccccgcggcgcgcccggagcguggcgucccagagcgucaucgccuacaccaugucccugggcgccgagaacagcgucgccuacuccaacaacagcaucgccauccccaccaacuucacgaucuccgugaccaccgagauccugcccgugagcaugaccaagacgagcgucgacugcaccauguacaucugcggggacuccaccgagugcagcaaccuccugcugcaguacggcuccuucugcacccagcucaaccgcgcgcugacggggaucgccguggagcaggacaagaacacccaggagguguucgcccaggucaagcagaucuacaagacgcccccgaucaaggacuucggcggguucaacuucagccagauccugcccgaccccuccaagcccagcaagcgguccuucaucgaggaccuccuguucaacaaggugacccuggccgacgccggcuucaucaagcaguacggcgacugccucggggacaucgcggcccgcgaccugaucugcgcccagaaguucaacggccugaccgugcucccgccccugcugaccgacgagaugaucgcccaguacaccagcgcccuccuggcggggaccaucacguccggcuggaccuucggggccggcgccgcccugcagauccccuucgcgaugcagauggccuaccgguucaacggcaucggggucacccagaacgugcucuacgagaaccagaagcugaucgccaaccaguucaacagcgccaucggcaagauccaggacucccugagcuccaccgccagcgcgcucgggaagcugcaggacguggucaaccagaacgcccaggcccugaacacgcucgugaagcagcuguccagcaacuucggcgccaucuccagcgugcugaacgacauccucucccgccuggacaaggucgaggccgaggugcagaucgaccggcugaucaccgggcgccuccagagccugcagaccuacgugacccagcagcugauccgggcggccgagauccgcgccagcgccaaccucgccgcgaccaagauguccgagugcguccugggccagagcaagcggguggacuucugcggcaagggguaccaccugauguccuucccccagagcgccccgcacggcguggucuuccuccacgugacguacguccccgcccaggagaagaacuucaccaccgcccccgcgaucugccacgacgggaaggcccacuucccccgcgagggcguguucguguccaacgggacccacugguucgucacgcagcggaacuucuacgagccgcagaucaucaccaccgacaacaccuucgugagcggcaacugcgacguggucaucggcaucgugaacaacacgguguacgacccccugcagcccgagcuggacuccuucaaggaggagcucgacaaguacuucaagaaccacaccagccccgacgucgaccugggggacaucuccggcaucaacgccagcguggugaacauccagaaggagaucgaccgccugaacgaggucgccaagaaccucaacgagucccugaucgaccugcaggagcucgggaaguacgagcaguacaucaaguggccgugguacaucuggcugggcuucaucgccggccugaucgcgaucgugauggugaccaucaugcucugcugcaugaccagcugcugcuccugccugaaggggugcugcagcugcggcuccugcugcaaguucgacgaggacgacagcgagcccguccugaagggggugaagcuccacuacacgugaggacuaguuauaagacugacuagcccgaugggccucccaacgggcccuccuccccuccuugcaccgagauuaauaaaaaaaaaaaaaaaaaaaaaaaaaaaaaaaaaaaaaaaaaaaaaaaaaaaaaaaaaaaaaaaaugcaucccccccccccccccccccccccccccccccaaaggcucuuuucagagccaccagaauu

SEQ ID NO: 22833 - RNA, 4039 nt, Artificial Sequence
  SARS-CoV-2/Wuhan/WIV05/2019__EPI_ISL_402128 spike protein mRNA gc (1-1273)(K986P_V987P_D614G_I692V) R10289
aggagaaagcuuaccauguucguguuccugguccuccugccccuggugagcucccagugcgugaaccucaccacccgcacgcagcugccgcccgccuacaccaacagcuucacccggggcgucuacuaccccgacaagguguuccgcuccagcgugcugcacuccacccaggaccucuuccugcccuucuucagcaacgucacgugguuccacgccauccacguguccgggaccaacggcaccaagcgguucgacaacccggugcugcccuucaacgacggggucuacuucgcgagcaccgagaaguccaacaucauccgcggcuggaucuucgggacgacccucgacagcaagacccagucccugcugaucgugaacaacgccaccaacguggucaucaaggugugcgaguuccaguucugcaacgaccccuuccucggcguguacuaccacaagaacaacaagagcuggauggaguccgaguuccgggucuacagcuccgccaacaacugcacguucgaguacgugagccagcccuuccugauggaccuggagggcaagcaggggaacuucaagaaccuccgcgaguucguguucaagaacaucgacggcuacuucaagaucuacuccaagcacaccccgaucaaccugguccgggaccugccccagggguucagcgcccucgagccccugguggaccugcccaucggcaucaacaucacccgcuuccagacccuccuggcccugcaccgguccuaccucacgccgggggacagcagcuccggcuggaccgcgggcgccgccgccuacuacgugggguaccugcagccccgcaccuuccugcucaaguacaacgagaacggcaccaucacggacgcggucgacugcgcccuggacccccugagcgagaccaagugcacccucaaguccuucaccguggagaaggggaucuaccagacgagcaacuuccgggugcagcccaccgaguccaucguccgcuucccgaacaucaccaaccugugccccuucggcgagguguucaacgccacccgguucgccagcgucuacgccuggaaccgcaagcggaucuccaacugcguggcggacuacagcgugcuguacaacuccgccagcuucuccacguucaagugcuacggcgucagccccaccaagcucaacgaccugugcuucaccaacguguacgccgacuccuucgugauccgcggggacgagguccggcagaucgcccccggccagaccgggaagaucgccgacuacaacuacaagcugccggacgacuucacgggcugcgugaucgcguggaacagcaacaaccucgacuccaaggucgggggcaacuacaacuaccuguaccgccuguuccgcaagagcaaccucaagcccuucgagcgggacaucuccaccgagaucuaccaggccggcagcacccccugcaacgggguggagggcuucaacugcuacuucccccugcaguccuacggguuccagccgaccaacggcgugggguaccagcccuaccggguggucgugcugagcuucgagcuccugcacgcccccgccacggugugcggccccaagaaguccaccaaccuggucaagaacaagugcgugaacuucaacuucaacggccucaccgggaccggcgugcugaccgagagcaacaagaaguuccugccguuccagcaguucgggcgcgacaucgccgacacgaccgacgcgguccgcgacccccagacccuggagauccucgacaucacccccugcagcuucggcgggguguccgugaucacgccgggcaccaacaccagcaaccaggucgccgugcuguaccagggcgugaacugcaccgagguccccguggccauccacgccgaccagcugacgcccaccuggcggguguacuccaccggcagcaacgucuuccagacccgcgccgggugccucaucggcgcggagcacgugaacaacuccuacgagugcgacauccccaucggggccggcaucugcgccagcuaccagacgcagaccaacuccccgcggcgcgcccggagcguggcgucccagagcgucaucgccuacaccaugucccugggcgccgagaacagcgucgccuacuccaacaacagcaucgccauccccaccaacuucacgaucuccgugaccaccgagauccugcccgugagcaugaccaagacgagcgucgacugcaccauguacaucugcggggacuccaccgagugcagcaaccuccugcugcaguacggcuccuucugcacccagcucaaccgcgcgcugacggggaucgccguggagcaggacaagaacacccaggagguguucgcccaggucaagcagaucuacaagacgcccccgaucaaggacuucggcggguucaacuucagccagauccugcccgaccccuccaagcccagcaagcgguccuucaucgaggaccuccuguucaacaaggugacccuggccgacgccggcuucaucaagcaguacggcgacugccucggggacaucgcggcccgcgaccugaucugcgcccagaaguucaacggccugaccgugcucccgccccugcugaccgacgagaugaucgcccaguacaccagcgcccuccuggcggggaccaucacguccggcuggaccuucggggccggcgccgcccugcagauccccuucgcgaugcagauggccuaccgguucaacggcaucggggucacccagaacgugcucuacgagaaccagaagcugaucgccaaccaguucaacagcgccaucggcaagauccaggacucccugagcuccaccgccagcgcgcucgggaagcugcaggacguggucaaccagaacgcccaggcccugaacacgcucgugaagcagcuguccagcaacuucggcgccaucuccagcgugcugaacgacauccucucccgccuggacccgcccgaggccgaggugcagaucgaccggcugaucaccgggcgccuccagagccugcagaccuacgugacccagcagcugauccgggcggccgagauccgcgccagcgccaaccucgccgcgaccaagauguccgagugcguccugggccagagcaagcggguggacuucugcggcaagggguaccaccugauguccuucccccagagcgccccgcacggcguggucuuccuccacgugacguacguccccgcccaggagaagaacuucaccaccgcccccgcgaucugccacgacgggaaggcccacuucccccgcgagggcguguucguguccaacgggacccacugguucgucacgcagcggaacuucuacgagccgcagaucaucaccaccgacaacaccuucgugagcggcaacugcgacguggucaucggcaucgugaacaacacgguguacgacccccugcagcccgagcuggacuccuucaaggaggagcucgacaaguacuucaagaaccacaccagccccgacgucgaccugggggacaucuccggcaucaacgccagcguggugaacauccagaaggagaucgaccgccugaacgaggucgccaagaaccucaacgagucccugaucgaccugcaggagcucgggaaguacgagcaguacaucaaguggccgugguacaucuggcugggcuucaucgccggccugaucgcgaucgugauggugaccaucaugcucugcugcaugaccagcugcugcuccugccugaaggggugcugcagcugcggcuccugcugcaaguucgacgaggacgacagcgagcccguccugaagggggugaagcuccacuacacgugaggacuaguuauaagacugacuagcccgaugggccucccaacgggcccuccuccccuccuugcaccgagauuaauaaaaaaaaaaaaaaaaaaaaaaaaaaaaaaaaaaaaaaaaaaaaaaaaaaaaaaaaaaaaaaaaugcaucccccccccccccccccccccccccccccccaaaggcucuuuucagagccaccagaauu

SEQ ID NO: 22834 - RNA, 4039 nt, Artificial Sequence
  SARS-CoV-2/Wuhan/WIV05/2019__EPI_ISL_402128 spike protein mRNA gc (1-1273)(D614G_M1229I) R10344
aggagaaagcuuaccauguucguguuccugguccuccugccccuggugagcucccagugcgugaaccucaccacccgcacgcagcugccgcccgccuacaccaacagcuucacccggggcgucuacuaccccgacaagguguuccgcuccagcgugcugcacuccacccaggaccucuuccugcccuucuucagcaacgucacgugguuccacgccauccacguguccgggaccaacggcaccaagcgguucgacaacccggugcugcccuucaacgacggggucuacuucgcgagcaccgagaaguccaacaucauccgcggcuggaucuucgggacgacccucgacagcaagacccagucccugcugaucgugaacaacgccaccaacguggucaucaaggugugcgaguuccaguucugcaacgaccccuuccucggcguguacuaccacaagaacaacaagagcuggauggaguccgaguuccgggucuacagcuccgccaacaacugcacguucgaguacgugagccagcccuuccugauggaccuggagggcaagcaggggaacuucaagaaccuccgcgaguucguguucaagaacaucgacggcuacuucaagaucuacuccaagcacaccccgaucaaccugguccgggaccugccccagggguucagcgcccucgagccccugguggaccugcccaucggcaucaacaucacccgcuuccagacccuccuggcccugcaccgguccuaccucacgccgggggacagcagcuccggcuggaccgcgggcgccgccgccuacuacgugggguaccugcagccccgcaccuuccugcucaaguacaacgagaacggcaccaucacggacgcggucgacugcgcccuggacccccugagcgagaccaagugcacccucaaguccuucaccguggagaaggggaucuaccagacgagcaacuuccgggugcagcccaccgaguccaucguccgcuucccgaacaucaccaaccugugccccuucggcgagguguucaacgccacccgguucgccagcgucuacgccuggaaccgcaagcggaucuccaacugcguggcggacuacagcgugcuguacaacuccgccagcuucuccacguucaagugcuacggcgucagccccaccaagcucaacgaccugugcuucaccaacguguacgccgacuccuucgugauccgcggggacgagguccggcagaucgcccccggccagaccgggaagaucgccgacuacaacuacaagcugccggacgacuucacgggcugcgugaucgcguggaacagcaacaaccucgacuccaaggucgggggcaacuacaacuaccuguaccgccuguuccgcaagagcaaccucaagcccuucgagcgggacaucuccaccgagaucuaccaggccggcagcacccccugcaacgggguggagggcuucaacugcuacuucccccugcaguccuacggguuccagccgaccaacggcgugggguaccagcccuaccggguggucgugcugagcuucgagcuccugcacgcccccgccacggugugcggccccaagaaguccaccaaccuggucaagaacaagugcgugaacuucaacuucaacggccucaccgggaccggcgugcugaccgagagcaacaagaaguuccugccguuccagcaguucgggcgcgacaucgccgacacgaccgacgcgguccgcgacccccagacccuggagauccucgacaucacccccugcagcuucggcgggguguccgugaucacgccgggcaccaacaccagcaaccaggucgccgugcuguaccagggcgugaacugcaccgagguccccguggccauccacgccgaccagcugacgcccaccuggcggguguacuccaccggcagcaacgucuuccagacccgcgccgggugccucaucggcgcggagcacgugaacaacuccuacgagugcgacauccccaucggggccggcaucugcgccagcuaccagacgcagaccaacuccccgcggcgcgcccggagcguggcgucccagagcaucaucgccuacaccaugucccugggcgccgagaacagcgucgccuacuccaacaacagcaucgccauccccaccaacuucacgaucuccgugaccaccgagauccugcccgugagcaugaccaagacgagcgucgacugcaccauguacaucugcggggacuccaccgagugcagcaaccuccugcugcaguacggcuccuucugcacccagcucaaccgcgcgcugacggggaucgccguggagcaggacaagaacacccaggagguguucgcccaggucaagcagaucuacaagacgcccccgaucaaggacuucggcggguucaacuucagccagauccugcccgaccccuccaagcccagcaagcgguccuucaucgaggaccuccuguucaacaaggugacccuggccgacgccggcuucaucaagcaguacggcgacugccucggggacaucgcggcccgcgaccugaucugcgcccagaaguucaacggccugaccgugcucccgccccugcugaccgacgagaugaucgcccaguacaccagcgcccuccuggcggggaccaucacguccggcuggaccuucggggccggcgccgcccugcagauccccuucgcgaugcagauggccuaccgguucaacggcaucggggucacccagaacgugcucuacgagaaccagaagcugaucgccaaccaguucaacagcgccaucggcaagauccaggacucccugagcuccaccgccagcgcgcucgggaagcugcaggacguggucaaccagaacgcccaggcccugaacacgcucgugaagcagcuguccagcaacuucggcgccaucuccagcgugcugaacgacauccucucccgccuggacaaggucgaggccgaggugcagaucgaccggcugaucaccgggcgccuccagagccugcagaccuacgugacccagcagcugauccgggcggccgagauccgcgccagcgccaaccucgccgcgaccaagauguccgagugcguccugggccagagcaagcggguggacuucugcggcaagggguaccaccugauguccuucccccagagcgccccgcacggcguggucuuccuccacgugacguacguccccgcccaggagaagaacuucaccaccgcccccgcgaucugccacgacgggaaggcccacuucccccgcgagggcguguucguguccaacgggacccacugguucgucacgcagcggaacuucuacgagccgcagaucaucaccaccgacaacaccuucgugagcggcaacugcgacguggucaucggcaucgugaacaacacgguguacgacccccugcagcccgagcuggacuccuucaaggaggagcucgacaaguacuucaagaaccacaccagccccgacgucgaccugggggacaucuccggcaucaacgccagcguggugaacauccagaaggagaucgaccgccugaacgaggucgccaagaaccucaacgagucccugaucgaccugcaggagcucgggaaguacgagcaguacaucaaguggccgugguacaucuggcugggcuucaucgccggccugaucgcgaucgugaucgugaccaucaugcucugcugcaugaccagcugcugcuccugccugaaggggugcugcagcugcggcuccugcugcaaguucgacgaggacgacagcgagcccguccugaagggggugaagcuccacuacacgugaggacuaguuauaagacugacuagcccgaugggccucccaacgggcccuccuccccuccuugcaccgagauuaauaaaaaaaaaaaaaaaaaaaaaaaaaaaaaaaaaaaaaaaaaaaaaaaaaaaaaaaaaaaaaaaaugcaucccccccccccccccccccccccccccccccaaaggcucuuuucagagccaccagaauu

SEQ ID NO: 22835 - RNA, 4039 nt, Artificial Sequence
  SARS-CoV-2/Wuhan/WIV05/2019__EPI_ISL_402128 spike protein mRNA gc (1-1273)(K986P_V987P_D614G_M1229I) R10345
aggagaaagcuuaccauguucguguuccugguccuccugccccuggugagcucccagugcgugaaccucaccacccgcacgcagcugccgcccgccuacaccaacagcuucacccggggcgucuacuaccccgacaagguguuccgcuccagcgugcugcacuccacccaggaccucuuccugcccuucuucagcaacgucacgugguuccacgccauccacguguccgggaccaacggcaccaagcgguucgacaacccggugcugcccuucaacgacggggucuacuucgcgagcaccgagaaguccaacaucauccgcggcuggaucuucgggacgacccucgacagcaagacccagucccugcugaucgugaacaacgccaccaacguggucaucaaggugugcgaguuccaguucugcaacgaccccuuccucggcguguacuaccacaagaacaacaagagcuggauggaguccgaguuccgggucuacagcuccgccaacaacugcacguucgaguacgugagccagcccuuccugauggaccuggagggcaagcaggggaacuucaagaaccuccgcgaguucguguucaagaacaucgacggcuacuucaagaucuacuccaagcacaccccgaucaaccugguccgggaccugccccagggguucagcgcccucgagccccugguggaccugcccaucggcaucaacaucacccgcuuccagacccuccuggcccugcaccgguccuaccucacgccgggggacagcagcuccggcuggaccgcgggcgccgccgccuacuacgugggguaccugcagccccgcaccuuccugcucaaguacaacgagaacggcaccaucacggacgcggucgacugcgcccuggacccccugagcgagaccaagugcacccucaaguccuucaccguggagaaggggaucuaccagacgagcaacuuccgggugcagcccaccgaguccaucguccgcuucccgaacaucaccaaccugugccccuucggcgagguguucaacgccacccgguucgccagcgucuacgccuggaaccgcaagcggaucuccaacugcguggcggacuacagcgugcuguacaacuccgccagcuucuccacguucaagugcuacggcgucagccccaccaagcucaacgaccugugcuucaccaacguguacgccgacuccuucgugauccgcggggacgagguccggcagaucgcccccggccagaccgggaagaucgccgacuacaacuacaagcugccggacgacuucacgggcugcgugaucgcguggaacagcaacaaccucgacuccaaggucgggggcaacuacaacuaccuguaccgccuguuccgcaagagcaaccucaagcccuucgagcgggacaucuccaccgagaucuaccaggccggcagcacccccugcaacgggguggagggcuucaacugcuacuucccccugcaguccuacggguuccagccgaccaacggcgugggguaccagcccuaccggguggucgugcugagcuucgagcuccugcacgcccccgccacggugugcggccccaagaaguccaccaaccuggucaagaacaagugcgugaacuucaacuucaacggccucaccgggaccggcgugcugaccgagagcaacaagaaguuccugccguuccagcaguucgggcgcgacaucgccgacacgaccgacgcgguccgcgacccccagacccuggagauccucgacaucacccccugcagcuucggcgggguguccgugaucacgccgggcaccaacaccagcaaccaggucgccgugcuguaccagggcgugaacugcaccgagguccccguggccauccacgccgaccagcugacgcccaccuggcggguguacuccaccggcagcaacgucuuccagacccgcgccgggugccucaucggcgcggagcacgugaacaacuccuacgagugcgacauccccaucggggccggcaucugcgccagcuaccagacgcagaccaacuccccgcggcgcgcccggagcguggcgucccagagcaucaucgccuacaccaugucccugggcgccgagaacagcgucgccuacuccaacaacagcaucgccauccccaccaacuucacgaucuccgugaccaccgagauccugcccgugagcaugaccaagacgagcgucgacugcaccauguacaucugcggggacuccaccgagugcagcaaccuccugcugcaguacggcuccuucugcacccagcucaaccgcgcgcugacggggaucgccguggagcaggacaagaacacccaggagguguucgcccaggucaagcagaucuacaagacgcccccgaucaaggacuucggcggguucaacuucagccagauccugcccgaccccuccaagcccagcaagcgguccuucaucgaggaccuccuguucaacaaggugacccuggccgacgccggcuucaucaagcaguacggcgacugccucggggacaucgcggcccgcgaccugaucugcgcccagaaguucaacggccugaccgugcucccgccccugcugaccgacgagaugaucgcccaguacaccagcgcccuccuggcggggaccaucacguccggcuggaccuucggggccggcgccgcccugcagauccccuucgcgaugcagauggccuaccgguucaacggcaucggggucacccagaacgugcucuacgagaaccagaagcugaucgccaaccaguucaacagcgccaucggcaagauccaggacucccugagcuccaccgccagcgcgcucgggaagcugcaggacguggucaaccagaacgcccaggcccugaacacgcucgugaagcagcuguccagcaacuucggcgccaucuccagcgugcugaacgacauccucucccgccuggacccgcccgaggccgaggugcagaucgaccggcugaucaccgggcgccuccagagccugcagaccuacgugacccagcagcugauccgggcggccgagauccgcgccagcgccaaccucgccgcgaccaagauguccgagugcguccugggccagagcaagcggguggacuucugcggcaagggguaccaccugauguccuucccccagagcgccccgcacggcguggucuuccuccacgugacguacguccccgcccaggagaagaacuucaccaccgcccccgcgaucugccacgacgggaaggcccacuucccccgcgagggcguguucguguccaacgggacccacugguucgucacgcagcggaacuucuacgagccgcagaucaucaccaccgacaacaccuucgugagcggcaacugcgacguggucaucggcaucgugaacaacacgguguacgacccccugcagcccgagcuggacuccuucaaggaggagcucgacaaguacuucaagaaccacaccagccccgacgucgaccugggggacaucuccggcaucaacgccagcguggugaacauccagaaggagaucgaccgccugaacgaggucgccaagaaccucaacgagucccugaucgaccugcaggagcucgggaaguacgagcaguacaucaaguggccgugguacaucuggcugggcuucaucgccggccugaucgcgaucgugaucgugaccaucaugcucugcugcaugaccagcugcugcuccugccugaaggggugcugcagcugcggcuccugcugcaaguucgacgaggacgacagcgagcccguccugaagggggugaagcuccacuacacgugaggacuaguuauaagacugacuagcccgaugggccucccaacgggcccuccuccccuccuugcaccgagauuaauaaaaaaaaaaaaaaaaaaaaaaaaaaaaaaaaaaaaaaaaaaaaaaaaaaaaaaaaaaaaaaaaugcaucccccccccccccccccccccccccccccccaaaggcucuuuucagagccaccagaauu

SEQ ID NO: 22836 - RNA, 4033 nt, Artificial Sequence
  SARS-CoV-2/Wuhan/WIV05/2019__EPI_ISL_402128 spike protein mRNA gc (1-1273)(H69del_V70del_A222V_Y453F_S477N_D614G_I692V) R10292
aggagaaagcuuaccauguucguguuccugguccuccugccccuggugagcucccagugcgugaaccucaccacccgcacgcagcugccgcccgccuacaccaacagcuucacccggggcgucuacuaccccgacaagguguuccgcuccagcgugcugcacuccacccaggaccucuuccugcccuucuucagcaacgucacgugguuccacgccaucuccgggaccaacggcaccaagcgguucgacaacccggugcugcccuucaacgacggggucuacuucgcgagcaccgagaaguccaacaucauccgcggcuggaucuucgggacgacccucgacagcaagacccagucccugcugaucgugaacaacgccaccaacguggucaucaaggugugcgaguuccaguucugcaacgaccccuuccucggcguguacuaccacaagaacaacaagagcuggauggaguccgaguuccgggucuacagcuccgccaacaacugcacguucgaguacgugagccagcccuuccugauggaccuggagggcaagcaggggaacuucaagaaccuccgcgaguucguguucaagaacaucgacggcuacuucaagaucuacuccaagcacaccccgaucaaccugguccgggaccugccccagggguucagcguccucgagccccugguggaccugcccaucggcaucaacaucacccgcuuccagacccuccuggcccugcaccgguccuaccucacgccgggggacagcagcuccggcuggaccgcgggcgccgccgccuacuacgugggguaccugcagccccgcaccuuccugcucaaguacaacgagaacggcaccaucacggacgcggucgacugcgcccuggacccccugagcgagaccaagugcacccucaaguccuucaccguggagaaggggaucuaccagacgagcaacuuccgggugcagcccaccgaguccaucguccgcuucccgaacaucaccaaccugugccccuucggcgagguguucaacgccacccgguucgccagcgucuacgccuggaaccgcaagcggaucuccaacugcguggcggacuacagcgugcuguacaacuccgccagcuucuccacguucaagugcuacggcgucagccccaccaagcucaacgaccugugcuucaccaacguguacgccgacuccuucgugauccgcggggacgagguccggcagaucgcccccggccagaccgggaagaucgccgacuacaacuacaagcugccggacgacuucacgggcugcgugaucgcguggaacagcaacaaccucgacuccaaggucgggggcaacuacaacuaccuguuccgccuguuccgcaagagcaaccucaagcccuucgagcgggacaucuccaccgagaucuaccaggccggcaacacccccugcaacgggguggagggcuucaacugcuacuucccccugcaguccuacggguuccagccgaccaacggcgugggguaccagcccuaccggguggucgugcugagcuucgagcuccugcacgcccccgccacggugugcggccccaagaaguccaccaaccuggucaagaacaagugcgugaacuucaacuucaacggccucaccgggaccggcgugcugaccgagagcaacaagaaguuccugccguuccagcaguucgggcgcgacaucgccgacacgaccgacgcgguccgcgacccccagacccuggagauccucgacaucacccccugcagcuucggcgggguguccgugaucacgccgggcaccaacaccagcaaccaggucgccgugcuguaccagggcgugaacugcaccgagguccccguggccauccacgccgaccagcugacgcccaccuggcggguguacuccaccggcagcaacgucuuccagacccgcgccgggugccucaucggcgcggagcacgugaacaacuccuacgagugcgacauccccaucggggccggcaucugcgccagcuaccagacgcagaccaacuccccgcggcgcgcccggagcguggcgucccagagcgucaucgccuacaccaugucccugggcgccgagaacagcgucgccuacuccaacaacagcaucgccauccccaccaacuucacgaucuccgugaccaccgagauccugcccgugagcaugaccaagacgagcgucgacugcaccauguacaucugcggggacuccaccgagugcagcaaccuccugcugcaguacggcuccuucugcacccagcucaaccgcgcgcugacggggaucgccguggagcaggacaagaacacccaggagguguucgcccaggucaagcagaucuacaagacgcccccgaucaaggacuucggcggguucaacuucagccagauccugcccgaccccuccaagcccagcaagcgguccuucaucgaggaccuccuguucaacaaggugacccuggccgacgccggcuucaucaagcaguacggcgacugccucggggacaucgcggcccgcgaccugaucugcgcccagaaguucaacggccugaccgugcucccgccccugcugaccgacgagaugaucgcccaguacaccagcgcccuccuggcggggaccaucacguccggcuggaccuucggggccggcgccgcccugcagauccccuucgcgaugcagauggccuaccgguucaacggcaucggggucacccagaacgugcucuacgagaaccagaagcugaucgccaaccaguucaacagcgccaucggcaagauccaggacucccugagcuccaccgccagcgcgcucgggaagcugcaggacguggucaaccagaacgcccaggcccugaacacgcucgugaagcagcuguccagcaacuucggcgccaucuccagcgugcugaacgacauccucucccgccuggacaaggucgaggccgaggugcagaucgaccggcugaucaccgggcgccuccagagccugcagaccuacgugacccagcagcugauccgggcggccgagauccgcgccagcgccaaccucgccgcgaccaagauguccgagugcguccugggccagagcaagcggguggacuucugcggcaagggguaccaccugauguccuucccccagagcgccccgcacggcguggucuuccuccacgugacguacguccccgcccaggagaagaacuucaccaccgcccccgcgaucugccacgacgggaaggcccacuucccccgcgagggcguguucguguccaacgggacccacugguucgucacgcagcggaacuucuacgagccgcagaucaucaccaccgacaacaccuucgugagcggcaacugcgacguggucaucggcaucgugaacaacacgguguacgacccccugcagcccgagcuggacuccuucaaggaggagcucgacaaguacuucaagaaccacaccagccccgacgucgaccugggggacaucuccggcaucaacgccagcguggugaacauccagaaggagaucgaccgccugaacgaggucgccaagaaccucaacgagucccugaucgaccugcaggagcucgggaaguacgagcaguacaucaaguggccgugguacaucuggcugggcuucaucgccggccugaucgcgaucgugauggugaccaucaugcucugcugcaugaccagcugcugcuccugccugaaggggugcugcagcugcggcuccugcugcaaguucgacgaggacgacagcgagcccguccugaagggggugaagcuccacuacacgugaggacuaguuauaagacugacuagcccgaugggccucccaacgggcccuccuccccuccuugcaccgagauuaauaaaaaaaaaaaaaaaaaaaaaaaaaaaaaaaaaaaaaaaaaaaaaaaaaaaaaaaaaaaaaaaaugcaucccccccccccccccccccccccccccccccaaaggcucuuuucagagccaccagaauu

SEQ ID NO: 22837 - RNA, 4033 nt, Artificial Sequence
  SARS-CoV-2/Wuhan/WIV05/2019__EPI_ISL_402128 spike protein mRNA gc (1-1273)(K986P_V987P_H69del_V70del_A222V_Y453F_S477N_D614G_I692V) R10293
aggagaaagcuuaccauguucguguuccugguccuccugccccuggugagcucccagugcgugaaccucaccacccgcacgcagcugccgcccgccuacaccaacagcuucacccggggcgucuacuaccccgacaagguguuccgcuccagcgugcugcacuccacccaggaccucuuccugcccuucuucagcaacgucacgugguuccacgccaucuccgggaccaacggcaccaagcgguucgacaacccggugcugcccuucaacgacggggucuacuucgcgagcaccgagaaguccaacaucauccgcggcuggaucuucgggacgacccucgacagcaagacccagucccugcugaucgugaacaacgccaccaacguggucaucaaggugugcgaguuccaguucugcaacgaccccuuccucggcguguacuaccacaagaacaacaagagcuggauggaguccgaguuccgggucuacagcuccgccaacaacugcacguucgaguacgugagccagcccuuccugauggaccuggagggcaagcaggggaacuucaagaaccuccgcgaguucguguucaagaacaucgacggcuacuucaagaucuacuccaagcacaccccgaucaaccugguccgggaccugccccagggguucagcguccucgagccccugguggaccugcccaucggcaucaacaucacccgcuuccagacccuccuggcccugcaccgguccuaccucacgccgggggacagcagcuccggcuggaccgcgggcgccgccgccuacuacgugggguaccugcagccccgcaccuuccugcucaaguacaacgagaacggcaccaucacggacgcggucgacugcgcccuggacccccugagcgagaccaagugcacccucaaguccuucaccguggagaaggggaucuaccagacgagcaacuuccgggugcagcccaccgaguccaucguccgcuucccgaacaucaccaaccugugccccuucggcgagguguucaacgccacccgguucgccagcgucuacgccuggaaccgcaagcggaucuccaacugcguggcggacuacagcgugcuguacaacuccgccagcuucuccacguucaagugcuacggcgucagccccaccaagcucaacgaccugugcuucaccaacguguacgccgacuccuucgugauccgcggggacgagguccggcagaucgcccccggccagaccgggaagaucgccgacuacaacuacaagcugccggacgacuucacgggcugcgugaucgcguggaacagcaacaaccucgacuccaaggucgggggcaacuacaacuaccuguuccgccuguuccgcaagagcaaccucaagcccuucgagcgggacaucuccaccgagaucuaccaggccggcaacacccccugcaacgggguggagggcuucaacugcuacuucccccugcaguccuacggguuccagccgaccaacggcgugggguaccagcccuaccggguggucgugcugagcuucgagcuccugcacgcccccgccacggugugcggccccaagaaguccaccaaccuggucaagaacaagugcgugaacuucaacuucaacggccucaccgggaccggcgugcugaccgagagcaacaagaaguuccugccguuccagcaguucgggcgcgacaucgccgacacgaccgacgcgguccgcgacccccagacccuggagauccucgacaucacccccugcagcuucggcgggguguccgugaucacgccgggcaccaacaccagcaaccaggucgccgugcuguaccagggcgugaacugcaccgagguccccguggccauccacgccgaccagcugacgcccaccuggcggguguacuccaccggcagcaacgucuuccagacccgcgccgggugccucaucggcgcggagcacgugaacaacuccuacgagugcgacauccccaucggggccggcaucugcgccagcuaccagacgcagaccaacuccccgcggcgcgcccggagcguggcgucccagagcgucaucgccuacaccaugucccugggcgccgagaacagcgucgccuacuccaacaacagcaucgccauccccaccaacuucacgaucuccgugaccaccgagauccugcccgugagcaugaccaagacgagcgucgacugcaccauguacaucugcggggacuccaccgagugcagcaaccuccugcugcaguacggcuccuucugcacccagcucaaccgcgcgcugacggggaucgccguggagcaggacaagaacacccaggagguguucgcccaggucaagcagaucuacaagacgcccccgaucaaggacuucggcggguucaacuucagccagauccugcccgaccccuccaagcccagcaagcgguccuucaucgaggaccuccuguucaacaaggugacccuggccgacgccggcuucaucaagcaguacggcgacugccucggggacaucgcggcccgcgaccugaucugcgcccagaaguucaacggccugaccgugcucccgccccugcugaccgacgagaugaucgcccaguacaccagcgcccuccuggcggggaccaucacguccggcuggaccuucggggccggcgccgcccugcagauccccuucgcgaugcagauggccuaccgguucaacggcaucggggucacccagaacgugcucuacgagaaccagaagcugaucgccaaccaguucaacagcgccaucggcaagauccaggacucccugagcuccaccgccagcgcgcucgggaagcugcaggacguggucaaccagaacgcccaggcccugaacacgcucgugaagcagcuguccagcaacuucggcgccaucuccagcgugcugaacgacauccucucccgccuggacccgcccgaggccgaggugcagaucgaccggcugaucaccgggcgccuccagagccugcagaccuacgugacccagcagcugauccgggcggccgagauccgcgccagcgccaaccucgccgcgaccaagauguccgagugcguccugggccagagcaagcggguggacuucugcggcaagggguaccaccugauguccuucccccagagcgccccgcacggcguggucuuccuccacgugacguacguccccgcccaggagaagaacuucaccaccgcccccgcgaucugccacgacgggaaggcccacuucccccgcgagggcguguucguguccaacgggacccacugguucgucacgcagcggaacuucuacgagccgcagaucaucaccaccgacaacaccuucgugagcggcaacugcgacguggucaucggcaucgugaacaacacgguguacgacccccugcagcccgagcuggacuccuucaaggaggagcucgacaaguacuucaagaaccacaccagccccgacgucgaccugggggacaucuccggcaucaacgccagcguggugaacauccagaaggagaucgaccgccugaacgaggucgccaagaaccucaacgagucccugaucgaccugcaggagcucgggaaguacgagcaguacaucaaguggccgugguacaucuggcugggcuucaucgccggccugaucgcgaucgugauggugaccaucaugcucugcugcaugaccagcugcugcuccugccugaaggggugcugcagcugcggcuccugcugcaaguucgacgaggacgacagcgagcccguccugaagggggugaagcuccacuacacgugaggacuaguuauaagacugacuagcccgaugggccucccaacgggcccuccuccccuccuugcaccgagauuaauaaaaaaaaaaaaaaaaaaaaaaaaaaaaaaaaaaaaaaaaaaaaaaaaaaaaaaaaaaaaaaaaugcaucccccccccccccccccccccccccccccccaaaggcucuuuucagagccaccagaauu

SEQ ID NO: 22838 - RNA, 4033 nt, Artificial Sequence
  SARS-CoV-2/Wuhan/WIV05/2019__EPI_ISL_402128 spike protein mRNA gc (1-1273)(H69del_V70del_Y453F_D614G_I692V_M1229I) R10346
aggagaaagcuuaccauguucguguuccugguccuccugccccuggugagcucccagugcgugaaccucaccacccgcacgcagcugccgcccgccuacaccaacagcuucacccggggcgucuacuaccccgacaagguguuccgcuccagcgugcugcacuccacccaggaccucuuccugcccuucuucagcaacgucacgugguuccacgccaucuccgggaccaacggcaccaagcgguucgacaacccggugcugcccuucaacgacggggucuacuucgcgagcaccgagaaguccaacaucauccgcggcuggaucuucgggacgacccucgacagcaagacccagucccugcugaucgugaacaacgccaccaacguggucaucaaggugugcgaguuccaguucugcaacgaccccuuccucggcguguacuaccacaagaacaacaagagcuggauggaguccgaguuccgggucuacagcuccgccaacaacugcacguucgaguacgugagccagcccuuccugauggaccuggagggcaagcaggggaacuucaagaaccuccgcgaguucguguucaagaacaucgacggcuacuucaagaucuacuccaagcacaccccgaucaaccugguccgggaccugccccagggguucagcgcccucgagccccugguggaccugcccaucggcaucaacaucacccgcuuccagacccuccuggcccugcaccgguccuaccucacgccgggggacagcagcuccggcuggaccgcgggcgccgccgccuacuacgugggguaccugcagccccgcaccuuccugcucaaguacaacgagaacggcaccaucacggacgcggucgacugcgcccuggacccccugagcgagaccaagugcacccucaaguccuucaccguggagaaggggaucuaccagacgagcaacuuccgggugcagcccaccgaguccaucguccgcuucccgaacaucaccaaccugugccccuucggcgagguguucaacgccacccgguucgccagcgucuacgccuggaaccgcaagcggaucuccaacugcguggcggacuacagcgugcuguacaacuccgccagcuucuccacguucaagugcuacggcgucagccccaccaagcucaacgaccugugcuucaccaacguguacgccgacuccuucgugauccgcggggacgagguccggcagaucgcccccggccagaccgggaagaucgccgacuacaacuacaagcugccggacgacuucacgggcugcgugaucgcguggaacagcaacaaccucgacuccaaggucgggggcaacuacaacuaccuguuccgccuguuccgcaagagcaaccucaagcccuucgagcgggacaucuccaccgagaucuaccaggccggcagcacccccugcaacgggguggagggcuucaacugcuacuucccccugcaguccuacggguuccagccgaccaacggcgugggguaccagcccuaccggguggucgugcugagcuucgagcuccugcacgcccccgccacggugugcggccccaagaaguccaccaaccuggucaagaacaagugcgugaacuucaacuucaacggccucaccgggaccggcgugcugaccgagagcaacaagaaguuccugccguuccagcaguucgggcgcgacaucgccgacacgaccgacgcgguccgcgacccccagacccuggagauccucgacaucacccccugcagcuucggcgggguguccgugaucacgccgggcaccaacaccagcaaccaggucgccgugcuguaccagggcgugaacugcaccgagguccccguggccauccacgccgaccagcugacgcccaccuggcggguguacuccaccggcagcaacgucuuccagacccgcgccgggugccucaucggcgcggagcacgugaacaacuccuacgagugcgacauccccaucggggccggcaucugcgccagcuaccagacgcagaccaacuccccgcggcgcgcccggagcguggcgucccagagcgugaucgccuacaccaugucccugggcgccgagaacagcgucgccuacuccaacaacagcaucgccauccccaccaacuucacgaucuccgugaccaccgagauccugcccgugagcaugaccaagacgagcgucgacugcaccauguacaucugcggggacuccaccgagugcagcaaccuccugcugcaguacggcuccuucugcacccagcucaaccgcgcgcugacggggaucgccguggagcaggacaagaacacccaggagguguucgcccaggucaagcagaucuacaagacgcccccgaucaaggacuucggcggguucaacuucagccagauccugcccgaccccuccaagcccagcaagcgguccuucaucgaggaccuccuguucaacaaggugacccuggccgacgccggcuucaucaagcaguacggcgacugccucggggacaucgcggcccgcgaccugaucugcgcccagaaguucaacggccugaccgugcucccgccccugcugaccgacgagaugaucgcccaguacaccagcgcccuccuggcggggaccaucacguccggcuggaccuucggggccggcgccgcccugcagauccccuucgcgaugcagauggccuaccgguucaacggcaucggggucacccagaacgugcucuacgagaaccagaagcugaucgccaaccaguucaacagcgccaucggcaagauccaggacucccugagcuccaccgccagcgcgcucgggaagcugcaggacguggucaaccagaacgcccaggcccugaacacgcucgugaagcagcuguccagcaacuucggcgccaucuccagcgugcugaacgacauccucucccgccuggacaaggucgaggccgaggugcagaucgaccggcugaucaccgggcgccuccagagccugcagaccuacgugacccagcagcugauccgggcggccgagauccgcgccagcgccaaccucgccgcgaccaagauguccgagugcguccugggccagagcaagcggguggacuucugcggcaagggguaccaccugauguccuucccccagagcgccccgcacggcguggucuuccuccacgugacguacguccccgcccaggagaagaacuucaccaccgcccccgcgaucugccacgacgggaaggcccacuucccccgcgagggcguguucguguccaacgggacccacugguucgucacgcagcggaacuucuacgagccgcagaucaucaccaccgacaacaccuucgugagcggcaacugcgacguggucaucggcaucgugaacaacacgguguacgacccccugcagcccgagcuggacuccuucaaggaggagcucgacaaguacuucaagaaccacaccagccccgacgucgaccugggggacaucuccggcaucaacgccagcguggugaacauccagaaggagaucgaccgccugaacgaggucgccaagaaccucaacgagucccugaucgaccugcaggagcucgggaaguacgagcaguacaucaaguggccgugguacaucuggcugggcuucaucgccggccugaucgcgaucgugaucgugaccaucaugcucugcugcaugaccagcugcugcuccugccugaaggggugcugcagcugcggcuccugcugcaaguucgacgaggacgacagcgagcccguccugaagggggugaagcuccacuacacgugaggacuaguuauaagacugacuagcccgaugggccucccaacgggcccuccuccccuccuugcaccgagauuaauaaaaaaaaaaaaaaaaaaaaaaaaaaaaaaaaaaaaaaaaaaaaaaaaaaaaaaaaaaaaaaaaugcaucccccccccccccccccccccccccccccccaaaggcucuuuucagagccaccagaauu

SEQ ID NO: 22839 - RNA, 4033 nt, Artificial Sequence
  SARS-CoV-2/Wuhan/WIV05/2019__EPI_ISL_402128 spike protein mRNA gc (1-1273)(K986P_V987P_H69del_V70del_Y453F_D614G_I692V_M1229I) R10347
aggagaaagcuuaccauguucguguuccugguccuccugccccuggugagcucccagugcgugaaccucaccacccgcacgcagcugccgcccgccuacaccaacagcuucacccggggcgucuacuaccccgacaagguguuccgcuccagcgugcugcacuccacccaggaccucuuccugcccuucuucagcaacgucacgugguuccacgccaucuccgggaccaacggcaccaagcgguucgacaacccggugcugcccuucaacgacggggucuacuucgcgagcaccgagaaguccaacaucauccgcggcuggaucuucgggacgacccucgacagcaagacccagucccugcugaucgugaacaacgccaccaacguggucaucaaggugugcgaguuccaguucugcaacgaccccuuccucggcguguacuaccacaagaacaacaagagcuggauggaguccgaguuccgggucuacagcuccgccaacaacugcacguucgaguacgugagccagcccuuccugauggaccuggagggcaagcaggggaacuucaagaaccuccgcgaguucguguucaagaacaucgacggcuacuucaagaucuacuccaagcacaccccgaucaaccugguccgggaccugccccagggguucagcgcccucgagccccugguggaccugcccaucggcaucaacaucacccgcuuccagacccuccuggcccugcaccgguccuaccucacgccgggggacagcagcuccggcuggaccgcgggcgccgccgccuacuacgugggguaccugcagccccgcaccuuccugcucaaguacaacgagaacggcaccaucacggacgcggucgacugcgcccuggacccccugagcgagaccaagugcacccucaaguccuucaccguggagaaggggaucuaccagacgagcaacuuccgggugcagcccaccgaguccaucguccgcuucccgaacaucaccaaccugugccccuucggcgagguguucaacgccacccgguucgccagcgucuacgccuggaaccgcaagcggaucuccaacugcguggcggacuacagcgugcuguacaacuccgccagcuucuccacguucaagugcuacggcgucagccccaccaagcucaacgaccugugcuucaccaacguguacgccgacuccuucgugauccgcggggacgagguccggcagaucgcccccggccagaccgggaagaucgccgacuacaacuacaagcugccggacgacuucacgggcugcgugaucgcguggaacagcaacaaccucgacuccaaggucgggggcaacuacaacuaccuguuccgccuguuccgcaagagcaaccucaagcccuucgagcgggacaucuccaccgagaucuaccaggccggcagcacccccugcaacgggguggagggcuucaacugcuacuucccccugcaguccuacggguuccagccgaccaacggcgugggguaccagcccuaccggguggucgugcugagcuucgagcuccugcacgcccccgccacggugugcggccccaagaaguccaccaaccuggucaagaacaagugcgugaacuucaacuucaacggccucaccgggaccggcgugcugaccgagagcaacaagaaguuccugccguuccagcaguucgggcgcgacaucgccgacacgaccgacgcgguccgcgacccccagacccuggagauccucgacaucacccccugcagcuucggcgggguguccgugaucacgccgggcaccaacaccagcaaccaggucgccgugcuguaccagggcgugaacugcaccgagguccccguggccauccacgccgaccagcugacgcccaccuggcggguguacuccaccggcagcaacgucuuccagacccgcgccgggugccucaucggcgcggagcacgugaacaacuccuacgagugcgacauccccaucggggccggcaucugcgccagcuaccagacgcagaccaacuccccgcggcgcgcccggagcguggcgucccagagcgugaucgccuacaccaugucccugggcgccgagaacagcgucgccuacuccaacaacagcaucgccauccccaccaacuucacgaucuccgugaccaccgagauccugcccgugagcaugaccaagacgagcgucgacugcaccauguacaucugcggggacuccaccgagugcagcaaccuccugcugcaguacggcuccuucugcacccagcucaaccgcgcgcugacggggaucgccguggagcaggacaagaacacccaggagguguucgcccaggucaagcagaucuacaagacgcccccgaucaaggacuucggcggguucaacuucagccagauccugcccgaccccuccaagcccagcaagcgguccuucaucgaggaccuccuguucaacaaggugacccuggccgacgccggcuucaucaagcaguacggcgacugccucggggacaucgcggcccgcgaccugaucugcgcccagaaguucaacggccugaccgugcucccgccccugcugaccgacgagaugaucgcccaguacaccagcgcccuccuggcggggaccaucacguccggcuggaccuucggggccggcgccgcccugcagauccccuucgcgaugcagauggccuaccgguucaacggcaucggggucacccagaacgugcucuacgagaaccagaagcugaucgccaaccaguucaacagcgccaucggcaagauccaggacucccugagcuccaccgccagcgcgcucgggaagcugcaggacguggucaaccagaacgcccaggcccugaacacgcucgugaagcagcuguccagcaacuucggcgccaucuccagcgugcugaacgacauccucucccgccuggacccgcccgaggccgaggugcagaucgaccggcugaucaccgggcgccuccagagccugcagaccuacgugacccagcagcugauccgggcggccgagauccgcgccagcgccaaccucgccgcgaccaagauguccgagugcguccugggccagagcaagcggguggacuucugcggcaagggguaccaccugauguccuucccccagagcgccccgcacggcguggucuuccuccacgugacguacguccccgcccaggagaagaacuucaccaccgcccccgcgaucugccacgacgggaaggcccacuucccccgcgagggcguguucguguccaacgggacccacugguucgucacgcagcggaacuucuacgagccgcagaucaucaccaccgacaacaccuucgugagcggcaacugcgacguggucaucggcaucgugaacaacacgguguacgacccccugcagcccgagcuggacuccuucaaggaggagcucgacaaguacuucaagaaccacaccagccccgacgucgaccugggggacaucuccggcaucaacgccagcguggugaacauccagaaggagaucgaccgccugaacgaggucgccaagaaccucaacgagucccugaucgaccugcaggagcucgggaaguacgagcaguacaucaaguggccgugguacaucuggcugggcuucaucgccggccugaucgcgaucgugaucgugaccaucaugcucugcugcaugaccagcugcugcuccugccugaaggggugcugcagcugcggcuccugcugcaaguucgacgaggacgacagcgagcccguccugaagggggugaagcuccacuacacgugaggacuaguuauaagacugacuagcccgaugggccucccaacgggcccuccuccccuccuugcaccgagauuaauaaaaaaaaaaaaaaaaaaaaaaaaaaaaaaaaaaaaaaaaaaaaaaaaaaaaaaaaaaaaaaaaugcaucccccccccccccccccccccccccccccccaaaggcucuuuucagagccaccagaauu

SEQ ID NO: 22840 - RNA, 6 nt, Artificial Sequence
  mRNA 5'-end
gggaaa

SEQ ID NO: 22841 - RNA, 6 nt, Artificial Sequence
  mRNA 5'-end
agaaua

SEQ ID NO: 22842 - RNA, 6 nt, Artificial Sequence
  mRNA 5'-end
agauua

SEQ ID NO: 22843 - RNA, 6 nt, Artificial Sequence
  mRNA 5'-end
gauggg

SEQ ID NO: 22844 - RNA, 5 nt, Artificial Sequence
  mRNA 5'-end
gggcg

SEQ ID NO: 22845 - RNA, 3 nt, Artificial Sequence
  Kozak sequence
acc

SEQ ID NO: 22846 - RNA, 9 nt, Artificial Sequence
  Kozak sequence
gccgccacc

SEQ ID NO: 22847 - RNA, 6 nt, Artificial Sequence
  Kozak sequence
gccacc

SEQ ID NO: 22848 - DNA, 57 bp, Artificial Sequence
  synthetic-v1 5'-UTR
gggaaataagagagaaaagaagagtaagaagaaatataagaccccggcgccgccacc

SEQ ID NO: 22849 - RNA, 57 nt, Artificial Sequence
  synthetic-v1 5'-UTR
gggaaauaagagagaaaagaagaguaagaagaaauauaagaccccggcgccgccacc

SEQ ID NO: 22850 - DNA, 57 bp, Artificial Sequence
  synthetic-v2 5'-UTR
aggagataagagagaaaagaagagtaagaagaaatataagaccccggcgccgccacc

SEQ ID NO: 22851 - RNA, 57 nt, Artificial Sequence
  synthetic-v2 5'-UTR
aggagauaagagagaaaagaagaguaagaagaaauauaagaccccggcgccgccacc

SEQ ID NO: 22852 - DNA, 47 bp, Artificial Sequence
  synthetic-v3 5'-UTR
gggaaataagagagaaaagaagagtaagaagaaatataagagccacc

SEQ ID NO: 22853 - RNA, 47 nt, Artificial Sequence
  synthetic-v3 5'-UTR
gggaaauaagagagaaaagaagaguaagaagaaauauaagagccacc

SEQ ID NO: 22854 - DNA, 47 bp, Artificial Sequence
  synthetic-v4 5'-UTR
aggagataagagagaaaagaagagtaagaagaaatataagagccacc

SEQ ID NO: 22855 - RNA, 47 nt, Artificial Sequence
  synthetic-v4 5'-UTR
aggagauaagagagaaaagaagaguaagaagaaauauaagagccacc

SEQ ID NO: 22856 - DNA, 53 bp, Artificial Sequence
  HBA1-v1 5'-UTR
agaataaactagtattcttctggtccccacagactcagagagaacccgccacc

SEQ ID NO: 22857 - RNA, 53 nt, Artificial Sequence
  HBA1-v1 5'-UTR
agaauaaacuaguauucuucugguccccacagacucagagagaacccgccacc

SEQ ID NO: 22858 - DNA, 56 bp, Artificial Sequence
  HBA1-v2 5'-UTR
aggagaataaactagtattcttctggtccccacagactcagagagaacccgccacc

SEQ ID NO: 22859 - RNA, 56 nt, Artificial Sequence
  HBA1-v2 5'-UTR
aggagaauaaacuaguauucuucugguccccacagacucagagagaacccgccacc

SEQ ID NO: 22860 - DNA, 53 bp, Artificial Sequence
  HBA1-v3 5'-UTR
aggagaaactagtattcttctggtccccacagactcagagagaacccgccacc

SEQ ID NO: 22861 - RNA, 53 nt, Artificial Sequence
  HBA1-v3 5'-UTR
aggagaaacuaguauucuucugguccccacagacucagagagaacccgccacc

SEQ ID NO: 22862 - DNA, 53 bp, Artificial Sequence
  HBA1-v4 5'-UTR
agattaaactagtattcttctggtccccacagactcagagagaacccgccacc

SEQ ID NO: 22863 - RNA, 53 nt, Artificial Sequence
  HBA1-v4 5'-UTR
agauuaaacuaguauucuucugguccccacagacucagagagaacccgccacc

SEQ ID NO: 22864 - DNA, 52 bp, Artificial Sequence
  HBA1-v5 5'-UTR
agacgaactagtattcttctggtccccacagactcagagagaacccgccacc

SEQ ID NO: 22865 - RNA, 52 nt, Artificial Sequence
  HBA1-v5 5'-UTR
agacgaacuaguauucuucugguccccacagacucagagagaacccgccacc

SEQ ID NO: 22866 - DNA, 52 bp, Artificial Sequence
  HBA1-v6 5'-UTR
gggcgaactagtattcttctggtccccacagactcagagagaacccgccacc

SEQ ID NO: 22867 - RNA, 52 nt, Artificial Sequence
  HBA1-v6 5'-UTR
gggcgaacuaguauucuucugguccccacagacucagagagaacccgccacc

SEQ ID NO: 22868 - DNA, 15 bp, Artificial Sequence
  minimal 5'-UTR
aggagaaagcttacc

SEQ ID NO: 22869 - RNA, 15 nt, Artificial Sequence
  minimal 5'-UTR
aggagaaagcuuacc

SEQ ID NO: 22870 - DNA, 77 bp, Artificial Sequence
  HSD17B4-v2 5'-UTR
aggagagtcccgcagtcggcgtccagcggctctgcttgttcgtgtgtgtgtcgttgcaggccttattcaagcttacc

SEQ ID NO: 22871 - RNA, 77 nt, Artificial Sequence
  HSD17B4-v2 5'-UTR
aggagagucccgcagucggcguccagcggcucugcuuguucgugugugugucguugcaggccuuauucaagcuuacc

SEQ ID NO: 22872 - DNA, 99 bp, Artificial Sequence
  Rpl31-v2 5'-UTR
aggagacccgtgacccggaagttgtacggctacgcgactttccctcccacaaaccctcgcgcccttcctttcctacttgggcccggcagaaagcttacc

SEQ ID NO: 22873 - RNA, 99 nt, Artificial Sequence
  Rpl31-v2 5'-UTR
aggagacccgugacccggaaguuguacggcuacgcgacuuucccucccacaaacccucgcgcccuuccuuuccuacuugggcccggcagaaagcuuacc

SEQ ID NO: 22874 - DNA, 174 bp, Artificial Sequence
  Slc7a3-v2 5'-UTR
aggagagggcgcttggcttgcaaggaccctgagctgcggcattgaagcacacccaacccaactcgactgaagtcagcctcactgaaccggatctgagaatcttctctctctgggcttgccagggctctccgaacctagctagcatcctcttcaattccaactagaaagcttacc

SEQ ID NO: 22875 - RNA, 174 nt, Artificial Sequence
  Slc7a3-v2 5'-UTR
aggagagggcgcuuggcuugcaaggacccugagcugcggcauugaagcacacccaacccaacucgacugaagucagccucacugaaccggaucugagaaucuucucucucugggcuugccagggcucuccgaaccuagcuagcauccucuucaauuccaacuagaaagcuuacc

SEQ ID NO: 22876 - DNA, 110 bp, Artificial Sequence
  HBA1-v1 3'-UTR
gctggagcctcggtggccatgcttcttgccccttgggcctccccccagcccctcctccccttcctgcacccgtacccccgtggtctttgaataaagtctgagtgggcggc

SEQ ID NO: 22877 - RNA, 110 nt, Artificial Sequence
  HBA1-v1 3'-UTR
gcuggagccucgguggccaugcuucuugccccuugggccuccccccagccccuccuccccuuccugcacccguacccccguggucuuugaauaaagucugagugggcggc

SEQ ID NO: 22878 - DNA, 108 bp, Artificial Sequence
  HBA2 3'-UTR
gctggagcctcggtagccgttcctcctgcccgctgggcctcccaacgggccctcctcccctccttgcaccggcccttcctggtctttgaataaagtctgagtgggcag

SEQ ID NO: 22879 - RNA, 108 nt, Artificial Sequence
  HBA2 3'-UTR
gcuggagccucgguagccguuccuccugcccgcugggccucccaacgggcccuccuccccuccuugcaccggcccuuccuggucuuugaauaaagucugagugggcag

SEQ ID NO: 22880 - DNA, 132 bp, Artificial Sequence
  HBB-v1 3'-UTR
gctcgctttcttgctgtccaatttctattaaaggttcctttgttccctaagtccaactactaaactgggggatattatgaagggccttgagcatctggattctgcctaataaaaaacatttattttcattgc

SEQ ID NO: 22881 - RNA, 132 nt, Artificial Sequence
  HBB-v1 3'-UTR
gcucgcuuucuugcuguccaauuucuauuaaagguuccuuuguucccuaaguccaacuacuaaacugggggauauuaugaagggccuugagcaucuggauucugccuaauaaaaaacauuuauuuucauugc

SEQ ID NO: 22882 - DNA, 119 bp, Artificial Sequence
  HBA1-v2 3'-UTR
tgataataggctggagcctcggtggcctagcttcttgccccttgggcctccccccagcccctcctccccttcctgcacccgtacccccgtggtctttgaataaagtctgagtgggcggc

SEQ ID NO: 22883 - RNA, 119 nt, Artificial Sequence
  HBA1-v2 3'-UTR
ugauaauaggcuggagccucgguggccuagcuucuugccccuugggccuccccccagccccuccuccccuuccugcacccguacccccguggucuuugaauaaagucugagugggcggc

SEQ ID NO: 22884 - DNA, 119 bp, Artificial Sequence
  HBA1-v3 3'-UTR
tgataataggctggagcctcggtggccatgcttcttgccccttgggcctccccccagcccctcctccccttcctgcacccgtacccccgtggtctttgaataaagtctgagtgggcggc

SEQ ID NO: 22885 - RNA, 119 nt, Artificial Sequence
  HBA1-v33'-UTR
ugauaauaggcuggagccucgguggccaugcuucuugccccuugggccuccccccagccccuccuccccuuccugcacccguacccccguggucuuugaauaaagucugagugggcggc

SEQ ID NO: 22886 - DNA, 295 bp, Artificial Sequence
  AES-12S-v1 3'-UTR
ctcgagctggtactgcatgcacgcaatgctagctgcccctttcccgtcctgggtaccccgagtctcccccgacctcgggtcccaggtatgctcccacctccacctgccccactcaccacctctgctagttccagacacctcccaagcacgcagcaatgcagctcaaaacgcttagcctagccacacccccacgggaaacagcagtgattaacctttagcaataaacgaaagtttaactaagctatactaaccccagggttggtcaatttcgtgccagccacaccctggagctagc

SEQ ID NO: 22887 - RNA, 295 nt, Artificial Sequence
  AES-12S-v1 3'-UTR
cucgagcugguacugcaugcacgcaaugcuagcugccccuuucccguccuggguaccccgagucucccccgaccucgggucccagguaugcucccaccuccaccugccccacucaccaccucugcuaguuccagacaccucccaagcacgcagcaaugcagcucaaaacgcuuagccuagccacacccccacgggaaacagcagugauuaaccuuuagcaauaaacgaaaguuuaacuaagcuauacuaaccccaggguuggucaauuucgugccagccacacccuggagcuagc

SEQ ID NO: 22888 - DNA, 317 bp, Artificial Sequence
  AES-12S-v2 3'-UTR
ctcgagctggtactgcatgcacgcaatgctagctgcccctttcccgtcctgggtaccccgagtctcccccgacctcgggtcccaggtatgctcccacctccacctgccccactcaccacctctgctagttccagacacctcccaagcacgcagcaatgcagctcaaaacgcttagcctagccacacccccacgggaaacagcagtgattaacctttagcaataaacgaaagtttaactaagctatactaaccccagggttggtcaatttcgtgccagccacaccgagacctggtccagagtcgctagccgcgtcgct

SEQ ID NO: 22889 - RNA, 317 nt, Artificial Sequence
  AES-12S-v2 3'-UTR
cucgagcugguacugcaugcacgcaaugcuagcugccccuuucccguccuggguaccccgagucucccccgaccucgggucccagguaugcucccaccuccaccugccccacucaccaccucugcuaguuccagacaccucccaagcacgcagcaaugcagcucaaaacgcuuagccuagccacacccccacgggaaacagcagugauuaaccuuuagcaauaaacgaaaguuuaacuaagcuauacuaaccccaggguuggucaauuucgugccagccacaccgagaccugguccagagucgcuagccgcgucgcu

SEQ ID NO: 22890 - DNA, 311 bp, Artificial Sequence
  HBB-v2 3'-UTR
ctcgagagctcgctttcttgctgtccaatttctattaaaggttcctttgttccctaagtccaactactaaactgggggatattatgaagggccttgagcatctggattctgcctaataaaaaacatttattttcattgctgcgtcgagagctcgctttcttgctgtccaatttctattaaaggttcctttgttccctaagtccaactactaaactgggggatattatgaagggccttgagcatctggattctgcctaataaaaaacatttattttcattgctgcgtcgagacctggtccagagtcgctagc

SEQ ID NO: 22891 - RNA, 311 nt, Artificial Sequence
  HBB-v2 3'-UTR
cucgagagcucgcuuucuugcuguccaauuucuauuaaagguuccuuuguucccuaaguccaacuacuaaacugggggauauuaugaagggccuugagcaucuggauucugccuaauaaaaaacauuuauuuucauugcugcgucgagagcucgcuuucuugcuguccaauuucuauuaaagguuccuuuguucccuaaguccaacuacuaaacugggggauauuaugaagggccuugagcaucuggauucugccuaauaaaaaacauuuauuuucauugcugcgucgagaccugguccagagucgcuagc

SEQ ID NO: 22892 - DNA, 95 bp, Artificial Sequence
  PSMB3-v2 3'-UTR
ggactagtccctgttcccagagcccacttttttttctttttttgaaataaaatagcctgtctttcagatctcaaaggctcttttcagagccacca

SEQ ID NO: 22893 - RNA, 95 nt, Artificial Sequence
  PSMB3-v2 3'-UTR
ggacuagucccuguucccagagcccacuuuuuuuucuuuuuuugaaauaaaauagccugucuuucagaucucaaaggcucuuuucagagccacca

SEQ ID NO: 22894 - DNA, 108 bp, Artificial Sequence
  RPS9-v2 3'-UTR
ggactagtgtccacctgtccctcctgggctgctggattgtctcgttttcctgccaaataaacaggatcagcgctttacagatctcaaaggctcttttcagagccacca

SEQ ID NO: 22895 - RNA, 108 nt, Artificial Sequence
  RPS9-v2 3'-UTR
ggacuaguguccaccugucccuccugggcugcuggauugucucguuuuccugccaaauaaacaggaucagcgcuuuacagaucucaaaggcucuuuucagagccacca

SEQ ID NO: 22896 - DNA, 98 bp, Artificial Sequence
  muag-v2 3'-UTR
ggactagttataagactgactagcccgatgggcctcccaacgggccctcctcccctccttgcaccgagattaatcaaaggctcttttcagagccacca

SEQ ID NO: 22897 - RNA, 98 nt, Artificial Sequence
  muag-v2 3'-UTR
ggacuaguuauaagacugacuagcccgaugggccucccaacgggcccuccuccccuccuugcaccgagauuaaucaaaggcucuuuucagagccacca

SEQ ID NO: 22898 - DNA, 104 bp, Artificial Sequence
  muag-v2 3'-UTR
ggactagttataagactgactagcccgatgggcctcccaacgggccctcctcccctccttgcaccgagattaatagatctcaaaggctcttttcagagccacca

SEQ ID NO: 22899 - RNA, 104 nt, Artificial Sequence
  muag-v2 3'-UTR
ggacuaguuauaagacugacuagcccgaugggccucccaacgggcccuccuccccuccuugcaccgagauuaauagaucucaaaggcucuuuucagagccacca

SEQ ID NO: 22900 - DNA, 98 bp, Artificial Sequence
  muag-v2 3'-UTR
ggactagttataagactgactagcccgatgggcctcccaacgggccctcctcccctccttgcaccgagagatctcaaaggctcttttcagagccacca

SEQ ID NO: 22901 - RNA, 98 nt, Artificial Sequence
  muag-v2 3'-UTR
ggacuaguuauaagacugacuagcccgaugggccucccaacgggcccuccuccccuccuugcaccgagagaucucaaaggcucuuuucagagccacca

SEQ ID NO: 22902 - DNA, 71 bp, Artificial Sequence
  PSMB3-v2 3'-UTR
ggactagtccctgttcccagagcccacttttttttctttttttgaaataaaatagcctgtctttcagatct

SEQ ID NO: 22903 - RNA, 71 nt, Artificial Sequence
  PSMB3-v2 3'-UTR
ggacuagucccuguucccagagcccacuuuuuuuucuuuuuuugaaauaaaauagccugucuuucagaucu

SEQ ID NO: 22904 - DNA, 84 bp, Artificial Sequence
  RPS9-v2 3'-UTR
ggactagtgtccacctgtccctcctgggctgctggattgtctcgttttcctgccaaataaacaggatcagcgctttacagatct

SEQ ID NO: 22905 - RNA, 84 nt, Artificial Sequence
  RPS9-v2 3'-UTR
ggacuaguguccaccugucccuccugggcugcuggauugucucguuuuccugccaaauaaacaggaucagcgcuuuacagaucu

SEQ ID NO: 22906 - DNA, 74 bp, Artificial Sequence
  muag-v2 3'-UTR
ggactagttataagactgactagcccgatgggcctcccaacgggccctcctcccctccttgcaccgagattaat

SEQ ID NO: 22907 - RNA, 74 nt, Artificial Sequence
  muag-v2 3'-UTR
ggacuaguuauaagacugacuagcccgaugggccucccaacgggcccuccuccccuccuugcaccgagauuaau

SEQ ID NO: 22908 - DNA, 80 bp, Artificial Sequence
  muag-v2 3'-UTR
ggactagttataagactgactagcccgatgggcctcccaacgggccctcctcccctccttgcaccgagattaatagatct

SEQ ID NO: 22909 - RNA, 80 nt, Artificial Sequence
  muag-v2 3'-UTR
ggacuaguuauaagacugacuagcccgaugggccucccaacgggcccuccuccccuccuugcaccgagauuaauagaucu

SEQ ID NO: 22910 - DNA, 74 bp, Artificial Sequence
  muag-v2 3'-UTR
ggactagttataagactgactagcccgatgggcctcccaacgggccctcctcccctccttgcaccgagagatct

SEQ ID NO: 22911 - RNA, 74 nt, Artificial Sequence
  muag-v2 3'-UTR
ggacuaguuauaagacugacuagcccgaugggccucccaacgggcccuccuccccuccuugcaccgagagaucu

SEQ ID NO: 22912 - RNA, 105 nt, Artificial Sequence
  mRNA 3'-end A100-N5
aaaaaaaaaaaaaaaaaaaaaaaaaaaaaaaaaaaaaaaaaaaaaaaaaaaaaaaaaaaaaaaaaaaaaaaaaaaaaaaaaaaaaaaaaaaaaaaaaaaaucuag

SEQ ID NO: 22913 - RNA, 110 nt, Artificial Sequence
  mRNA 3'-end A30-N10-A70
aaaaaaaaaaaaaaaaaaaaaaaaaaaaaagcauaugacuaaaaaaaaaaaaaaaaaaaaaaaaaaaaaaaaaaaaaaaaaaaaaaaaaaaaaaaaaaaaaaaaaaaaaa

SEQ ID NO: 22914 - RNA, 669 nt, Artificial Sequence
  SARS-CoV-2/Wuhan/WIV05/2019__EPI_ISL_402128 spike protein CDS gc (319-541)
cgggugcagcccaccgagagcaucgugcgguuccccaacaucaccaaccugugccccuucggcgagguguucaacgccacccgguucgccagcguguacgccuggaaccggaagcggaucagcaacugcguggccgacuacagcgugcuguacaacagcgccagcuucagcaccuucaagugcuacggcgugagccccaccaagcugaacgaccugugcuucaccaacguguacgccgacagcuucgugauccguggcgacgaggugcggcagaucgcacccggccagacaggcaagaucgccgacuacaacuacaagcugcccgacgacuucaccggcugcgugaucgccuggaacagcaacaaccucgacagcaaggugggcggcaacuacaacuaccuguaccggcuguuccggaagagcaaccugaagcccuucgagcgggacaucagcaccgagaucuaccaagccggcuccaccccuugcaacggcguggagggcuucaacugcuacuucccucugcagagcuacggcuuccagcccaccaacggcgugggcuaccagcccuaccgggugguggugcugagcuucgagcugcugcacgccccagccaccguguguggccccaagaagagcaccaaccuggugaagaacaagugcgugaacuuc

SEQ ID NO: 22915 - RNA, 669 nt, Artificial Sequence
  SARS-CoV-2/Wuhan/WIV05/2019__EPI_ISL_402128 spike protein CDS gc mod (334-528)
cgggugcagcccaccgaauccaucgugcgguuccccaauaucaccaaucugugccccuucggcgagguguucaaugccaccagauucgccucuguguacgccuggaaccggaagcggaucagcaauugcguggccgacuacuccgugcuguacaacuccgccagcuucagcaccuucaagugcuacggcguguccccuaccaagcugaacgaccugugcuucacaaacguguacgccgacagcuucgugauccggggagaugaagugcggcagauugccccuggacagacaggcaagaucgccgacuacaacuacaagcugcccgacgacuucaccggcugugugauugccuggaacagcaacaaccuggacuccaaagucggcggcaacuacaauuaccuguaccggcuguuccggaaguccaaucugaagcccuucgagcgggacaucuccaccgagaucuaucaggccggcagcaccccuuguaacggcguggaaggcuucaacugcuacuucccacugcaguccuacggcuuucagcccacaaauggcgugggcuaucagcccuacagagugguggugcugagcuucgaacugcugcaugccccugccacagugugcggcccuaagaaaagcaccaaucucgugaagaacaaaugcgugaacuuc

SEQ ID NO: 22916 - RNA, 669 nt, Artificial Sequence
  SARS-CoV-2/Wuhan/WIV05/2019__EPI_ISL_402128 spike protein CDS gc mod (319-541)
agagugcagccaacagaaucuauugugagauuuccaaauauuacaaaucuguguccauuuggagaaguguuuaaugcaacaagauuugcaucuguguaugcauggaauagaaaaagaauuucuaauuguguggcugauuauucugugcuguauaauagugcuucuuuuuccacauuuaaauguuauggagugucuccaacaaaauuaaaugauuuauguuuuacaaauguguaugcugauucuuuugugaucagaggugaugaagugagacagauugcccccggacagacaggaaaaauugcugauuacaauuacaaacugccugaugauuuuacaggaugugugauugcuuggaauucuaauaauuuagauucuaaagugggaggaaauuacaauuaucuguacagacuguuuagaaaaucaaaucugaaaccuuuugaaagagauauuucaacagaaauuuaucaggcuggaucaacaccuuguaauggaguggaaggauuuaauuguuauuuuccauuacagagcuauggauuucagccaaccaauggugugggauaucagccauauagagugguggugcugucuuuugaacugcugcaugcaccugcaacaguguguggaccuaaaaaaucaacaaaucuggugaaaaauaaaugugugaauuuu

SEQ ID NO: 22917 - protein, 195 aa, Artificial Sequence
  SARS-CoV-2/Wuhan/WIV05/2019__EPI_ISL_402128 spike protein (334-528)
NLCPFGEVFNATRFASVYAWNRKRISNCVADYSVLYNSASFSTFKCYGVSPTKLNDLCFTNVYADSFVIRGDEVRQIAPGQTGKIADYNYKLPDDFTGCVIAWNSNNLDSKVGGNYNYLYRLFRKSNLKPFERDISTEIYQAGSTPCNGVEGFNCYFPLQSYGFQPTNGVGYQPYRVVVLSFELLHAPATVCGPK

SEQ ID NO: 22918 - RNA, 585 nt, Artificial Sequence
  SARS-CoV-2/Wuhan/WIV05/2019__EPI_ISL_402128 spike protein CDS gc (334-528)
aaccugugccccuucggcgagguguucaacgccacccgguucgccagcgucuacgccuggaaccgcaagcggaucuccaacugcguggcggacuacagcgugcuguacaacuccgccagcuucuccacguucaagugcuacggcgucagccccaccaagcucaacgaccugugcuucaccaacguguacgccgacuccuucgugauccgcggggacgagguccggcagaucgcccccggccagaccgggaagaucgccgacuacaacuacaagcugccggacgacuucacgggcugcgugaucgcguggaacagcaacaaccucgacuccaaggucgggggcaacuacaacuaccuguaccgccuguuccgcaagagcaaccucaagcccuucgagcgggacaucuccaccgagaucuaccaggccggcagcacccccugcaacgggguggagggcuucaacugcuacuucccccugcaguccuacggguuccagccgaccaacggcgugggguaccagcccuaccggguggucgugcugagcuucgagcuccugcacgcccccgccacggugugcggccccaag

SEQ ID NO: 22919 - RNA, 585 nt, Artificial Sequence
  SARS-CoV-2/Wuhan/WIV05/2019__EPI_ISL_402128 spike protein CDS gc (334-528)
aaccugugccccuucggcgagguguucaacgccacccgguucgccagcguguacgccuggaaccggaagcggaucagcaacugcguggccgacuacagcgugcuguacaacagcgccagcuucagcaccuucaagugcuacggcgugagccccaccaagcugaacgaccugugcuucaccaacguguacgccgacagcuucgugauccguggcgacgaggugcggcagaucgcacccggccagacaggcaagaucgccgacuacaacuacaagcugcccgacgacuucaccggcugcgugaucgccuggaacagcaacaaccucgacagcaaggugggcggcaacuacaacuaccuguaccggcuguuccggaagagcaaccugaagcccuucgagcgggacaucagcaccgagaucuaccaagccggcuccaccccuugcaacggcguggagggcuucaacugcuacuucccucugcagagcuacggcuuccagcccaccaacggcgugggcuaccagcccuaccgggugguggugcugagcuucgagcugcugcacgccccagccaccguguguggccccaag

SEQ ID NO: 22920 - RNA, 606 nt, Artificial Sequence
  SARS-CoV-2/Wuhan/WIV05/2019__EPI_ISL_402128 spike protein CDS gc mod (334-528)
gugcgguuccccaauaucaccaaucugugccccuucggcgagguguucaaugccaccagauucgccucuguguacgccuggaaccggaagcggaucagcaauugcguggccgacuacuccgugcuguacaacuccgccagcuucagcaccuucaagugcuacggcguguccccuaccaagcugaacgaccugugcuucacaaacguguacgccgacagcuucgugauccggggagaugaagugcggcagauugccccuggacagacaggcaagaucgccgacuacaacuacaagcugcccgacgacuucaccggcugugugauugccuggaacagcaacaaccuggacuccaaagucggcggcaacuacaauuaccuguaccggcuguuccggaaguccaaucugaagcccuucgagcgggacaucuccaccgagaucuaucaggccggcagcaccccuuguaacggcguggaaggcuucaacugcuacuucccacugcaguccuacggcuuucagcccacaaauggcgugggcuaucagcccuacagagugguggugcugagcuucgaacugcugcaugccccugccacagugugcggcccuaag

SEQ ID NO: 22921 - RNA, 585 nt, Artificial Sequence
  SARS-CoV-2/Wuhan/WIV05/2019__EPI_ISL_402128 spike protein CDS gc mod (334-528)
aaucugugccccuucggcgagguguucaaugccaccagauucgccucuguguacgccuggaaccggaagcggaucagcaauugcguggccgacuacuccgugcuguacaacuccgccagcuucagcaccuucaagugcuacggcguguccccuaccaagcugaacgaccugugcuucacaaacguguacgccgacagcuucgugauccggggagaugaagugcggcagauugccccuggacagacaggcaagaucgccgacuacaacuacaagcugcccgacgacuucaccggcugugugauugccuggaacagcaacaaccuggacuccaaagucggcggcaacuacaauuaccuguaccggcuguuccggaaguccaaucugaagcccuucgagcgggacaucagcaccgaaaucuaucaggccggcagcaccccuugcaacggcguggaaggcuucaacugcuacuucccacugcaguccuacggcuuucagcccacaaauggcgugggcuaucagcccuacagagugguggugcugagcuucgaacugcugcaugcuccugccacagugugcggcccuaag

SEQ ID NO: 22922 - RNA, 585 nt, Artificial Sequence
  SARS-CoV-2/Wuhan/WIV05/2019__EPI_ISL_402128 spike protein CDS gc mod (334-528)
aaucuguguccauuuggagaaguguuuaaugcaacaagauuugcaucuguguaugcauggaauagaaaaagaauuucuaauuguguggcugauuauucugugcuguauaauagugcuucuuuuuccacauuuaaauguuauggagugucuccaacaaaauuaaaugauuuauguuuuacaaauguguaugcugauucuuuugugaucagaggugaugaagugagacagauugcccccggacagacaggaaaaauugcugauuacaauuacaaacugccugaugauuuuacaggaugugugauugcuuggaauucuaauaauuuagauucuaaagugggaggaaauuacaauuaucuguacagacuguuuagaaaaucaaaucugaaaccuuuugaaagagauauuucaacagaaauuuaucaggcuggaucaacaccuuguaauggaguggaaggauuuaauuguuauuuuccauuacagagcuauggauuucagccaaccaauggugugggauaucagccauauagagugguggugcugucuuuugaacugcugcaugcaccugcaacaguguguggaccuaaa

SEQ ID NO: 22923 - protein, 202 aa, Artificial Sequence
  SARS-CoV-2/Wuhan/WIV05/2019__EPI_ISL_402128 spike protein (327-528)
VRFPNITNLCPFGEVFNATRFASVYAWNRKRISNCVADYSVLYNSASFSTFKCYGVSPTKLNDLCFTNVYADSFVIRGDEVRQIAPGQTGKIADYNYKLPDDFTGCVIAWNSNNLDSKVGGNYNYLYRLFRKSNLKPFERDISTEIYQAGSTPCNGVEGFNCYFPLQSYGFQPTNGVGYQPYRVVVLSFELLHAPATVCGPK

SEQ ID NO: 22924 - RNA, 606 nt, Artificial Sequence
  SARS-CoV-2/Wuhan/WIV05/2019__EPI_ISL_402128 spike protein CDS gc (327-528)
guccgcuucccgaacaucaccaaccugugccccuucggcgagguguucaacgccacccgguucgccagcgucuacgccuggaaccgcaagcggaucuccaacugcguggcggacuacagcgugcuguacaacuccgccagcuucuccacguucaagugcuacggcgucagccccaccaagcucaacgaccugugcuucaccaacguguacgccgacuccuucgugauccgcggggacgagguccggcagaucgcccccggccagaccgggaagaucgccgacuacaacuacaagcugccggacgacuucacgggcugcgugaucgcguggaacagcaacaaccucgacuccaaggucgggggcaacuacaacuaccuguaccgccuguuccgcaagagcaaccucaagcccuucgagcgggacaucuccaccgagaucuaccaggccggcagcacccccugcaacgggguggagggcuucaacugcuacuucccccugcaguccuacggguuccagccgaccaacggcgugggguaccagcccuaccggguggucgugcugagcuucgagcuccugcacgcccccgccacggugugcggccccaag

SEQ ID NO: 22925 - RNA, 606 nt, Artificial Sequence
  SARS-CoV-2/Wuhan/WIV05/2019__EPI_ISL_402128 spike protein CDS gc (327-528)
gugcgguuccccaacaucaccaaccugugccccuucggcgagguguucaacgccacccgguucgccagcguguacgccuggaaccggaagcggaucagcaacugcguggccgacuacagcgugcuguacaacagcgccagcuucagcaccuucaagugcuacggcgugagccccaccaagcugaacgaccugugcuucaccaacguguacgccgacagcuucgugauccguggcgacgaggugcggcagaucgcacccggccagacaggcaagaucgccgacuacaacuacaagcugcccgacgacuucaccggcugcgugaucgccuggaacagcaacaaccucgacagcaaggugggcggcaacuacaacuaccuguaccggcuguuccggaagagcaaccugaagcccuucgagcgggacaucagcaccgagaucuaccaagccggcuccaccccuugcaacggcguggagggcuucaacugcuacuucccucugcagagcuacggcuuccagcccaccaacggcgugggcuaccagcccuaccgggugguggugcugagcuucgagcugcugcacgccccagccaccguguguggccccaag

SEQ ID NO: 22926 - RNA, 606 nt, Artificial Sequence; identical to SEQ ID NO: 22920
  SARS-CoV-2/Wuhan/WIV05/2019__EPI_ISL_402128 spike protein CDS gc mod (327-528)

SEQ ID NO: 22927 - RNA, 606 nt, Artificial Sequence
  SARS-CoV-2/Wuhan/WIV05/2019__EPI_ISL_402128 spike protein CDS gc mod (327-528)
gugcgguuccccaauaucaccaaucugugccccuucggcgagguguucaaugccaccagauucgccucuguguacgccuggaaccggaagcggaucagcaauugcguggccgacuacuccgugcuguacaacuccgccagcuucagcaccuucaagugcuacggcguguccccuaccaagcugaacgaccugugcuucacaaacguguacgccgacagcuucgugauccggggagaugaagugcggcagauugccccuggacagacaggcaagaucgccgacuacaacuacaagcugcccgacgacuucaccggcugugugauugccuggaacagcaacaaccuggacuccaaagucggcggcaacuacaauuaccuguaccggcuguuccggaaguccaaucugaagcccuucgagcgggacaucagcaccgaaaucuaucaggccggcagcaccccuugcaacggcguggaaggcuucaacugcuacuucccacugcaguccuacggcuuucagcccacaaauggcgugggcuaucagcccuacagagugguggugcugagcuucgaacugcugcaugcuccugccacagugugcggcccuaag

SEQ ID NO: 22928 - RNA, 606 nt, Artificial Sequence
  SARS-CoV-2/Wuhan/WIV05/2019__EPI_ISL_402128 spike protein CDS gc mod (327-528)
gugagauuuccaaauauuacaaaucuguguccauuuggagaaguguuuaaugcaacaagauuugcaucuguguaugcauggaauagaaaaagaauuucuaauuguguggcugauuauucugugcuguauaauagugcuucuuuuuccacauuuaaauguuauggagugucuccaacaaaauuaaaugauuuauguuuuacaaauguguaugcugauucuuuugugaucagaggugaugaagugagacagauugcccccggacagacaggaaaaauugcugauuacaauuacaaacugccugaugauuuuacaggaugugugauugcuuggaauucuaauaauuuagauucuaaagugggaggaaauuacaauuaucuguacagacuguuuagaaaaucaaaucugaaaccuuuugaaagagauauuucaacagaaauuuaucaggcuggaucaacaccuuguaauggaguggaaggauuuaauuguuauuuuccauuacagagcuauggauuucagccaaccaauggugugggauaucagccauauagagugguggugcugucuuuugaacugcugcaugcaccugcaacaguguguggaccuaaa

SEQ ID NO: 22929 - protein, 1273 aa, Artificial Sequence; identical to SEQ ID NO: 1
  SARS-CoV-2/Wuhan/WIV05/2019__EPI_ISL_402128 spike protein (1-1273)

SEQ ID NO: 22930 - protein, 1273 aa, Artificial Sequence; identical to SEQ ID NO: 9
  SARS-CoV-2/Wuhan/WIV05/2019__EPI_ISL_402128 spike protein (1-1273)(D614G)

SEQ ID NO: 22931 - protein, 1273 aa, Artificial Sequence; identical to SEQ ID NO: 22739
  SARS-CoV-2/Wuhan/WIV05/2019__EPI_ISL_402128 spike protein (1-1273)(A222V_D614G)

SEQ ID NO: 22932 - protein, 1273 aa, Artificial Sequence; identical to SEQ ID NO: 22741
  SARS-CoV-2/Wuhan/WIV05/2019__EPI_ISL_402128 spike protein (1-1273)(N439K_D614G)

SEQ ID NO: 22933 - protein, 1273 aa, Artificial Sequence; identical to SEQ ID NO: 22743
  SARS-CoV-2/Wuhan/WIV05/2019__EPI_ISL_402128 spike protein (1-1273)(S477N_D614G)

SEQ ID NO: 22934 - protein, 1273 aa, Artificial Sequence; identical to SEQ ID NO: 22745
  SARS-CoV-2/Wuhan/WIV05/2019__EPI_ISL_402128 spike protein (1-1273)(N501Y_D614G)

SEQ ID NO: 22935 - protein, 1271 aa, Artificial Sequence; identical to SEQ ID NO: 22747
  SARS-CoV-2/Wuhan/WIV05/2019__EPI_ISL_402128 spike protein (1-1273)(H69del_V70del_D614G)

SEQ ID NO: 22936 - protein, 1273 aa, Artificial Sequence; identical to SEQ ID NO: 22749
  SARS-CoV-2/Wuhan/WIV05/2019__EPI_ISL_402128 spike protein (1-1273)(Y453F_D614G)

SEQ ID NO: 22937 - protein, 1273 aa, Artificial Sequence; identical to SEQ ID NO: 22751
  SARS-CoV-2/Wuhan/WIV05/2019__EPI_ISL_402128 spike protein (1-1273)(D614G_I692V)

SEQ ID NO: 22938 - protein, 1273 aa, Artificial Sequence; identical to SEQ ID NO: 327
  SARS-CoV-2/Wuhan/WIV05/2019__EPI_ISL_402128 spike protein (1-1273)(D614G_M1229I)

SEQ ID NO: 22939 - protein, 1271 aa, Artificial Sequence; identical to SEQ ID NO: 22755
  SARS-CoV-2/Wuhan/WIV05/2019__EPI_ISL_402128 spike protein (1-1273)(H69del_V70del_A222V_Y453F_S477N_D614G_I692V)

SEQ ID NO: 22940 - protein, 1271 aa, Artificial Sequence; identical to SEQ ID NO: 22757
  SARS-CoV-2/Wuhan/WIV05/2019__EPI_ISL_402128 spike protein (1-1273)(H69del_V70del_Y453F_D614G_I692V_M1229I)

SEQ ID NO: 22941 - protein, 1270 aa, Artificial Sequence
  SARS-CoV-2/Wuhan/WIV05/2019__EPI_ISL_402128 spike protein (1-1273)(H69del_V70del_Y144del_N501Y_A570D_D614G_P681H_T716I_S982 A_D1118H)
MFVFLVLLPLVSSQCVNLTTRTQLPPAYTNSFTRGVYYPDKVFRSSVLHSTQDLFLPFFSNVTWFHAISGTNGTKRFDNPVLPFNDGVYFASTEKSNIIRGWIFGTTLDSKTQSLLIVNNATNVVIKVCEFQFCNDPFLGVYHKNNKSWMESEFRVYSSANNCTFEYVSQPFLMDLEGKQGNFKNLREFVFKNIDGYFKIYSKHTPINLVRDLPQGFSALEPLVDLPIGINITRFQTLLALHRSYLTPGDSSSGWTAGAAAYYVGYLQPRTFLLKYNENGTITDAVDCALDPLSETKCTLKSFTVEKGIYQTSNFRVQPTESIVRFPNITNLCPFGEVFNATRFASVYAWNRKRISNCVADYSVLYNSASFSTFKCYGVSPTKLNDLCFTNVYADSFVIRGDEVRQIAPGQTGKIADYNYKLPDDFTGCVIAWNSNNLDSKVGGNYNYLYRLFRKSNLKPFERDISTEIYQAGSTPCNGVEGFNCYFPLQSYGFQPTYGVGYQPYRVVVLSFELLHAPATVCGPKKSTNLVKNKCVNFNFNGLTGTGVLTESNKKFLPFQQFGRDIDDTTDAVRDPQTLEILDITPCSFGGVSVITPGTNTSNQVAVLYQGVNCTEVPVAIHADQLTPTWRVYSTGSNVFQTRAGCLIGAEHVNNSYECDIPIGAGICASYQTQTNSHRRARSVASQSIIAYTMSLGAENSVAYSNNSIAIPINFTISVTTEILPVSMTKTSVDCTMYICGDSTECSNLLLQYGSFCTQLNRALTGIAVEQDKNTQEVFAQVKQIYKTPPIKDFGGFNFSQILPDPSKPSKRSFIEDLLFNKVTLADAGFIKQYGDCLGDIAARDLICAQKFNGLTVLPPLLTDEMIAQYTSALLAGTITSGWTFGAGAALQIPFAMQMAYRFNGIGVTQNVLYENQKLIANQFNSAIGKIQDSLSSTASALGKLQDVVNQNAQALNTLVKQLSSNFGAISSVLNDILARLDKVEAEVQIDRLITGRLQSLQTYVTQQLIRAAEIRASANLAATKMSECVLGQSKRVDFCGKGYHLMSFPQSAPHGVVFLHVTYVPAQEKNFTTAPAICHDGKAHFPREGVFVSNGTHWFVTQRNFYEPQIITTHNTFVSGNCDVVIGIVNNTVYDPLQPELDSFKEELDKYFKNHTSPDVDLGDISGINASVVNIQKEIDRLNEVAKNLNESLIDLQELGKYEQYIKWPWYIWLGFIAGLIAIVMVTIMLCCMTSCCSCLKGCCSCGSCCKFDEDDSEPVLKGVKLHYT

SEQ ID NO: 22942 - protein, 1273 aa, Artificial Sequence
  SARS-CoV-2/Wuhan/WIV05/2019__EPI_ISL_402128 spike protein (1-1273)(K417N_E484K_N501Y_D614G)
MFVFLVLLPLVSSQCVNLTTRTQLPPAYTNSFTRGVYYPDKVFRSSVLHSTQDLFLPFFSNVTWFHAIHVSGTNGTKRFDNPVLPFNDGVYFASTEKSNIIRGWIFGTTLDSKTQSLLIVNNATNVVIKVCEFQFCNDPFLGVYYHKNNKSWMESEFRVYSSANNCTFEYVSQPFLMDLEGKQGNFKNLREFVFKNIDGYFKIYSKHTPINLVRDLPQGFSALEPLVDLPIGINITRFQTLLALHRSYLTPGDSSSGWTAGAAAYYVGYLQPRTFLLKYNENGTITDAVDCALDPLSETKCTLKSFTVEKGIYQTSNFRVQPTESIVRFPNITNLCPFGEVFNATRFASVYAWNRKRISNCVADYSVLYNSASFSTFKCYGVSPTKLNDLCFTNVYADSFVIRGDEVRQIAPGQTGNIADYNYKLPDDFTGCVIAWNSNNLDSKVGGNYNYLYRLFRKSNLKPFERDISTEIYQAGSTPCNGVKGFNCYFPLQSYGFQPTYGVGYQPYRVVVLSFELLHAPATVCGPKKSTNLVKNKCVNFNFNGLTGTGVLTESNKKFLPFQQFGRDIADTTDAVRDPQTLEILDITPCSFGGVSVITPGTNTSNQVAVLYQGVNCTEVPVAIHADQLTPTWRVYSTGSNVFQTRAGCLIGAEHVNNSYECDIPIGAGICASYQTQTNSPRRARSVASQSIIAYTMSLGAENSVAYSNNSIAIPTNFTISVTTEILPVSMTKTSVDCTMYICGDSTECSNLLLQYGSFCTQLNRALTGIAVEQDKNTQEVFAQVKQIYKTPPIKDFGGFNFSQILPDPSKPSKRSFIEDLLFNKVTLADAGFIKQYGDCLGDIAARDLICAQKFNGLTVLPPLLTDEMIAQYTSALLAGTITSGWTFGAGAALQIPFAMQMAYRFNGIGVTQNVLYENQKLIANQFNSAIGKIQDSLSSTASALGKLQDVVNQNAQALNTLVKQLSSNFGAISSVLNDILSRLDKVEAEVQIDRLITGRLQSLQTYVTQQLIRAAEIRASANLAATKMSECVLGQSKRVDFCGKGYHLMSFPQSAPHGVVFLHVTYVPAQEKNFTTAPAICHDGKAHFPREGVFVSNGTHWFVTQRNFYEPQIITTDNTFVSGNCDVVIGIVNNTVYDPLQPELDSFKEELDKYFKNHTSPDVDLGDISGINASVVNIQKEIDRLNEVAKNLNESLIDLQELGKYEQYIKWPWYIWLGFIAGLIAIVMVTIMLCCMTSCCSCLKGCCSCGSCCKFDEDDSEPVLKGVKLHYT

SEQ ID NO: 22943 - protein, 1270 aa, Artificial Sequence
  SARS-CoV-2/Wuhan/WIV05/2019__EPI_ISL_402128 spike protein (1-1273)(L18F_D80A_D215G_L242del_A243del_L244del_R246I_K417N_E484 K_N501Y_D614G_A701V)
MFVFLVLLPLVSSQCVNFTTRTQLPPAYTNSFTRGVYYPDKVFRSSVLHSTQDLFLPFFSNVTWFHAIHVSGTNGTKRFANPVLPFNDGVYFASTEKSNIIRGWIFGTTLDSKTQSLLIVNNATNVVIKVCEFQFCNDPFLGVYYHKNNKSWMESEFRVYSSANNCTFEYVSQPFLMDLEGKQGNFKNLREFVFKNIDGYFKIYSKHTPINLVRGLPQGFSALEPLVDLPIGINITRFQTLHISYLTPGDSSSGWTAGAAAYYVGYLQPRTFLLKYNENGTITDAVDCALDPLSETKCTLKSFTVEKGIYQTSNFRVQPTESIVRFPNITNLCPFGEVFNATRFASVYAWNRKRISNCVADYSVLYNSASFSTFKCYGVSPTKLNDLCFTNVYADSFVIRGDEVRQIAPGQTGNIADYNYKLPDDFTGCVIAWNSNNLDSKVGGNYNYLYRLFRKSNLKPFERDISTEIYQAGSTPCNGVKGFNCYFPLQSYGFQPTYGVGYQPYRVVVLSFELLHAPATVCGPKKSTNLVKNKCVNFNFNGLTGTGVLTESNKKFLPFQQFGRDIADTTDAVRDPQTLEILDITPCSFGGVSVITPGTNTSNQVAVLYQGVNCTEVPVAIHADQLTPTWRVYSTGSNVFQTRAGCLIGAEHVNNSYECDIPIGAGICASYQTQTNSPRRARSVASQSIIAYTMSLGVENSVAYSNNSIAIPTNFTISVTTEILPVSMTKTSVDCTMYICGDSTECSNLLLQYGSFCTQLNRALTGIAVEQDKNTQEVFAQVKQIYKTPPIKDFGGFNFSQILPDPSKPSKRSFIEDLLFNKVTLADAGFIKQYGDCLGDIAARDLICAQKFNGLTVLPPLLTDEMIAQYTSALLAGTITSGWTFGAGAALQIPFAMQMAYRFNGIGVTQNVLYENQKLIANQFNSAIGKIQDSLSSTASALGKLQDVVNQNAQALNTLVKQLSSNFGAISSVLNDILSRLDKVEAEVQIDRLITGRLQSLQTYVTQQLIRAAEIRASANLAATKMSECVLGQSKRVDFCGKGYHLMSFPQSAPHGVVFLHVTYVPAQEKNFTTAPAICHDGKAHFPREGVFVSNGTHWFVTQRNFYEPQIITTDNTFVSGNCDVVIGIVNNTVYDPLQPELDSFKEELDKYFKNHTSPDVDLGDISGINASVVNIQKEIDRLNEVAKNLNESLIDLQELGKYEQYIKWPWYIWLGFIAGLIAIVMVTIMLCCMTSCCSCLKGCCSCGSCCKFDEDDSEPVLKGVKLHYT

SEQ ID NO: 22944 - protein, 1273 aa, Artificial Sequence
  SARS-CoV-2/Wuhan/WIV05/2019__EPI_ISL_402128 spike protein (1-1273)(E484K_D614G)
MFVFLVLLPLVSSQCVNLTTRTQLPPAYTNSFTRGVYYPDKVFRSSVLHSTQDLFLPFFSNVTWFHAIHVSGTNGTKRFDNPVLPFNDGVYFASTEKSNIIRGWIFGTTLDSKTQSLLIVNNATNVVIKVCEFQFCNDPFLGVYYHKNNKSWMESEFRVYSSANNCTFEYVSQPFLMDLEGKQGNFKNLREFVFKNIDGYFKIYSKHTPINLVRDLPQGFSALEPLVDLPIGINITRFQTLLALHRSYLTPGDSSSGWTAGAAAYYVGYLQPRTFLLKYNENGTITDAVDCALDPLSETKCTLKSFTVEKGIYQTSNFRVQPTESIVRFPNITNLCPFGEVFNATRFASVYAWNRKRISNCVADYSVLYNSASFSTFKCYGVSPTKLNDLCFTNVYADSFVIRGDEVRQIAPGQTGKIADYNYKLPDDFTGCVIAWNSNNLDSKVGGNYNYLYRLFRKSNLKPFERDISTEIYQAGSTPCNGVKGFNCYFPLQSYGFQPTNGVGYQPYRVVVLSFELLHAPATVCGPKKSTNLVKNKCVNFNFNGLTGTGVLTESNKKFLPFQQFGRDIADTTDAVRDPQTLEILDITPCSFGGVSVITPGTNTSNQVAVLYQGVNCTEVPVAIHADQLTPTWRVYSTGSNVFQTRAGCLIGAEHVNNSYECDIPIGAGICASYQTQTNSPRRARSVASQSIIAYTMSLGAENSVAYSNNSIAIPTNFTISVTTEILPVSMTKTSVDCTMYICGDSTECSNLLLQYGSFCTQLNRALTGIAVEQDKNTQEVFAQVKQIYKTPPIKDFGGFNFSQILPDPSKPSKRSFIEDLLFNKVTLADAGFIKQYGDCLGDIAARDLICAQKFNGLTVLPPLLTDEMIAQYTSALLAGTITSGWTFGAGAALQIPFAMQMAYRFNGIGVTQNVLYENQKLIANQFNSAIGKIQDSLSSTASALGKLQDVVNQNAQALNTLVKQLSSNFGAISSVLNDILSRLDKVEAEVQIDRLITGRLQSLQTYVTQQLIRAAEIRASANLAATKMSECVLGQSKRVDFCGKGYHLMSFPQSAPHGVVFLHVTYVPAQEKNFTTAPAICHDGKAHFPREGVFVSNGTHWFVTQRNFYEPQIITTDNTFVSGNCDVVIGIVNNTVYDPLQPELDSFKEELDKYFKNHTSPDVDLGDISGINASVVNIQKEIDRLNEVAKNLNESLIDLQELGKYEQYIKWPWYIWLGFIAGLIAIVMVTIMLCCMTSCCSCLKGCCSCGSCCKFDEDDSEPVLKGVKLHYT

SEQ ID NO: 22945 - protein, 1273 aa, Artificial Sequence
  SARS-CoV-2/Wuhan/WIV05/2019__EPI_ISL_402128 spike protein (1-1273)(L18F_T20N_P26S_D138Y_R190S_K417T_E484K_N501Y_D614G_H655Y _T1027I)
MFVFLVLLPLVSSQCVNFTNRTQLPSAYTNSFTRGVYYPDKVFRSSVLHSTQDLFLPFFSNVTWFHAIHVSGTNGTKRFDNPVLPFNDGVYFASTEKSNIIRGWIFGTTLDSKTQSLLIVNNATNVVIKVCEFQFCNYPFLGVYYHKNNKSWMESEFRVYSSANNCTFEYVSQPFLMDLEGKQGNFKNLSEFVFKNIDGYFKIYSKHTPINLVRDLPQGFSALEPLVDLPIGINITRFQTLLALHRSYLTPGDSSSGWTAGAAAYYVGYLQPRTFLLKYNENGTITDAVDCALDPLSETKCTLKSFTVEKGIYQTSNFRVQPTESIVRFPNITNLCPFGEVFNATRFASVYAWNRKRISNCVADYSVLYNSASFSTFKCYGVSPTKLNDLCFTNVYADSFVIRGDEVRQIAPGQTGTIADYNYKLPDDFTGCVIAWNSNNLDSKVGGNYNYLYRLFRKSNLKPFERDISTEIYQAGSTPCNGVKGFNCYFPLQSYGFQPTYGVGYQPYRVVVLSFELLHAPATVCGPKKSTNLVKNKCVNFNFNGLTGTGVLTESNKKFLPFQQFGRDIADTTDAVRDPQTLEILDITPCSFGGVSVITPGTNTSNQVAVLYQGVNCTEVPVAIHADQLTPTWRVYSTGSNVFQTRAGCLIGAEYVNNSYECDIPIGAGICASYQTQTNSPRRARSVASQSIIAYTMSLGAENSVAYSNNSIAIPTNFTISVTTEILPVSMTKTSVDCTMYICGDSTECSNLLLQYGSFCTQLNRALTGIAVEQDKNTQEVFAQVKQIYKTPPIKDFGGFNFSQILPDPSKPSKRSFIEDLLFNKVTLADAGFIKQYGDCLGDIAARDLICAQKFNGLTVLPPLLTDEMIAQYTSALLAGTITSGWTFGAGAALQIPFAMQMAYRFNGIGVTQNVLYENQKLIANQFNSAIGKIQDSLSSTASALGKLQDVVNQNAQALNTLVKQLSSNFGAISSVLNDILSRLDKVEAEVQIDRLITGRLQSLQTYVTQQLIRAAEIRASANLAAIKMSECVLGQSKRVDFCGKGYHLMSFPQSAPHGVVFLHVTYVPAQEKNFTTAPAICHDGKAHFPREGVFVSNGTHWFVTQRNFYEPQIITTDNTFVSGNCDVVIGIVNNTVYDPLQPELDSFKEELDKYFKNHTSPDVDLGDISGINASVVNIQKEIDRLNEVAKNLNESLIDLQELGKYEQYIKWPWYIWLGFIAGLIAIVMVTIMLCCMTSCCSCLKGCCSCGSCCKFDEDDSEPVLKGVKLHYT

SEQ ID NO: 22946 - protein, 1273 aa, Artificial Sequence
  SARS-CoV-2/Wuhan/WIV05/2019__EPI_ISL_402128 spike protein (1-1273)(S13I_W152C_L452R_D614G)
MFVFLVLLPLVSIQCVNLTTRTQLPPAYTNSFTRGVYYPDKVFRSSVLHSTQDLFLPFFSNVTWFHAIHVSGTNGTKRFDNPVLPFNDGVYFASTEKSNIIRGWIFGTTLDSKTQSLLIVNNATNVVIKVCEFQFCNDPFLGVYYHKNNKSCMESEFRVYSSANNCTFEYVSQPFLMDLEGKQGNFKNLREFVFKNIDGYFKIYSKHTPINLVRDLPQGFSALEPLVDLPIGINITRFQTLLALHRSYLTPGDSSSGWTAGAAAYYVGYLQPRTFLLKYNENGTITDAVDCALDPLSETKCTLKSFTVEKGIYQTSNFRVQPTESIVRFPNITNLCPFGEVFNATRFASVYAWNRKRISNCVADYSVLYNSASFSTFKCYGVSPTKLNDLCFTNVYADSFVIRGDEVRQIAPGQTGKIADYNYKLPDDFTGCVIAWNSNNLDSKVGGNYNYRYRLFRKSNLKPFERDISTEIYQAGSTPCNGVEGFNCYFPLQSYGFQPTNGVGYQPYRVVVLSFELLHAPATVCGPKKSTNLVKNKCVNFNFNGLTGTGVLTESNKKFLPFQQFGRDIADTTDAVRDPQTLEILDITPCSFGGVSVITPGTNTSNQVAVLYQGVNCTEVPVAIHADQLTPTWRVYSTGSNVFQTRAGCLIGAEHVNNSYECDIPIGAGICASYQTQTNSPRRARSVASQSIIAYTMSLGAENSVAYSNNSIAIPTNFTISVTTEILPVSMTKTSVDCTMYICGDSTECSNLLLQYGSFCTQLNRALTGIAVEQDKNTQEVFAQVKQIYKTPPIKDFGGFNFSQILPDPSKPSKRSFIEDLLFNKVTLADAGFIKQYGDCLGDIAARDLICAQKFNGLTVLPPLLTDEMIAQYTSALLAGTITSGWTFGAGAALQIPFAMQMAYRFNGIGVTQNVLYENQKLIANQFNSAIGKIQDSLSSTASALGKLQDVVNQNAQALNTLVKQLSSNFGAISSVLNDILSRLDKVEAEVQIDRLITGRLQSLQTYVTQQLIRAAEIRASANLAATKMSECVLGQSKRVDFCGKGYHLMSFPQSAPHGVVFLHVTYVPAQEKNFTTAPAICHDGKAHFPREGVFVSNGTHWFVTQRNFYEPQIITTDNTFVSGNCDVVIGIVNNTVYDPLQPELDSFKEELDKYFKNHTSPDVDLGDISGINASVVNIQKEIDRLNEVAKNLNESLIDLQELGKYEQYIKWPWYIWLGFIAGLIAIVMVTIMLCCMTSCCSCLKGCCSCGSCCKFDEDDSEPVLKGVKLHYT

SEQ ID NO: 22947 - protein, 1273 aa, Artificial Sequence; identical to SEQ ID NO: 10
  SARS-CoV-2/Wuhan/WIV05/2019__EPI_ISL_402128 spike protein (1-1273)(K986P_V987P)

SEQ ID NO: 22948 - protein, 1273 aa, Artificial Sequence; identical to SEQ ID NO: 18
  SARS-CoV-2/Wuhan/WIV05/2019__EPI_ISL_402128 spike protein (1-1273)(K986P_V987P_ D614G)

SEQ ID NO: 22949 - protein, 1273 aa, Artificial Sequence; identical to SEQ ID NO: 22740
  SARS-CoV-2/Wuhan/WIV05/2019__EPI_ISL_402128 spike protein (1-1273)(K986P_V987P_A222V_D614G)

SEQ ID NO: 22950 - protein, 1273 aa, Artificial Sequence; identical to SEQ ID NO: 22742
  SARS-CoV-2/Wuhan/WIV05/2019__EPI_ISL_402128 spike protein (1-1273)(K986P_V987P_N439K_D614G)

SEQ ID NO: 22951 - protein, 1273 aa, Artificial Sequence; identical to SEQ ID NO: 22744
  SARS-CoV-2/Wuhan/WIV05/2019__EPI_ISL_402128 spike protein (1-1273)(K986P_V987P_S477N_D614G)

SEQ ID NO: 22952 - protein, 1273 aa, Artificial Sequence; identical to SEQ ID NO: 22746
  SARS-CoV-2/Wuhan/WIV05/2019__EPI_ISL_402128 spike protein (1-1273)(K986P_V987P_N501Y_D614G)

SEQ ID NO: 22953 - protein, 1271 aa, Artificial Sequence; identical to SEQ ID NO: 22748
  SARS-CoV-2/Wuhan/WIV05/2019__EPI_ISL_402128 spike protein (1-1273)(K986P_V987P_H69del_V70del_D614G)

SEQ ID NO: 22954 - protein, 1273 aa, Artificial Sequence; identical to SEQ ID NO: 22750
  SARS-CoV-2/Wuhan/WIV05/2019__EPI_ISL_402128 spike protein (1-1273)(K986P_V987P_Y453F_D614G)

SEQ ID NO: 22955 - protein, 1273 aa, Artificial Sequence; identical to SEQ ID NO: 22752
  SARS-CoV-2/Wuhan/WIV05/2019__EPI_ISL_402128 spike protein (1-1273)(K986P_V987P_D614G_I692V)

SEQ ID NO: 22956 - protein, 1273 aa, Artificial Sequence; identical to SEQ ID NO: 394
  SARS-CoV-2/Wuhan/WIV05/2019__EPI_ISL_402128 spike protein (1-1273)(K986P_V987P_D614G_M1229I)

SEQ ID NO: 22957 - protein, 1271 aa, Artificial Sequence; identical to SEQ ID NO: 22756
  SARS-CoV-2/Wuhan/WIV05/2019__EPI_ISL_402128 spike protein (1-1273)(K986P_V987P_H69del_V70del_A222V_Y453F_S477N_D614G_I692V)

SEQ ID NO: 22958 - protein, 1271 aa, Artificial Sequence; identical to SEQ ID NO: 22758
  SARS-CoV-2/Wuhan/WIV05/2019__EPI_ISL_402128 spike protein (1-1273)(K986P_V987P_H69del_V70del_Y453F_D614G_I692V_M1229I)

SEQ ID NO: 22959 - protein, 1270 aa, Artificial Sequence
  SARS-CoV-2/Wuhan/WIV05/2019__EPI_ISL_402128 spike protein (1-1273)(K986P_V987P_K986P_V987P_H69del_V70del_Y144del_N501Y_A570 D_D614G_P681H_T716I_S982A_D1118H)
MFVFLVLLPLVSSQCVNLTTRTQLPPAYTNSFTRGVYYPDKVFRSSVLHSTQDLFLPFFSNVTWFHAISGTNGTKRFDNPVLPFNDGVYFASTEKSNIIRGWIFGTTLDSKTQSLLIVNNATNVVIKVCEFQFCNDPFLGVYHKNNKSWMESEFRVYSSANNCTFEYVSQPFLMDLEGKQGNFKNLREFVFKNIDGYFKIYSKHTPINLVRDLPQGFSALEPLVDLPIGINITRFQTLLALHRSYLTPGDSSSGWTAGAAAYYVGYLQPRTFLLKYNENGTITDAVDCALDPLSETKCTLKSFTVEKGIYQTSNFRVQPTESIVRFPNITNLCPFGEVFNATRFASVYAWNRKRISNCVADYSVLYNSASFSTFKCYGVSPTKLNDLCFTNVYADSFVIRGDEVRQIAPGQTGKIADYNYKLPDDFTGCVIAWNSNNLDSKVGGNYNYLYRLFRKSNLKPFERDISTEIYQAGSTPCNGVEGFNCYFPLQSYGFQPTYGVGYQPYRVVVLSFELLHAPATVCGPKKSTNLVKNKCVNFNFNGLTGTGVLTESNKKFLPFQQFGRDIDDTTDAVRDPQTLEILDITPCSFGGVSVITPGTNTSNQVAVLYQGVNCTEVPVAIHADQLTPTWRVYSTGSNVFQTRAGCLIGAEHVNNSYECDIPIGAGICASYQTQTNSHRRARSVASQSIIAYTMSLGAENSVAYSNNSIAIPINFTISVTTEILPVSMTKTSVDCTMYICGDSTECSNLLLQYGSFCTQLNRALTGIAVEQDKNTQEVFAQVKQIYKTPPIKDFGGFNFSQILPDPSKPSKRSFIEDLLFNKVTLADAGFIKQYGDCLGDIAARDLICAQKFNGLTVLPPLLTDEMIAQYTSALLAGTITSGWTFGAGAALQIPFAMQMAYRFNGIGVTQNVLYENQKLIANQFNSAIGKIQDSLSSTASALGKLQDVVNQNAQALNTLVKQLSSNFGAISSVLNDILARLDPPEAEVQIDRLITGRLQSLQTYVTQQLIRAAEIRASANLAATKMSECVLGQSKRVDFCGKGYHLMSFPQSAPHGVVFLHVTYVPAQEKNFTTAPAICHDGKAHFPREGVFVSNGTHWFVTQRNFYEPQIITTHNTFVSGNCDVVIGIVNNTVYDPLQPELDSFKEELDKYFKNHTSPDVDLGDISGINASVVNIQKEIDRLNEVAKNLNESLIDLQELGKYEQYIKWPWYIWLGFIAGLIAIVMVTIMLCCMTSCCSCLKGCCSCGSCCKFDEDDSEPVLKGVKLHYT

SEQ ID NO: 22960 - protein, 1273 aa, Artificial Sequence
  SARS-CoV-2/Wuhan/WIV05/2019__EPI_ISL_402128 spike protein (1-1273)(K986P_V987P_K986P_V987P_K417N_E484K_N501Y_D614G)
MFVFLVLLPLVSSQCVNLTTRTQLPPAYTNSFTRGVYYPDKVFRSSVLHSTQDLFLPFFSNVTWFHAIHVSGTNGTKRFDNPVLPFNDGVYFASTEKSNIIRGWIFGTTLDSKTQSLLIVNNATNVVIKVCEFQFCNDPFLGVYYHKNNKSWMESEFRVYSSANNCTFEYVSQPFLMDLEGKQGNFKNLREFVFKNIDGYFKIYSKHTPINLVRDLPQGFSALEPLVDLPIGINITRFQTLLALHRSYLTPGDSSSGWTAGAAAYYVGYLQPRTFLLKYNENGTITDAVDCALDPLSETKCTLKSFTVEKGIYQTSNFRVQPTESIVRFPNITNLCPFGEVFNATRFASVYAWNRKRISNCVADYSVLYNSASFSTFKCYGVSPTKLNDLCFTNVYADSFVIRGDEVRQIAPGQTGNIADYNYKLPDDFTGCVIAWNSNNLDSKVGGNYNYLYRLFRKSNLKPFERDISTEIYQAGSTPCNGVKGFNCYFPLQSYGFQPTYGVGYQPYRVVVLSFELLHAPATVCGPKKSTNLVKNKCVNFNFNGLTGTGVLTESNKKFLPFQQFGRDIADTTDAVRDPQTLEILDITPCSFGGVSVITPGTNTSNQVAVLYQGVNCTEVPVAIHADQLTPTWRVYSTGSNVFQTRAGCLIGAEHVNNSYECDIPIGAGICASYQTQTNSPRRARSVASQSIIAYTMSLGAENSVAYSNNSIAIPTNFTISVTTEILPVSMTKTSVDCTMYICGDSTECSNLLLQYGSFCTQLNRALTGIAVEQDKNTQEVFAQVKQIYKTPPIKDFGGFNFSQILPDPSKPSKRSFIEDLLFNKVTLADAGFIKQYGDCLGDIAARDLICAQKFNGLTVLPPLLTDEMIAQYTSALLAGTITSGWTFGAGAALQIPFAMQMAYRFNGIGVTQNVLYENQKLIANQFNSAIGKIQDSLSSTASALGKLQDVVNQNAQALNTLVKQLSSNFGAISSVLNDILSRLDPPEAEVQIDRLITGRLQSLQTYVTQQLIRAAEIRASANLAATKMSECVLGQSKRVDFCGKGYHLMSFPQSAPHGVVFLHVTYVPAQEKNFTTAPAICHDGKAHFPREGVFVSNGTHWFVTQRNFYEPQIITTDNTFVSGNCDVVIGIVNNTVYDPLQPELDSFKEELDKYFKNHTSPDVDLGDISGINASVVNIQKEIDRLNEVAKNLNESLIDLQELGKYEQYIKWPWYIWLGFIAGLIAIVMVTIMLCCMTSCCSCLKGCCSCGSCCKFDEDDSEPVLKGVKLHYT

SEQ ID NO: 22961 - protein, 1270 aa, Artificial Sequence
  SARS-CoV-2/Wuhan/WIV05/2019__EPI_ISL_402128 spike protein (1-1273)(K986P_V987P_K986P_V987P_L18F_D80A_D215G_L242del_A243del_ L244del_R246I_K417N_E484K_N501Y_D614G_A701V)
MFVFLVLLPLVSSQCVNFTTRTQLPPAYTNSFTRGVYYPDKVFRSSVLHSTQDLFLPFFSNVTWFHAIHVSGTNGTKRFANPVLPFNDGVYFASTEKSNIIRGWIFGTTLDSKTQSLLIVNNATNVVIKVCEFQFCNDPFLGVYYHKNNKSWMESEFRVYSSANNCTFEYVSQPFLMDLEGKQGNFKNLREFVFKNIDGYFKIYSKHTPINLVRGLPQGFSALEPLVDLPIGINITRFQTLHISYLTPGDSSSGWTAGAAAYYVGYLQPRTFLLKYNENGTITDAVDCALDPLSETKCTLKSFTVEKGIYQTSNFRVQPTESIVRFPNITNLCPFGEVFNATRFASVYAWNRKRISNCVADYSVLYNSASFSTFKCYGVSPTKLNDLCFTNVYADSFVIRGDEVRQIAPGQTGNIADYNYKLPDDFTGCVIAWNSNNLDSKVGGNYNYLYRLFRKSNLKPFERDISTEIYQAGSTPCNGVKGFNCYFPLQSYGFQPTYGVGYQPYRVVVLSFELLHAPATVCGPKKSTNLVKNKCVNFNFNGLTGTGVLTESNKKFLPFQQFGRDIADTTDAVRDPQTLEILDITPCSFGGVSVITPGTNTSNQVAVLYQGVNCTEVPVAIHADQLTPTWRVYSTGSNVFQTRAGCLIGAEHVNNSYECDIPIGAGICASYQTQTNSPRRARSVASQSIIAYTMSLGVENSVAYSNNSIAIPTNFTISVTTEILPVSMTKTSVDCTMYICGDSTECSNLLLQYGSFCTQLNRALTGIAVEQDKNTQEVFAQVKQIYKTPPIKDFGGFNFSQILPDPSKPSKRSFIEDLLFNKVTLADAGFIKQYGDCLGDIAARDLICAQKFNGLTVLPPLLTDEMIAQYTSALLAGTITSGWTFGAGAALQIPFAMQMAYRFNGIGVTQNVLYENQKLIANQFNSAIGKIQDSLSSTASALGKLQDVVNQNAQALNTLVKQLSSNFGAISSVLNDILSRLDPPEAEVQIDRLITGRLQSLQTYVTQQLIRAAEIRASANLAATKMSECVLGQSKRVDFCGKGYHLMSFPQSAPHGVVFLHVTYVPAQEKNFTTAPAICHDGKAHFPREGVFVSNGTHWFVTQRNFYEPQIITTDNTFVSGNCDVVIGIVNNTVYDPLQPELDSFKEELDKYFKNHTSPDVDLGDISGINASVVNIQKEIDRLNEVAKNLNESLIDLQELGKYEQYIKWPWYIWLGFIAGLIAIVMVTIMLCCMTSCCSCLKGCCSCGSCCKFDEDDSEPVLKGVKLHYT

SEQ ID NO: 22962 - protein, 1273 aa, Artificial Sequence
  SARS-CoV-2/Wuhan/WIV05/2019__EPI_ISL_402128 spike protein (1-1273)(K986P_V987P_K986P_V987P_E484K_D614G)
MFVFLVLLPLVSSQCVNLTTRTQLPPAYTNSFTRGVYYPDKVFRSSVLHSTQDLFLPFFSNVTWFHAIHVSGTNGTKRFDNPVLPFNDGVYFASTEKSNIIRGWIFGTTLDSKTQSLLIVNNATNVVIKVCEFQFCNDPFLGVYYHKNNKSWMESEFRVYSSANNCTFEYVSQPFLMDLEGKQGNFKNLREFVFKNIDGYFKIYSKHTPINLVRDLPQGFSALEPLVDLPIGINITRFQTLLALHRSYLTPGDSSSGWTAGAAAYYVGYLQPRTFLLKYNENGTITDAVDCALDPLSETKCTLKSFTVEKGIYQTSNFRVQPTESIVRFPNITNLCPFGEVFNATRFASVYAWNRKRISNCVADYSVLYNSASFSTFKCYGVSPTKLNDLCFTNVYADSFVIRGDEVRQIAPGQTGKIADYNYKLPDDFTGCVIAWNSNNLDSKVGGNYNYLYRLFRKSNLKPFERDISTEIYQAGSTPCNGVKGFNCYFPLQSYGFQPTNGVGYQPYRVVVLSFELLHAPATVCGPKKSTNLVKNKCVNFNFNGLTGTGVLTESNKKFLPFQQFGRDIADTTDAVRDPQTLEILDITPCSFGGVSVITPGTNTSNQVAVLYQGVNCTEVPVAIHADQLTPTWRVYSTGSNVFQTRAGCLIGAEHVNNSYECDIPIGAGICASYQTQTNSPRRARSVASQSIIAYTMSLGAENSVAYSNNSIAIPTNFTISVTTEILPVSMTKTSVDCTMYICGDSTECSNLLLQYGSFCTQLNRALTGIAVEQDKNTQEVFAQVKQIYKTPPIKDFGGFNFSQILPDPSKPSKRSFIEDLLFNKVTLADAGFIKQYGDCLGDIAARDLICAQKFNGLTVLPPLLTDEMIAQYTSALLAGTITSGWTFGAGAALQIPFAMQMAYRFNGIGVTQNVLYENQKLIANQFNSAIGKIQDSLSSTASALGKLQDVVNQNAQALNTLVKQLSSNFGAISSVLNDILSRLDPPEAEVQIDRLITGRLQSLQTYVTQQLIRAAEIRASANLAATKMSECVLGQSKRVDFCGKGYHLMSFPQSAPHGVVFLHVTYVPAQEKNFTTAPAICHDGKAHFPREGVFVSNGTHWFVTQRNFYEPQIITTDNTFVSGNCDVVIGIVNNTVYDPLQPELDSFKEELDKYFKNHTSPDVDLGDISGINASVVNIQKEIDRLNEVAKNLNESLIDLQELGKYEQYIKWPWYIWLGFIAGLIAIVMVTIMLCCMTSCCSCLKGCCSCGSCCKFDEDDSEPVLKGVKLHYT

SEQ ID NO: 22963 - protein, 1273 aa, Artificial Sequence
  SARS-CoV-2/Wuhan/WIV05/2019__EPI_ISL_402128 spike protein (1-1273)(K986P_V987P_K986P_V987P_L18F_T20N_P26S_D138Y_R190S_K417T _E484K_N501Y_D614G_H655Y_T1027I)
MFVFLVLLPLVSSQCVNFTNRTQLPSAYTNSFTRGVYYPDKVFRSSVLHSTQDLFLPFFSNVTWFHAIHVSGTNGTKRFDNPVLPFNDGVYFASTEKSNIIRGWIFGTTLDSKTQSLLIVNNATNVVIKVCEFQFCNYPFLGVYYHKNNKSWMESEFRVYSSANNCTFEYVSQPFLMDLEGKQGNFKNLSEFVFKNIDGYFKIYSKHTPINLVRDLPQGFSALEPLVDLPIGINITRFQTLLALHRSYLTPGDSSSGWTAGAAAYYVGYLQPRTFLLKYNENGTITDAVDCALDPLSETKCTLKSFTVEKGIYQTSNFRVQPTESIVRFPNITNLCPFGEVFNATRFASVYAWNRKRISNCVADYSVLYNSASFSTFKCYGVSPTKLNDLCFTNVYADSFVIRGDEVRQIAPGQTGTIADYNYKLPDDFTGCVIAWNSNNLDSKVGGNYNYLYRLFRKSNLKPFERDISTEIYQAGSTPCNGVKGFNCYFPLQSYGFQPTYGVGYQPYRVVVLSFELLHAPATVCGPKKSTNLVKNKCVNFNFNGLTGTGVLTESNKKFLPFQQFGRDIADTTDAVRDPQTLEILDITPCSFGGVSVITPGTNTSNQVAVLYQGVNCTEVPVAIHADQLTPTWRVYSTGSNVFQTRAGCLIGAEYVNNSYECDIPIGAGICASYQTQTNSPRRARSVASQSIIAYTMSLGAENSVAYSNNSIAIPTNFTISVTTEILPVSMTKTSVDCTMYICGDSTECSNLLLQYGSFCTQLNRALTGIAVEQDKNTQEVFAQVKQIYKTPPIKDFGGFNFSQILPDPSKPSKRSFIEDLLFNKVTLADAGFIKQYGDCLGDIAARDLICAQKFNGLTVLPPLLTDEMIAQYTSALLAGTITSGWTFGAGAALQIPFAMQMAYRFNGIGVTQNVLYENQKLIANQFNSAIGKIQDSLSSTASALGKLQDVVNQNAQALNTLVKQLSSNFGAISSVLNDILSRLDPPEAEVQIDRLITGRLQSLQTYVTQQLIRAAEIRASANLAAIKMSECVLGQSKRVDFCGKGYHLMSFPQSAPHGVVFLHVTYVPAQEKNFTTAPAICHDGKAHFPREGVFVSNGTHWFVTQRNFYEPQIITTDNTFVSGNCDVVIGIVNNTVYDPLQPELDSFKEELDKYFKNHTSPDVDLGDISGINASVVNIQKEIDRLNEVAKNLNESLIDLQELGKYEQYIKWPWYIWLGFIAGLIAIVMVTIMLCCMTSCCSCLKGCCSCGSCCKFDEDDSEPVLKGVKLHYT

SEQ ID NO: 22964 - protein, 1273 aa, Artificial Sequence
  SARS-CoV-2/Wuhan/WIV05/2019__EPI_ISL_402128 spike protein (1-1273)(K986P_V987P_K986P_V987P_S13I_W152C_L452R_D614G)
MFVFLVLLPLVSIQCVNLTTRTQLPPAYTNSFTRGVYYPDKVFRSSVLHSTQDLFLPFFSNVTWFHAIHVSGTNGTKRFDNPVLPFNDGVYFASTEKSNIIRGWIFGTTLDSKTQSLLIVNNATNVVIKVCEFQFCNDPFLGVYYHKNNKSCMESEFRVYSSANNCTFEYVSQPFLMDLEGKQGNFKNLREFVFKNIDGYFKIYSKHTPINLVRDLPQGFSALEPLVDLPIGINITRFQTLLALHRSYLTPGDSSSGWTAGAAAYYVGYLQPRTFLLKYNENGTITDAVDCALDPLSETKCTLKSFTVEKGIYQTSNFRVQPTESIVRFPNITNLCPFGEVFNATRFASVYAWNRKRISNCVADYSVLYNSASFSTFKCYGVSPTKLNDLCFTNVYADSFVIRGDEVRQIAPGQTGKIADYNYKLPDDFTGCVIAWNSNNLDSKVGGNYNYRYRLFRKSNLKPFERDISTEIYQAGSTPCNGVEGFNCYFPLQSYGFQPTNGVGYQPYRVVVLSFELLHAPATVCGPKKSTNLVKNKCVNFNFNGLTGTGVLTESNKKFLPFQQFGRDIADTTDAVRDPQTLEILDITPCSFGGVSVITPGTNTSNQVAVLYQGVNCTEVPVAIHADQLTPTWRVYSTGSNVFQTRAGCLIGAEHVNNSYECDIPIGAGICASYQTQTNSPRRARSVASQSIIAYTMSLGAENSVAYSNNSIAIPTNFTISVTTEILPVSMTKTSVDCTMYICGDSTECSNLLLQYGSFCTQLNRALTGIAVEQDKNTQEVFAQVKQIYKTPPIKDFGGFNFSQILPDPSKPSKRSFIEDLLFNKVTLADAGFIKQYGDCLGDIAARDLICAQKFNGLTVLPPLLTDEMIAQYTSALLAGTITSGWTFGAGAALQIPFAMQMAYRFNGIGVTQNVLYENQKLIANQFNSAIGKIQDSLSSTASALGKLQDVVNQNAQALNTLVKQLSSNFGAISSVLNDILSRLDPPEAEVQIDRLITGRLQSLQTYVTQQLIRAAEIRASANLAATKMSECVLGQSKRVDFCGKGYHLMSFPQSAPHGVVFLHVTYVPAQEKNFTTAPAICHDGKAHFPREGVFVSNGTHWFVTQRNFYEPQIITTDNTFVSGNCDVVIGIVNNTVYDPLQPELDSFKEELDKYFKNHTSPDVDLGDISGINASVVNIQKEIDRLNEVAKNLNESLIDLQELGKYEQYIKWPWYIWLGFIAGLIAIVMVTIMLCCMTSCCSCLKGCCSCGSCCKFDEDDSEPVLKGVKLHYT

SEQ ID NO: 22965 - RNA, 1152 nt, Artificial Sequence; identical to SEQ ID NO: 22760
  SARS-CoV-2/Wuhan/WIV05/2019__EPI_ISL_402128 spike protein CDS gc (1-15,334-528) Ferritin construct

SEQ ID NO: 22966 - RNA, 750 nt, Artificial Sequence; identical to SEQ ID NO: 22761
  SARS-CoV-2/Wuhan/WIV05/2019__EPI_ISL_402128 spike protein CDS gc (334-528) Foldon construct

SEQ ID NO: 22967 - RNA, 1128 nt, Artificial Sequence; identical to SEQ ID NO: 22762
  SARS-CoV-2/Wuhan/WIV05/2019__EPI_ISL_402128 spike protein CDS gc (1-15,334-528) LumSynth construct

SEQ ID NO: 22968 - RNA, 1089 nt, Artificial Sequence; identical to SEQ ID NO: 22763
  SARS-CoV-2/Wuhan/WIV05/2019__EPI_ISL_402128 spike protein CDS gc (334-528) LumSynth construct

SEQ ID NO: 22969 - RNA, 3822 nt, Artificial Sequence; identical to SEQ ID NO: 136
  SARS-CoV-2/Wuhan/WIV05/2019__EPI_ISL_402128 spike protein CDS gc (1-1273)

SEQ ID NO: 22970 - RNA, 3822 nt, Artificial Sequence; identical to SEQ ID NO: 22764
  SARS-CoV-2/Wuhan/WIV05/2019__EPI_ISL_402128 spike protein CDS gc (1-1273)(D614G)

SEQ ID NO: 22971 - RNA, 3822 nt, Artificial Sequence; identical to SEQ ID NO: 22766
  SARS-CoV-2/Wuhan/WIV05/2019__EPI_ISL_402128 spike protein CDS gc (1-1273)(A222V_D614G)

SEQ ID NO: 22972 - RNA, 3822 nt, Artificial Sequence; identical to SEQ ID NO: 22768
  SARS-CoV-2/Wuhan/WIV05/2019__EPI_ISL_402128 spike protein CDS gc (1-1273)(N439K_D614G)

SEQ ID NO: 22973 - RNA, 3822 nt, Artificial Sequence; identical to SEQ ID NO: 22770
  SARS-CoV-2/Wuhan/WIV05/2019__EPI_ISL_402128 spike protein CDS gc (1-1273)(S477N_D614G)

SEQ ID NO: 22974 - RNA, 3822 nt, Artificial Sequence; identical to SEQ ID NO: 22772
  SARS-CoV-2/Wuhan/WIV05/2019__EPI_ISL_402128 spike protein CDS gc (1-1273)(N501Y_D614G)

SEQ ID NO: 22975 - RNA, 3816 nt, Artificial Sequence; identical to SEQ ID NO: 22774
  SARS-CoV-2/Wuhan/WIV05/2019__EPI_ISL_402128 spike protein CDS gc (1-1273)(H69del_V70del_D614G)

SEQ ID NO: 22976 - RNA, 3822 nt, Artificial Sequence; identical to SEQ ID NO: 22776
  SARS-CoV-2/Wuhan/WIV05/2019__EPI_ISL_402128 spike protein CDS gc (1-1273)(Y453F_D614G)

SEQ ID NO: 22977 - RNA, 3822 nt, Artificial Sequence; identical to SEQ ID NO: 22778
  SARS-CoV-2/Wuhan/WIV05/2019__EPI_ISL_402128 spike protein CDS gc (1-1273)(D614G_I692V)

SEQ ID NO: 22978 - RNA, 3822 nt, Artificial Sequence; identical to SEQ ID NO: 22780
  SARS-CoV-2/Wuhan/WIV05/2019__EPI_ISL_402128 spike protein CDS gc (1-1273)(D614G_M1229I)

SEQ ID NO: 22979 - RNA, 3816 nt, Artificial Sequence; identical to SEQ ID NO: 22782
  SARS-CoV-2/Wuhan/WIV05/2019__EPI_ISL_402128 spike protein CDS gc (1-1273)(H69del_V70del_A222V_Y453F_S477N_D614G_I692V)

SEQ ID NO: 22980 - RNA, 3816 nt, Artificial Sequence; identical to SEQ ID NO: 22784
  SARS-CoV-2/Wuhan/WIV05/2019__EPI_ISL_402128 spike protein CDS gc (1-1273)(H69del_V70del_Y453F_D614G_I692V_M1229I)

SEQ ID NO: 22981 - RNA, 3813 nt, Artificial Sequence
  SARS-CoV-2/Wuhan/WIV05/2019__EPI_ISL_402128 spike protein CDS gc (1-1273)(H69del_V70del_Y144del_N501Y_A570D_D614G_P681H_T716I_S982 A_D1118H)
auguucguguuccugguccuccugccccuggugagcucccagugcgugaaccucaccacccgcacgcagcugccgcccgccuacaccaacagcuucacccggggcgucuacuaccccgacaagguguuccgcuccagcgugcugcacuccacccaggaccucuuccugcccuucuucagcaacgucacgugguuccacgccaucuccgggaccaacggcaccaagcgguucgacaacccggugcugcccuucaacgacggggucuacuucgcgagcaccgagaaguccaacaucauccgcggcuggaucuucgggacgacccucgacagcaagacccagucccugcugaucgugaacaacgccaccaacguggucaucaaggugugcgaguuccaguucugcaacgaccccuuccucggcguguaccacaagaacaacaagagcuggauggaguccgaguuccgggucuacagcuccgccaacaacugcacguucgaguacgugagccagcccuuccugauggaccuggagggcaagcaggggaacuucaagaaccuccgcgaguucguguucaagaacaucgacggcuacuucaagaucuacuccaagcacaccccgaucaaccugguccgggaccugccccagggguucagcgcccucgagccccugguggaccugcccaucggcaucaacaucacccgcuuccagacccuccuggcccugcaccgguccuaccucacgccgggggacagcagcuccggcuggaccgcgggcgccgccgccuacuacgugggguaccugcagccccgcaccuuccugcucaaguacaacgagaacggcaccaucacggacgcggucgacugcgcccuggacccccugagcgagaccaagugcacccucaaguccuucaccguggagaaggggaucuaccagacgagcaacuuccgggugcagcccaccgaguccaucguccgcuucccgaacaucaccaaccugugccccuucggcgagguguucaacgccacccgguucgccagcgucuacgccuggaaccgcaagcggaucuccaacugcguggcggacuacagcgugcuguacaacuccgccagcuucuccacguucaagugcuacggcgucagccccaccaagcucaacgaccugugcuucaccaacguguacgccgacuccuucgugauccgcggggacgagguccggcagaucgcccccggccagaccgggaagaucgccgacuacaacuacaagcugccggacgacuucacgggcugcgugaucgcguggaacagcaacaaccucgacuccaaggucgggggcaacuacaacuaccuguaccgccuguuccgcaagagcaaccucaagcccuucgagcgggacaucuccaccgagaucuaccaggccggcagcacccccugcaacgggguggagggcuucaacugcuacuucccccugcaguccuacggguuccagccgaccuacggcgugggguaccagcccuaccggguggucgugcugagcuucgagcuccugcacgcccccgccacggugugcggccccaagaaguccaccaaccuggucaagaacaagugcgugaacuucaacuucaacggccucaccgggaccggcgugcugaccgagagcaacaagaaguuccugccguuccagcaguucgggcgcgacaucgacgacacgaccgacgcgguccgcgacccccagacccuggagauccucgacaucacccccugcagcuucggcgggguguccgugaucacgccgggcaccaacaccagcaaccaggucgccgugcuguaccagggcgugaacugcaccgagguccccguggccauccacgccgaccagcugacgcccaccuggcggguguacuccaccggcagcaacgucuuccagacccgcgccgggugccucaucggcgcggagcacgugaacaacuccuacgagugcgacauccccaucggggccggcaucugcgccagcuaccagacgcagaccaacucccaccggcgcgcccggagcguggcgucccagagcaucaucgccuacaccaugucccugggcgccgagaacagcgucgccuacuccaacaacagcaucgccauccccaucaacuucacgaucuccgugaccaccgagauccugcccgugagcaugaccaagacgagcgucgacugcaccauguacaucugcggggacuccaccgagugcagcaaccuccugcugcaguacggcuccuucugcacccagcucaaccgcgcgcugacggggaucgccguggagcaggacaagaacacccaggagguguucgcccaggucaagcagaucuacaagacgcccccgaucaaggacuucggcggguucaacuucagccagauccugcccgaccccuccaagcccagcaagcgguccuucaucgaggaccuccuguucaacaaggugacccuggccgacgccggcuucaucaagcaguacggcgacugccucggggacaucgcggcccgcgaccugaucugcgcccagaaguucaacggccugaccgugcucccgccccugcugaccgacgagaugaucgcccaguacaccagcgcccuccuggcggggaccaucacguccggcuggaccuucggggccggcgccgcccugcagauccccuucgcgaugcagauggccuaccgguucaacggcaucggggucacccagaacgugcucuacgagaaccagaagcugaucgccaaccaguucaacagcgccaucggcaagauccaggacucccugagcuccaccgccagcgcgcucgggaagcugcaggacguggucaaccagaacgcccaggcccugaacacgcucgugaagcagcuguccagcaacuucggcgccaucuccagcgugcugaacgacauccucgcccgccuggacaaggucgaggccgaggugcagaucgaccggcugaucaccgggcgccuccagagccugcagaccuacgugacccagcagcugauccgggcggccgagauccgcgccagcgccaaccucgccgcgaccaagauguccgagugcguccugggccagagcaagcggguggacuucugcggcaagggguaccaccugauguccuucccccagagcgccccgcacggcguggucuuccuccacgugacguacguccccgcccaggagaagaacuucaccaccgcccccgcgaucugccacgacgggaaggcccacuucccccgcgagggcguguucguguccaacgggacccacugguucgucacgcagcggaacuucuacgagccgcagaucaucaccacccacaacaccuucgugagcggcaacugcgacguggucaucggcaucgugaacaacacgguguacgacccccugcagcccgagcuggacuccuucaaggaggagcucgacaaguacuucaagaaccacaccagccccgacgucgaccugggggacaucuccggcaucaacgccagcguggugaacauccagaaggagaucgaccgccugaacgaggucgccaagaaccucaacgagucccugaucgaccugcaggagcucgggaaguacgagcaguacaucaaguggccgugguacaucuggcugggcuucaucgccggccugaucgcgaucgugauggugaccaucaugcucugcugcaugaccagcugcugcuccugccugaaggggugcugcagcugcggcuccugcugcaaguucgacgaggacgacagcgagcccguccugaagggggugaagcuccacuacacguga

SEQ ID NO: 22982 - RNA, 3822 nt, Artificial Sequence
  SARS-CoV-2/Wuhan/WIV05/2019__EPI_ISL_402128 spike protein CDS gc (1-1273)(K417N_E484K_N501Y_D614G)
auguucguguuccugguccuccugccccuggugagcucccagugcgugaaccucaccacccgcacgcagcugccgcccgccuacaccaacagcuucacccggggcgucuacuaccccgacaagguguuccgcuccagcgugcugcacuccacccaggaccucuuccugcccuucuucagcaacgucacgugguuccacgccauccacguguccgggaccaacggcaccaagcgguucgacaacccggugcugcccuucaacgacggggucuacuucgcgagcaccgagaaguccaacaucauccgcggcuggaucuucgggacgacccucgacagcaagacccagucccugcugaucgugaacaacgccaccaacguggucaucaaggugugcgaguuccaguucugcaacgaccccuuccucggcguguacuaccacaagaacaacaagagcuggauggaguccgaguuccgggucuacagcuccgccaacaacugcacguucgaguacgugagccagcccuuccugauggaccuggagggcaagcaggggaacuucaagaaccuccgcgaguucguguucaagaacaucgacggcuacuucaagaucuacuccaagcacaccccgaucaaccugguccgggaccugccccagggguucagcgcccucgagccccugguggaccugcccaucggcaucaacaucacccgcuuccagacccuccuggcccugcaccgguccuaccucacgccgggggacagcagcuccggcuggaccgcgggcgccgccgccuacuacgugggguaccugcagccccgcaccuuccugcucaaguacaacgagaacggcaccaucacggacgcggucgacugcgcccuggacccccugagcgagaccaagugcacccucaaguccuucaccguggagaaggggaucuaccagacgagcaacuuccgggugcagcccaccgaguccaucguccgcuucccgaacaucaccaaccugugccccuucggcgagguguucaacgccacccgguucgccagcgucuacgccuggaaccgcaagcggaucuccaacugcguggcggacuacagcgugcuguacaacuccgccagcuucuccacguucaagugcuacggcgucagccccaccaagcucaacgaccugugcuucaccaacguguacgccgacuccuucgugauccgcggggacgagguccggcagaucgcccccggccagaccgggaacaucgccgacuacaacuacaagcugccggacgacuucacgggcugcgugaucgcguggaacagcaacaaccucgacuccaaggucgggggcaacuacaacuaccuguaccgccuguuccgcaagagcaaccucaagcccuucgagcgggacaucuccaccgagaucuaccaggccggcagcacccccugcaacggggugaagggcuucaacugcuacuucccccugcaguccuacggguuccagccgaccuacggcgugggguaccagcccuaccggguggucgugcugagcuucgagcuccugcacgcccccgccacggugugcggccccaagaaguccaccaaccuggucaagaacaagugcgugaacuucaacuucaacggccucaccgggaccggcgugcugaccgagagcaacaagaaguuccugccguuccagcaguucgggcgcgacaucgccgacacgaccgacgcgguccgcgacccccagacccuggagauccucgacaucacccccugcagcuucggcgggguguccgugaucacgccgggcaccaacaccagcaaccaggucgccgugcuguaccagggcgugaacugcaccgagguccccguggccauccacgccgaccagcugacgcccaccuggcggguguacuccaccggcagcaacgucuuccagacccgcgccgggugccucaucggcgcggagcacgugaacaacuccuacgagugcgacauccccaucggggccggcaucugcgccagcuaccagacgcagaccaacuccccgcggcgcgcccggagcguggcgucccagagcaucaucgccuacaccaugucccugggcgccgagaacagcgucgccuacuccaacaacagcaucgccauccccaccaacuucacgaucuccgugaccaccgagauccugcccgugagcaugaccaagacgagcgucgacugcaccauguacaucugcggggacuccaccgagugcagcaaccuccugcugcaguacggcuccuucugcacccagcucaaccgcgcgcugacggggaucgccguggagcaggacaagaacacccaggagguguucgcccaggucaagcagaucuacaagacgcccccgaucaaggacuucggcggguucaacuucagccagauccugcccgaccccuccaagcccagcaagcgguccuucaucgaggaccuccuguucaacaaggugacccuggccgacgccggcuucaucaagcaguacggcgacugccucggggacaucgcggcccgcgaccugaucugcgcccagaaguucaacggccugaccgugcucccgccccugcugaccgacgagaugaucgcccaguacaccagcgcccuccuggcggggaccaucacguccggcuggaccuucggggccggcgccgcccugcagauccccuucgcgaugcagauggccuaccgguucaacggcaucggggucacccagaacgugcucuacgagaaccagaagcugaucgccaaccaguucaacagcgccaucggcaagauccaggacucccugagcuccaccgccagcgcgcucgggaagcugcaggacguggucaaccagaacgcccaggcccugaacacgcucgugaagcagcuguccagcaacuucggcgccaucuccagcgugcugaacgacauccucucccgccuggacaaggucgaggccgaggugcagaucgaccggcugaucaccgggcgccuccagagccugcagaccuacgugacccagcagcugauccgggcggccgagauccgcgccagcgccaaccucgccgcgaccaagauguccgagugcguccugggccagagcaagcggguggacuucugcggcaagggguaccaccugauguccuucccccagagcgccccgcacggcguggucuuccuccacgugacguacguccccgcccaggagaagaacuucaccaccgcccccgcgaucugccacgacgggaaggcccacuucccccgcgagggcguguucguguccaacgggacccacugguucgucacgcagcggaacuucuacgagccgcagaucaucaccaccgacaacaccuucgugagcggcaacugcgacguggucaucggcaucgugaacaacacgguguacgacccccugcagcccgagcuggacuccuucaaggaggagcucgacaaguacuucaagaaccacaccagccccgacgucgaccugggggacaucuccggcaucaacgccagcguggugaacauccagaaggagaucgaccgccugaacgaggucgccaagaaccucaacgagucccugaucgaccugcaggagcucgggaaguacgagcaguacaucaaguggccgugguacaucuggcugggcuucaucgccggccugaucgcgaucgugauggugaccaucaugcucugcugcaugaccagcugcugcuccugccugaaggggugcugcagcugcggcuccugcugcaaguucgacgaggacgacagcgagcccguccugaagggggugaagcuccacuacacguga

SEQ ID NO: 22983 - RNA, 3813 nt, Artificial Sequence
  SARS-CoV-2/Wuhan/WIV05/2019__EPI_ISL_402128 spike protein CDS gc (1-1273)(L18F_D80A_D215G_L242del_A243del_L244del_R246I_K417N_E484 K_N501Y_D614G_A701V)
auguucguguuccugguccuccugccccuggugagcucccagugcgugaacuucaccacccgcacgcagcugccgcccgccuacaccaacagcuucacccggggcgucuacuaccccgacaagguguuccgcuccagcgugcugcacuccacccaggaccucuuccugcccuucuucagcaacgucacgugguuccacgccauccacguguccgggaccaacggcaccaagcgguucgccaacccggugcugcccuucaacgacggggucuacuucgcgagcaccgagaaguccaacaucauccgcggcuggaucuucgggacgacccucgacagcaagacccagucccugcugaucgugaacaacgccaccaacguggucaucaaggugugcgaguuccaguucugcaacgaccccuuccucggcguguacuaccacaagaacaacaagagcuggauggaguccgaguuccgggucuacagcuccgccaacaacugcacguucgaguacgugagccagcccuuccugauggaccuggagggcaagcaggggaacuucaagaaccuccgcgaguucguguucaagaacaucgacggcuacuucaagaucuacuccaagcacaccccgaucaaccugguccggggccugccccagggguucagcgcccucgagccccugguggaccugcccaucggcaucaacaucacccgcuuccagacccuccacaucuccuaccucacgccgggggacagcagcuccggcuggaccgcgggcgccgccgccuacuacgugggguaccugcagccccgcaccuuccugcucaaguacaacgagaacggcaccaucacggacgcggucgacugcgcccuggacccccugagcgagaccaagugcacccucaaguccuucaccguggagaaggggaucuaccagacgagcaacuuccgggugcagcccaccgaguccaucguccgcuucccgaacaucaccaaccugugccccuucggcgagguguucaacgccacccgguucgccagcgucuacgccuggaaccgcaagcggaucuccaacugcguggcggacuacagcgugcuguacaacuccgccagcuucuccacguucaagugcuacggcgucagccccaccaagcucaacgaccugugcuucaccaacguguacgccgacuccuucgugauccgcggggacgagguccggcagaucgcccccggccagaccgggaacaucgccgacuacaacuacaagcugccggacgacuucacgggcugcgugaucgcguggaacagcaacaaccucgacuccaaggucgggggcaacuacaacuaccuguaccgccuguuccgcaagagcaaccucaagcccuucgagcgggacaucuccaccgagaucuaccaggccggcagcacccccugcaacggggugaagggcuucaacugcuacuucccccugcaguccuacggguuccagccgaccuacggcgugggguaccagcccuaccggguggucgugcugagcuucgagcuccugcacgcccccgccacggugugcggccccaagaaguccaccaaccuggucaagaacaagugcgugaacuucaacuucaacggccucaccgggaccggcgugcugaccgagagcaacaagaaguuccugccguuccagcaguucgggcgcgacaucgccgacacgaccgacgcgguccgcgacccccagacccuggagauccucgacaucacccccugcagcuucggcgggguguccgugaucacgccgggcaccaacaccagcaaccaggucgccgugcuguaccagggcgugaacugcaccgagguccccguggccauccacgccgaccagcugacgcccaccuggcggguguacuccaccggcagcaacgucuuccagacccgcgccgggugccucaucggcgcggagcacgugaacaacuccuacgagugcgacauccccaucggggccggcaucugcgccagcuaccagacgcagaccaacuccccgcggcgcgcccggagcguggcgucccagagcaucaucgccuacaccaugucccugggcguggagaacagcgucgccuacuccaacaacagcaucgccauccccaccaacuucacgaucuccgugaccaccgagauccugcccgugagcaugaccaagacgagcgucgacugcaccauguacaucugcggggacuccaccgagugcagcaaccuccugcugcaguacggcuccuucugcacccagcucaaccgcgcgcugacggggaucgccguggagcaggacaagaacacccaggagguguucgcccaggucaagcagaucuacaagacgcccccgaucaaggacuucggcggguucaacuucagccagauccugcccgaccccuccaagcccagcaagcgguccuucaucgaggaccuccuguucaacaaggugacccuggccgacgccggcuucaucaagcaguacggcgacugccucggggacaucgcggcccgcgaccugaucugcgcccagaaguucaacggccugaccgugcucccgccccugcugaccgacgagaugaucgcccaguacaccagcgcccuccuggcggggaccaucacguccggcuggaccuucggggccggcgccgcccugcagauccccuucgcgaugcagauggccuaccgguucaacggcaucggggucacccagaacgugcucuacgagaaccagaagcugaucgccaaccaguucaacagcgccaucggcaagauccaggacucccugagcuccaccgccagcgcgcucgggaagcugcaggacguggucaaccagaacgcccaggcccugaacacgcucgugaagcagcuguccagcaacuucggcgccaucuccagcgugcugaacgacauccucucccgccuggacaaggucgaggccgaggugcagaucgaccggcugaucaccgggcgccuccagagccugcagaccuacgugacccagcagcugauccgggcggccgagauccgcgccagcgccaaccucgccgcgaccaagauguccgagugcguccugggccagagcaagcggguggacuucugcggcaagggguaccaccugauguccuucccccagagcgccccgcacggcguggucuuccuccacgugacguacguccccgcccaggagaagaacuucaccaccgcccccgcgaucugccacgacgggaaggcccacuucccccgcgagggcguguucguguccaacgggacccacugguucgucacgcagcggaacuucuacgagccgcagaucaucaccaccgacaacaccuucgugagcggcaacugcgacguggucaucggcaucgugaacaacacgguguacgacccccugcagcccgagcuggacuccuucaaggaggagcucgacaaguacuucaagaaccacaccagccccgacgucgaccugggggacaucuccggcaucaacgccagcguggugaacauccagaaggagaucgaccgccugaacgaggucgccaagaaccucaacgagucccugaucgaccugcaggagcucgggaaguacgagcaguacaucaaguggccgugguacaucuggcugggcuucaucgccggccugaucgcgaucgugauggugaccaucaugcucugcugcaugaccagcugcugcuccugccugaaggggugcugcagcugcggcuccugcugcaaguucgacgaggacgacagcgagcccguccugaagggggugaagcuccacuacacguga

SEQ ID NO: 22984 - RNA, 3822 nt, Artificial Sequence
  SARS-CoV-2/Wuhan/WIV05/2019__EPI_ISL_402128 spike protein CDS gc (1-1273)(E484K_D614G)
auguucguguuccugguccuccugccccuggugagcucccagugcgugaaccucaccacccgcacgcagcugccgcccgccuacaccaacagcuucacccggggcgucuacuaccccgacaagguguuccgcuccagcgugcugcacuccacccaggaccucuuccugcccuucuucagcaacgucacgugguuccacgccauccacguguccgggaccaacggcaccaagcgguucgacaacccggugcugcccuucaacgacggggucuacuucgcgagcaccgagaaguccaacaucauccgcggcuggaucuucgggacgacccucgacagcaagacccagucccugcugaucgugaacaacgccaccaacguggucaucaaggugugcgaguuccaguucugcaacgaccccuuccucggcguguacuaccacaagaacaacaagagcuggauggaguccgaguuccgggucuacagcuccgccaacaacugcacguucgaguacgugagccagcccuuccugauggaccuggagggcaagcaggggaacuucaagaaccuccgcgaguucguguucaagaacaucgacggcuacuucaagaucuacuccaagcacaccccgaucaaccugguccgggaccugccccagggguucagcgcccucgagccccugguggaccugcccaucggcaucaacaucacccgcuuccagacccuccuggcccugcaccgguccuaccucacgccgggggacagcagcuccggcuggaccgcgggcgccgccgccuacuacgugggguaccugcagccccgcaccuuccugcucaaguacaacgagaacggcaccaucacggacgcggucgacugcgcccuggacccccugagcgagaccaagugcacccucaaguccuucaccguggagaaggggaucuaccagacgagcaacuuccgggugcagcccaccgaguccaucguccgcuucccgaacaucaccaaccugugccccuucggcgagguguucaacgccacccgguucgccagcgucuacgccuggaaccgcaagcggaucuccaacugcguggcggacuacagcgugcuguacaacuccgccagcuucuccacguucaagugcuacggcgucagccccaccaagcucaacgaccugugcuucaccaacguguacgccgacuccuucgugauccgcggggacgagguccggcagaucgcccccggccagaccgggaagaucgccgacuacaacuacaagcugccggacgacuucacgggcugcgugaucgcguggaacagcaacaaccucgacuccaaggucgggggcaacuacaacuaccuguaccgccuguuccgcaagagcaaccucaagcccuucgagcgggacaucuccaccgagaucuaccaggccggcagcacccccugcaacggggugaagggcuucaacugcuacuucccccugcaguccuacggguuccagccgaccaacggcgugggguaccagcccuaccggguggucgugcugagcuucgagcuccugcacgcccccgccacggugugcggccccaagaaguccaccaaccuggucaagaacaagugcgugaacuucaacuucaacggccucaccgggaccggcgugcugaccgagagcaacaagaaguuccugccguuccagcaguucgggcgcgacaucgccgacacgaccgacgcgguccgcgacccccagacccuggagauccucgacaucacccccugcagcuucggcgggguguccgugaucacgccgggcaccaacaccagcaaccaggucgccgugcuguaccagggcgugaacugcaccgagguccccguggccauccacgccgaccagcugacgcccaccuggcggguguacuccaccggcagcaacgucuuccagacccgcgccgggugccucaucggcgcggagcacgugaacaacuccuacgagugcgacauccccaucggggccggcaucugcgccagcuaccagacgcagaccaacuccccgcggcgcgcccggagcguggcgucccagagcaucaucgccuacaccaugucccugggcgccgagaacagcgucgccuacuccaacaacagcaucgccauccccaccaacuucacgaucuccgugaccaccgagauccugcccgugagcaugaccaagacgagcgucgacugcaccauguacaucugcggggacuccaccgagugcagcaaccuccugcugcaguacggcuccuucugcacccagcucaaccgcgcgcugacggggaucgccguggagcaggacaagaacacccaggagguguucgcccaggucaagcagaucuacaagacgcccccgaucaaggacuucggcggguucaacuucagccagauccugcccgaccccuccaagcccagcaagcgguccuucaucgaggaccuccuguucaacaaggugacccuggccgacgccggcuucaucaagcaguacggcgacugccucggggacaucgcggcccgcgaccugaucugcgcccagaaguucaacggccugaccgugcucccgccccugcugaccgacgagaugaucgcccaguacaccagcgcccuccuggcggggaccaucacguccggcuggaccuucggggccggcgccgcccugcagauccccuucgcgaugcagauggccuaccgguucaacggcaucggggucacccagaacgugcucuacgagaaccagaagcugaucgccaaccaguucaacagcgccaucggcaagauccaggacucccugagcuccaccgccagcgcgcucgggaagcugcaggacguggucaaccagaacgcccaggcccugaacacgcucgugaagcagcuguccagcaacuucggcgccaucuccagcgugcugaacgacauccucucccgccuggacaaggucgaggccgaggugcagaucgaccggcugaucaccgggcgccuccagagccugcagaccuacgugacccagcagcugauccgggcggccgagauccgcgccagcgccaaccucgccgcgaccaagauguccgagugcguccugggccagagcaagcggguggacuucugcggcaagggguaccaccugauguccuucccccagagcgccccgcacggcguggucuuccuccacgugacguacguccccgcccaggagaagaacuucaccaccgcccccgcgaucugccacgacgggaaggcccacuucccccgcgagggcguguucguguccaacgggacccacugguucgucacgcagcggaacuucuacgagccgcagaucaucaccaccgacaacaccuucgugagcggcaacugcgacguggucaucggcaucgugaacaacacgguguacgacccccugcagcccgagcuggacuccuucaaggaggagcucgacaaguacuucaagaaccacaccagccccgacgucgaccugggggacaucuccggcaucaacgccagcguggugaacauccagaaggagaucgaccgccugaacgaggucgccaagaaccucaacgagucccugaucgaccugcaggagcucgggaaguacgagcaguacaucaaguggccgugguacaucuggcugggcuucaucgccggccugaucgcgaucgugauggugaccaucaugcucugcugcaugaccagcugcugcuccugccugaaggggugcugcagcugcggcuccugcugcaaguucgacgaggacgacagcgagcccguccugaagggggugaagcuccacuacacguga

SEQ ID NO: 22985 - RNA, 3822 nt, Artificial Sequence
  SARS-CoV-2/Wuhan/WIV05/2019__EPI_ISL_402128 spike protein CDS gc (1-1273)(L18F_T20N_P26S_D138Y_R190S_K417T_E484K_N501Y_D614G_H655Y _T1027I)
auguucguguuccugguccuccugccccuggugagcucccagugcgugaacuucaccaaccgcacgcagcugccgagcgccuacaccaacagcuucacccggggcgucuacuaccccgacaagguguuccgcuccagcgugcugcacuccacccaggaccucuuccugcccuucuucagcaacgucacgugguuccacgccauccacguguccgggaccaacggcaccaagcgguucgacaacccggugcugcccuucaacgacggggucuacuucgcgagcaccgagaaguccaacaucauccgcggcuggaucuucgggacgacccucgacagcaagacccagucccugcugaucgugaacaacgccaccaacguggucaucaaggugugcgaguuccaguucugcaacuaccccuuccucggcguguacuaccacaagaacaacaagagcuggauggaguccgaguuccgggucuacagcuccgccaacaacugcacguucgaguacgugagccagcccuuccugauggaccuggagggcaagcaggggaacuucaagaaccucagcgaguucguguucaagaacaucgacggcuacuucaagaucuacuccaagcacaccccgaucaaccugguccgggaccugccccagggguucagcgcccucgagccccugguggaccugcccaucggcaucaacaucacccgcuuccagacccuccuggcccugcaccgguccuaccucacgccgggggacagcagcuccggcuggaccgcgggcgccgccgccuacuacgugggguaccugcagccccgcaccuuccugcucaaguacaacgagaacggcaccaucacggacgcggucgacugcgcccuggacccccugagcgagaccaagugcacccucaaguccuucaccguggagaaggggaucuaccagacgagcaacuuccgggugcagcccaccgaguccaucguccgcuucccgaacaucaccaaccugugccccuucggcgagguguucaacgccacccgguucgccagcgucuacgccuggaaccgcaagcggaucuccaacugcguggcggacuacagcgugcuguacaacuccgccagcuucuccacguucaagugcuacggcgucagccccaccaagcucaacgaccugugcuucaccaacguguacgccgacuccuucgugauccgcggggacgagguccggcagaucgcccccggccagaccgggaccaucgccgacuacaacuacaagcugccggacgacuucacgggcugcgugaucgcguggaacagcaacaaccucgacuccaaggucgggggcaacuacaacuaccuguaccgccuguuccgcaagagcaaccucaagcccuucgagcgggacaucuccaccgagaucuaccaggccggcagcacccccugcaacggggugaagggcuucaacugcuacuucccccugcaguccuacggguuccagccgaccuacggcgugggguaccagcccuaccggguggucgugcugagcuucgagcuccugcacgcccccgccacggugugcggccccaagaaguccaccaaccuggucaagaacaagugcgugaacuucaacuucaacggccucaccgggaccggcgugcugaccgagagcaacaagaaguuccugccguuccagcaguucgggcgcgacaucgccgacacgaccgacgcgguccgcgacccccagacccuggagauccucgacaucacccccugcagcuucggcgggguguccgugaucacgccgggcaccaacaccagcaaccaggucgccgugcuguaccagggcgugaacugcaccgagguccccguggccauccacgccgaccagcugacgcccaccuggcggguguacuccaccggcagcaacgucuuccagacccgcgccgggugccucaucggcgcggaguacgugaacaacuccuacgagugcgacauccccaucggggccggcaucugcgccagcuaccagacgcagaccaacuccccgcggcgcgcccggagcguggcgucccagagcaucaucgccuacaccaugucccugggcgccgagaacagcgucgccuacuccaacaacagcaucgccauccccaccaacuucacgaucuccgugaccaccgagauccugcccgugagcaugaccaagacgagcgucgacugcaccauguacaucugcggggacuccaccgagugcagcaaccuccugcugcaguacggcuccuucugcacccagcucaaccgcgcgcugacggggaucgccguggagcaggacaagaacacccaggagguguucgcccaggucaagcagaucuacaagacgcccccgaucaaggacuucggcggguucaacuucagccagauccugcccgaccccuccaagcccagcaagcgguccuucaucgaggaccuccuguucaacaaggugacccuggccgacgccggcuucaucaagcaguacggcgacugccucggggacaucgcggcccgcgaccugaucugcgcccagaaguucaacggccugaccgugcucccgccccugcugaccgacgagaugaucgcccaguacaccagcgcccuccuggcggggaccaucacguccggcuggaccuucggggccggcgccgcccugcagauccccuucgcgaugcagauggccuaccgguucaacggcaucggggucacccagaacgugcucuacgagaaccagaagcugaucgccaaccaguucaacagcgccaucggcaagauccaggacucccugagcuccaccgccagcgcgcucgggaagcugcaggacguggucaaccagaacgcccaggcccugaacacgcucgugaagcagcuguccagcaacuucggcgccaucuccagcgugcugaacgacauccucucccgccuggacaaggucgaggccgaggugcagaucgaccggcugaucaccgggcgccuccagagccugcagaccuacgugacccagcagcugauccgggcggccgagauccgcgccagcgccaaccucgccgcgaucaagauguccgagugcguccugggccagagcaagcggguggacuucugcggcaagggguaccaccugauguccuucccccagagcgccccgcacggcguggucuuccuccacgugacguacguccccgcccaggagaagaacuucaccaccgcccccgcgaucugccacgacgggaaggcccacuucccccgcgagggcguguucguguccaacgggacccacugguucgucacgcagcggaacuucuacgagccgcagaucaucaccaccgacaacaccuucgugagcggcaacugcgacguggucaucggcaucgugaacaacacgguguacgacccccugcagcccgagcuggacuccuucaaggaggagcucgacaaguacuucaagaaccacaccagccccgacgucgaccugggggacaucuccggcaucaacgccagcguggugaacauccagaaggagaucgaccgccugaacgaggucgccaagaaccucaacgagucccugaucgaccugcaggagcucgggaaguacgagcaguacaucaaguggccgugguacaucuggcugggcuucaucgccggccugaucgcgaucgugauggugaccaucaugcucugcugcaugaccagcugcugcuccugccugaaggggugcugcagcugcggcuccugcugcaaguucgacgaggacgacagcgagcccguccugaagggggugaagcuccacuacacguga

SEQ ID NO: 22986 - RNA, 3822 nt, Artificial Sequence
  SARS-CoV-2/Wuhan/WIV05/2019__EPI_ISL_402128 spike protein CDS gc (1-1273)(S13I_W152C_L452R_D614G)
auguucguguuccugguccuccugccccuggugagcauccagugcgugaaccucaccacccgcacgcagcugccgcccgccuacaccaacagcuucacccggggcgucuacuaccccgacaagguguuccgcuccagcgugcugcacuccacccaggaccucuuccugcccuucuucagcaacgucacgugguuccacgccauccacguguccgggaccaacggcaccaagcgguucgacaacccggugcugcccuucaacgacggggucuacuucgcgagcaccgagaaguccaacaucauccgcggcuggaucuucgggacgacccucgacagcaagacccagucccugcugaucgugaacaacgccaccaacguggucaucaaggugugcgaguuccaguucugcaacgaccccuuccucggcguguacuaccacaagaacaacaagagcugcauggaguccgaguuccgggucuacagcuccgccaacaacugcacguucgaguacgugagccagcccuuccugauggaccuggagggcaagcaggggaacuucaagaaccuccgcgaguucguguucaagaacaucgacggcuacuucaagaucuacuccaagcacaccccgaucaaccugguccgggaccugccccagggguucagcgcccucgagccccugguggaccugcccaucggcaucaacaucacccgcuuccagacccuccuggcccugcaccgguccuaccucacgccgggggacagcagcuccggcuggaccgcgggcgccgccgccuacuacgugggguaccugcagccccgcaccuuccugcucaaguacaacgagaacggcaccaucacggacgcggucgacugcgcccuggacccccugagcgagaccaagugcacccucaaguccuucaccguggagaaggggaucuaccagacgagcaacuuccgggugcagcccaccgaguccaucguccgcuucccgaacaucaccaaccugugccccuucggcgagguguucaacgccacccgguucgccagcgucuacgccuggaaccgcaagcggaucuccaacugcguggcggacuacagcgugcuguacaacuccgccagcuucuccacguucaagugcuacggcgucagccccaccaagcucaacgaccugugcuucaccaacguguacgccgacuccuucgugauccgcggggacgagguccggcagaucgcccccggccagaccgggaagaucgccgacuacaacuacaagcugccggacgacuucacgggcugcgugaucgcguggaacagcaacaaccucgacuccaaggucgggggcaacuacaacuaccgcuaccgccuguuccgcaagagcaaccucaagcccuucgagcgggacaucuccaccgagaucuaccaggccggcagcacccccugcaacgggguggagggcuucaacugcuacuucccccugcaguccuacggguuccagccgaccaacggcgugggguaccagcccuaccggguggucgugcugagcuucgagcuccugcacgcccccgccacggugugcggccccaagaaguccaccaaccuggucaagaacaagugcgugaacuucaacuucaacggccucaccgggaccggcgugcugaccgagagcaacaagaaguuccugccguuccagcaguucgggcgcgacaucgccgacacgaccgacgcgguccgcgacccccagacccuggagauccucgacaucacccccugcagcuucggcgggguguccgugaucacgccgggcaccaacaccagcaaccaggucgccgugcuguaccagggcgugaacugcaccgagguccccguggccauccacgccgaccagcugacgcccaccuggcggguguacuccaccggcagcaacgucuuccagacccgcgccgggugccucaucggcgcggagcacgugaacaacuccuacgagugcgacauccccaucggggccggcaucugcgccagcuaccagacgcagaccaacuccccgcggcgcgcccggagcguggcgucccagagcaucaucgccuacaccaugucccugggcgccgagaacagcgucgccuacuccaacaacagcaucgccauccccaccaacuucacgaucuccgugaccaccgagauccugcccgugagcaugaccaagacgagcgucgacugcaccauguacaucugcggggacuccaccgagugcagcaaccuccugcugcaguacggcuccuucugcacccagcucaaccgcgcgcugacggggaucgccguggagcaggacaagaacacccaggagguguucgcccaggucaagcagaucuacaagacgcccccgaucaaggacuucggcggguucaacuucagccagauccugcccgaccccuccaagcccagcaagcgguccuucaucgaggaccuccuguucaacaaggugacccuggccgacgccggcuucaucaagcaguacggcgacugccucggggacaucgcggcccgcgaccugaucugcgcccagaaguucaacggccugaccgugcucccgccccugcugaccgacgagaugaucgcccaguacaccagcgcccuccuggcggggaccaucacguccggcuggaccuucggggccggcgccgcccugcagauccccuucgcgaugcagauggccuaccgguucaacggcaucggggucacccagaacgugcucuacgagaaccagaagcugaucgccaaccaguucaacagcgccaucggcaagauccaggacucccugagcuccaccgccagcgcgcucgggaagcugcaggacguggucaaccagaacgcccaggcccugaacacgcucgugaagcagcuguccagcaacuucggcgccaucuccagcgugcugaacgacauccucucccgccuggacaaggucgaggccgaggugcagaucgaccggcugaucaccgggcgccuccagagccugcagaccuacgugacccagcagcugauccgggcggccgagauccgcgccagcgccaaccucgccgcgaccaagauguccgagugcguccugggccagagcaagcggguggacuucugcggcaagggguaccaccugauguccuucccccagagcgccccgcacggcguggucuuccuccacgugacguacguccccgcccaggagaagaacuucaccaccgcccccgcgaucugccacgacgggaaggcccacuucccccgcgagggcguguucguguccaacgggacccacugguucgucacgcagcggaacuucuacgagccgcagaucaucaccaccgacaacaccuucgugagcggcaacugcgacguggucaucggcaucgugaacaacacgguguacgacccccugcagcccgagcuggacuccuucaaggaggagcucgacaaguacuucaagaaccacaccagccccgacgucgaccugggggacaucuccggcaucaacgccagcguggugaacauccagaaggagaucgaccgccugaacgaggucgccaagaaccucaacgagucccugaucgaccugcaggagcucgggaaguacgagcaguacaucaaguggccgugguacaucuggcugggcuucaucgccggccugaucgcgaucgugauggugaccaucaugcucugcugcaugaccagcugcugcuccugccugaaggggugcugcagcugcggcuccugcugcaaguucgacgaggacgacagcgagcccguccugaagggggugaagcuccacuacacguga

SEQ ID NO: 22987 - RNA, 3822 nt, Artificial Sequence; identical to SEQ ID NO: 136
  SARS-CoV-2/Wuhan/WIV05/2019__EPI_ISL_402128 spike protein CDS gc (1-1273)

SEQ ID NO: 22988 - RNA, 3822 nt, Artificial Sequence; identical to SEQ ID NO: 11739
  SARS-CoV-2/Wuhan/WIV05/2019__EPI_ISL_402128 spike protein CDS gc (1-1273)(D614G)

SEQ ID NO: 22989 - RNA, 3822 nt, Artificial Sequence
  SARS-CoV-2/Wuhan/WIV05/2019__EPI_ISL_402128 spike protein CDS gc (1-1273)(A222V_D614G)
auguucguguuccugguccuccugccccuggugagcucccagugcgugaaccucaccacccgcacgcagcugccgcccgccuacaccaacagcuucacccggggcgucuacuaccccgacaagguguuccgcuccagcgugcugcacuccacccaggaccucuuccugcccuucuucagcaacgucacgugguuccacgccauccacguguccgggaccaacggcaccaagcgguucgacaacccggugcugcccuucaacgacggggucuacuucgcgagcaccgagaaguccaacaucauccgcggcuggaucuucgggacgacccucgacagcaagacccagucccugcugaucgugaacaacgccaccaacguggucaucaaggugugcgaguuccaguucugcaacgaccccuuccucggcguguacuaccacaagaacaacaagagcuggauggaguccgaguuccgggucuacagcuccgccaacaacugcacguucgaguacgugagccagcccuuccugauggaccuggagggcaagcaggggaacuucaagaaccuccgcgaguucguguucaagaacaucgacggcuacuucaagaucuacuccaagcacaccccgaucaaccugguccgggaccugccccagggguucagcgugcucgagccccugguggaccugcccaucggcaucaacaucacccgcuuccagacccuccuggcccugcaccgguccuaccucacgccgggggacagcagcuccggcuggaccgccggcgcggccgccuacuacgucggguaccugcagccccgcaccuuccugcucaaguacaacgagaacggcaccaucacggacgccguggacugcgcgcuggacccccugagcgagaccaagugcacccucaaguccuucaccguggagaaggggaucuaccagacgagcaacuuccggguccagcccaccgaguccaucgugcgcuucccgaacaucaccaaccugugccccuucggcgaggucuucaacgccacccgguucgccagcguguacgccuggaaccgcaagcggaucuccaacugcguggccgacuacagcguccuguacaacuccgcgagcuucuccacguucaagugcuacggcgugagccccaccaagcucaacgaccugugcuucaccaacguguacgccgacuccuucgucauccgcggggacgaggugcggcagaucgcccccggccagaccgggaagaucgccgacuacaacuacaagcugccggacgacuucacgggcugcgugaucgccuggaacagcaacaaccucgacuccaaggucgggggcaacuacaacuaccuguaccgccuguuccgcaagagcaaccucaagcccuucgagcgggacaucuccaccgagaucuaccaggcgggcagcacccccugcaacgggguggagggcuucaacugcuacuucccccugcaguccuacggguuccagccgaccaacggcgugggguaccagcccuaccgggucguggugcugagcuucgagcuccugcacgcccccgccacggucugcggccccaagaaguccaccaaccuggugaagaacaagugcgugaacuucaacuucaacggccucaccgggaccggcguccugaccgagagcaacaagaaguuccugccguuccagcaguucgggcgcgacaucgccgacacgaccgacgccgugcgcgacccccagacccuggagauccucgacaucacccccugcagcuucggcgggguguccgucaucacgccgggcaccaacaccagcaaccagguggcggugcuguaccagggcgucaacugcaccgaggugcccguggccauccacgccgaccagcugacgcccaccuggcgggucuacuccaccgggagcaacguguuccagacccgcgccggcugccucaucggggccgagcacgugaacaacuccuacgagugcgacauccccaucggcgcgggcaucugcgccagcuaccagacgcagaccaacuccccgcggcgcgcccggagcgucgccucccagagcaucaucgcguacaccaugucccugggggccgagaacagcguggccuacuccaacaacagcaucgccauccccaccaacuucacgaucuccgugaccaccgagauccugcccgucagcaugaccaagacgagcguggacugcaccauguacaucugcggcgacuccaccgagugcagcaaccuccugcugcaguacggguccuucugcacccagcucaaccgcgcccugacgggcaucgcgguggagcaggacaagaacacccaggaggucuucgcccaggugaagcagaucuacaagacgcccccgaucaaggacuucgggggcuucaacuucagccagauccugcccgaccccuccaagcccagcaagcgguccuucaucgaggaccuccuguucaacaaggugacccuggccgacgccggcuucaucaagcaguacggggacugccucggcgacaucgccgcgcgcgaccugaucugcgcccagaaguucaacgggcugaccguccucccgccccugcugaccgacgagaugaucgcccaguacaccagcgcccuccuggccggcaccaucacguccggguggaccuucggcgcgggcgccgcccugcagauccccuucgccaugcagauggcguaccgguucaacgggaucggcgugacccagaacgugcucuacgagaaccagaagcugaucgccaaccaguucaacagcgccaucgggaagauccaggacucccugagcuccaccgccagcgcccucggcaagcugcaggacgucgugaaccagaacgcgcaggcccugaacacgcucgugaagcagcuguccagcaacuucggggccaucuccagcguccugaacgacauccucucccgccuggacaagguggaggccgaggugcagaucgaccggcugaucaccggccgccuccagagccugcagaccuacgucacccagcagcugauccgggccgcggagauccgcgccagcgccaaccucgccgccaccaagauguccgagugcgugcugggccagagcaagcggguggacuucugcgggaagggcuaccaccugauguccuucccccagagcgcgccgcacggggucguguuccuccacgucacguacgugcccgcccaggagaagaacuucaccaccgcccccgccaucugccacgacggcaaggcgcacuucccccgcgaggggguguucgucuccaacggcacccacugguucgugacgcagcggaacuucuacgagccgcagaucaucaccaccgacaacaccuucgugagcggcaacugcgacgucgugaucgggaucgugaacaacacggucuacgacccccugcagcccgagcuggacuccuucaaggaggagcucgacaaguacuucaagaaccacaccagccccgacguggaccugggcgacaucuccgggaucaacgccagcguggucaacauccagaaggagaucgaccgccugaacgagguggccaagaaccucaacgagucccugaucgaccugcaggagcucggcaaguacgagcaguacaucaaguggccgugguacaucuggcugggcuucaucgccgggcugaucgccaucgugauggucaccaucaugcucugcugcaugaccagcugcugcuccugccugaagggcugcugcagcugcggguccugcugcaaguucgacgaggacgacagcgagcccgugcugaagggcgugaagcuccacuacacguga

SEQ ID NO: 22990 - RNA, 3822 nt, Artificial Sequence
  SARS-CoV-2/Wuhan/WIV05/2019__EPI_ISL_402128 spike protein CDS gc (1-1273)(N439K_D614G)
auguucguguuccugguccuccugccccuggugagcucccagugcgugaaccucaccacccgcacgcagcugccgcccgccuacaccaacagcuucacccggggcgucuacuaccccgacaagguguuccgcuccagcgugcugcacuccacccaggaccucuuccugcccuucuucagcaacgucacgugguuccacgccauccacguguccgggaccaacggcaccaagcgguucgacaacccggugcugcccuucaacgacggggucuacuucgcgagcaccgagaaguccaacaucauccgcggcuggaucuucgggacgacccucgacagcaagacccagucccugcugaucgugaacaacgccaccaacguggucaucaaggugugcgaguuccaguucugcaacgaccccuuccucggcguguacuaccacaagaacaacaagagcuggauggaguccgaguuccgggucuacagcuccgccaacaacugcacguucgaguacgugagccagcccuuccugauggaccuggagggcaagcaggggaacuucaagaaccuccgcgaguucguguucaagaacaucgacggcuacuucaagaucuacuccaagcacaccccgaucaaccugguccgggaccugccccagggguucagcgcccucgagccccugguggaccugcccaucggcaucaacaucacccgcuuccagacccuccuggcccugcaccgguccuaccucacgccgggggacagcagcuccggcuggaccgcgggcgccgccgccuacuacgugggguaccugcagccccgcaccuuccugcucaaguacaacgagaacggcaccaucacggacgcggucgacugcgcccuggacccccugagcgagaccaagugcacccucaaguccuucaccguggagaaggggaucuaccagacgagcaacuuccgggugcagcccaccgaguccaucguccgcuucccgaacaucaccaaccugugccccuucggcgagguguucaacgccacccgguucgccagcgucuacgccuggaaccgcaagcggaucuccaacugcguggcggacuacagcgugcuguacaacuccgccagcuucuccacguucaagugcuacggcgucagccccaccaagcucaacgaccugugcuucaccaacguguacgccgacuccuucgugauccgcggggacgagguccggcagaucgcccccggccagaccgggaagaucgccgacuacaacuacaagcugccggacgacuucacgggcugcgugaucgcguggaacagcaagaaccucgacuccaaggucgggggcaacuacaacuaccuguaccgccuguuccgcaagagcaaccucaagcccuucgagcgggacaucuccaccgagaucuaccaggccggcagcacccccugcaacgggguggagggcuucaacugcuacuucccccugcaguccuacggguuccagccgaccaacggcgugggguaccagcccuaccggguggucgugcugagcuucgagcuccugcacgcccccgccacggugugcggccccaagaaguccaccaaccuggucaagaacaagugcgugaacuucaacuucaacggccucaccgggaccggcgugcugaccgagagcaacaagaaguuccugccguuccagcaguucgggcgcgacaucgccgacacgaccgacgcgguccgcgacccccagacccuggagauccucgacaucacccccugcagcuucggcgggguguccgugaucacgccgggcaccaacaccagcaaccaggucgccgugcuguaccagggcgugaacugcaccgagguccccguggccauccacgccgaccagcugacgcccaccuggcggguguacuccaccgggagcaacgucuuccagacccgcgccggcugccucaucggggcggagcacgugaacaacuccuacgagugcgacauccccaucggcgccggcaucugcgccagcuaccagacgcagaccaacuccccgcggcgcgcccggagcguggcgucccagagcaucaucgccuacaccaugucccugggggccgagaacagcgucgccuacuccaacaacagcaucgccauccccaccaacuucacgaucuccgugaccaccgagauccugcccgugagcaugaccaagacgagcgucgacugcaccauguacaucugcggcgacuccaccgagugcagcaaccuccugcugcaguacggguccuucugcacccagcucaaccgcgcgcugacgggcaucgccguggagcaggacaagaacacccaggagguguucgcccaggucaagcagaucuacaagacgcccccgaucaaggacuucgggggcuucaacuucagccagauccugcccgaccccuccaagcccagcaagcgguccuucaucgaggaccuccuguucaacaaggugacccuggccgacgccggcuucaucaagcaguacggggacugccucggcgacaucgcggcccgcgaccugaucugcgcccagaaguucaacgggcugaccgugcucccgccccugcugaccgacgagaugaucgcccaguacaccagcgcccuccuggcgggcaccaucacguccggguggaccuucggcgccggcgccgcccugcagauccccuucgcgaugcagauggccuaccgguucaacgggaucggcgucacccagaacgugcucuacgagaaccagaagcugaucgccaaccaguucaacagcgccaucgggaagauccaggacucccugagcuccaccgccagcgcgcucggcaagcugcaggacguggucaaccagaacgcccaggcccugaacacgcucgugaagcagcuguccagcaacuucggggccaucuccagcgugcugaacgacauccucucccgccuggacaaggucgaggccgaggugcagaucgaccggcugaucaccggccgccuccagagccugcagaccuacgugacccagcagcugauccgggcggccgagauccgcgccagcgccaaccucgccgcgaccaagauguccgagugcguccugggccagagcaagcggguggacuucugcgggaagggcuaccaccugauguccuucccccagagcgccccgcacgggguggucuuccuccacgugacguacguccccgcccaggagaagaacuucaccaccgcccccgcgaucugccacgacggcaaggcccacuucccccgcgaggggguguucguguccaacggcacccacugguucgucacgcagcggaacuucuacgagccgcagaucaucaccaccgacaacaccuucgugagcggcaacugcgacguggucaucgggaucgugaacaacacgguguacgacccccugcagcccgagcuggacuccuucaaggaggagcucgacaaguacuucaagaaccacaccagccccgacgucgaccugggcgacaucuccgggaucaacgccagcguggugaacauccagaaggagaucgaccgccugaacgaggucgccaagaaccucaacgagucccugaucgaccugcaggagcucggcaaguacgagcaguacaucaaguggccgugguacaucuggcugggcuucaucgccgggcugaucgcgaucgugauggugaccaucaugcucugcugcaugaccagcugcugcuccugccugaagggcugcugcagcugcggguccugcugcaaguucgacgaggacgacagcgagcccguccugaagggcgugaagcuccacuacacguga

SEQ ID NO: 22991 - RNA, 3822 nt, Artificial Sequence
  SARS-CoV-2/Wuhan/WIV05/2019__EPI_ISL_402128 spike protein CDS gc (1-1273)(S477N_D614G)
auguucguguuccugguccuccugccccuggugagcucccagugcgugaaccucaccacccgcacgcagcugccgcccgccuacaccaacagcuucacccggggcgucuacuaccccgacaagguguuccgcuccagcgugcugcacuccacccaggaccucuuccugcccuucuucagcaacgucacgugguuccacgccauccacguguccgggaccaacggcaccaagcgguucgacaacccggugcugcccuucaacgacggggucuacuucgcgagcaccgagaaguccaacaucauccgcggcuggaucuucgggacgacccucgacagcaagacccagucccugcugaucgugaacaacgccaccaacguggucaucaaggugugcgaguuccaguucugcaacgaccccuuccucggcguguacuaccacaagaacaacaagagcuggauggaguccgaguuccgggucuacagcuccgccaacaacugcacguucgaguacgugagccagcccuuccugauggaccuggagggcaagcaggggaacuucaagaaccuccgcgaguucguguucaagaacaucgacggcuacuucaagaucuacuccaagcacaccccgaucaaccugguccgggaccugccccagggguucagcgcccucgagccccugguggaccugcccaucggcaucaacaucacccgcuuccagacccuccuggcccugcaccgguccuaccucacgccgggggacagcagcuccggcuggaccgcgggcgccgccgccuacuacgugggguaccugcagccccgcaccuuccugcucaaguacaacgagaacggcaccaucacggacgcggucgacugcgcccuggacccccugagcgagaccaagugcacccucaaguccuucaccguggagaaggggaucuaccagacgagcaacuuccgggugcagcccaccgaguccaucguccgcuucccgaacaucaccaaccugugccccuucggcgagguguucaacgccacccgguucgccagcgucuacgccuggaaccgcaagcggaucuccaacugcguggcggacuacagcgugcuguacaacuccgccagcuucuccacguucaagugcuacggcgucagccccaccaagcucaacgaccugugcuucaccaacguguacgccgacuccuucgugauccgcggggacgagguccggcagaucgcccccggccagaccgggaagaucgccgacuacaacuacaagcugccggacgacuucacgggcugcgugaucgcguggaacagcaacaaccucgacuccaaggucgggggcaacuacaacuaccuguaccgccuguuccgcaagagcaaccucaagcccuucgagcgggacaucuccaccgagaucuaccaggccggcaacacccccugcaacgggguggagggcuucaacugcuacuucccccugcagagcuacggguuccagccgaccaacggcgugggguaccagcccuaccggguggucgugcuguccuucgagcuccugcacgcccccgccacggugugcggccccaagaaguccaccaaccuggucaagaacaagugcgugaacuucaacuucaacggccucaccgggaccggcgugcugaccgagagcaacaagaaguuccugccguuccagcaguucgggcgcgacaucgccgacacgaccgacgcgguccgcgacccccagacccuggagauccucgacaucacccccugcagcuucggcggggugagcgugaucacgccgggcaccaacaccuccaaccaggucgccgugcuguaccagggcgugaacugcaccgagguccccguggccauccacgccgaccagcugacgcccaccuggcggguguacagcaccggguccaacgucuuccagacccgcgccggcugccucaucggggcggagcacgugaacaacagcuacgagugcgacauccccaucggcgccggcaucugcgccuccuaccagacgcagaccaacagcccgcggcgcgcccgguccguggcgagccaguccaucaucgccuacaccaugagccugggggccgagaacuccgucgccuacagcaacaacuccaucgccauccccaccaacuucacgaucagcgugaccaccgagauccugcccguguccaugaccaagacgagcgucgacugcaccauguacaucugcggcgacagcaccgagugcuccaaccuccugcugcaguacgggagcuucugcacccagcucaaccgcgcgcugacgggcaucgccguggagcaggacaagaacacccaggagguguucgcccaggucaagcagaucuacaagacgcccccgaucaaggacuucgggggcuucaacuucucccagauccugcccgaccccagcaagcccuccaagcggagcuucaucgaggaccuccuguucaacaaggugacccuggccgacgccggcuucaucaagcaguacggggacugccucggcgacaucgcggcccgcgaccugaucugcgcccagaaguucaacgggcugaccgugcucccgccccugcugaccgacgagaugaucgcccaguacaccuccgcccuccuggcgggcaccaucacgagcggguggaccuucggcgccggcgccgcccugcagauccccuucgcgaugcagauggccuaccgguucaacgggaucggcgucacccagaacgugcucuacgagaaccagaagcugaucgccaaccaguucaacuccgccaucgggaagauccaggacagccuguccagcaccgccuccgcgcucggcaagcugcaggacguggucaaccagaacgcccaggcccugaacacgcucgugaagcagcugagcuccaacuucggggccaucagcuccgugcugaacgacauccucagccgccuggacaaggucgaggccgaggugcagaucgaccggcugaucaccggccgccuccagucccugcagaccuacgugacccagcagcugauccgggcggccgagauccgcgccagcgccaaccucgccgcgaccaagaugagcgagugcguccugggccaguccaagcggguggacuucugcgggaagggcuaccaccugaugagcuucccccaguccgccccgcacgggguggucuuccuccacgugacguacguccccgcccaggagaagaacuucaccaccgcccccgcgaucugccacgacggcaaggcccacuucccccgcgaggggguguucgugagcaacggcacccacugguucgucacgcagcggaacuucuacgagccgcagaucaucaccaccgacaacaccuucguguccggcaacugcgacguggucaucgggaucgugaacaacacgguguacgacccccugcagcccgagcuggacagcuucaaggaggagcucgacaaguacuucaagaaccacaccucccccgacgucgaccugggcgacaucagcgggaucaacgccuccguggugaacauccagaaggagaucgaccgccugaacgaggucgccaagaaccucaacgagagccugaucgaccugcaggagcucggcaaguacgagcaguacaucaaguggccgugguacaucuggcugggcuucaucgccgggcugaucgcgaucgugauggugaccaucaugcucugcugcaugaccuccugcugcagcugccugaagggcugcugcuccugcgggagcugcugcaaguucgacgaggacgacuccgagcccguccugaagggcgugaagcuccacuacacguga

SEQ ID NO: 22992 - RNA, 3822 nt, Artificial Sequence
  SARS-CoV-2/Wuhan/WIV05/2019__EPI_ISL_402128 spike protein CDS gc (1-1273)(N501Y_D614G)
auguucguguuccugguccuccugccccuggugagcucccagugcgugaaccucaccacccgcacgcagcugccgcccgccuacaccaacagcuucacccggggcgucuacuaccccgacaagguguuccgcuccagcgugcugcacuccacccaggaccucuuccugcccuucuucagcaacgucacgugguuccacgccauccacguguccgggaccaacggcaccaagcgguucgacaacccggugcugcccuucaacgacggggucuacuucgcgagcaccgagaaguccaacaucauccgcggcuggaucuucgggacgacccucgacagcaagacccagucccugcugaucgugaacaacgccaccaacguggucaucaaggugugcgaguuccaguucugcaacgaccccuuccucggcguguacuaccacaagaacaacaagagcuggauggaguccgaguuccgggucuacagcuccgccaacaacugcacguucgaguacgugagccagcccuuccugauggaccuggagggcaagcaggggaacuucaagaaccuccgcgaguucguguucaagaacaucgacggcuacuucaagaucuacuccaagcacaccccgaucaaccugguccgggaccugccccagggguucagcgcccucgagccccugguggaccugcccaucggcaucaacaucacccgcuuccagacccuccuggcccugcaccgguccuaccucacgccgggggacagcagcuccggcuggaccgcgggcgccgccgccuacuacgugggguaccugcagccccgcaccuuccugcucaaguacaacgagaacggcaccaucacggacgcggucgacugcgcccuggacccccugagcgagaccaagugcacccucaaguccuucaccguggagaaggggaucuaccagacgagcaacuuccgggugcagcccaccgaguccaucguccgcuucccgaacaucaccaaccugugccccuucggcgagguguucaacgccacccgguucgccagcgucuacgccuggaaccgcaagcggaucuccaacugcguggcggacuacagcgugcuguacaacuccgccagcuucuccacguucaagugcuacggcgucagccccaccaagcucaacgaccugugcuucaccaacguguacgccgacuccuucgugauccgcggggacgagguccggcagaucgcccccggccagaccgggaagaucgccgacuacaacuacaagcugccggacgacuucacgggcugcgugaucgcguggaacagcaacaaccucgacuccaaggucgggggcaacuacaacuaccuguaccgccuguuccgcaagagcaaccucaagcccuucgagcgggacaucuccaccgagaucuaccaggccggcagcacccccugcaacgggguggagggcuucaacugcuacuucccccugcaguccuacggguuccagccgaccuacggcgugggguaccagcccuaccggguggucgugcugagcuucgagcuccugcacgcccccgccacggugugcggccccaagaaguccaccaaccuggucaagaacaagugcgugaacuucaacuucaacggccucaccgggaccggcgugcugaccgagagcaacaagaaguuccugccguuccagcaguucgggcgcgacaucgccgacacgaccgacgcgguccgcgacccccagacccuggagauccucgacaucacccccugcagcuucggcgggguguccgugaucacgccgggcaccaacaccagcaaccaggucgccgugcuguaccagggcgugaacugcaccgagguccccguggccauccacgccgaccagcugacgcccaccuggcggguguacuccaccgggagcaacgucuuccagacccgcgccggcugccucaucggggcggagcacgugaacaacuccuacgagugcgacauccccaucggcgccggcaucugcgccagcuaccagacgcagaccaacuccccgcggcgcgcccggagcguggcgucccagagcaucaucgccuacaccaugucccugggggccgagaacagcgucgccuacuccaacaacagcaucgccauccccaccaacuucacgaucuccgugaccaccgagauccugcccgugagcaugaccaagacgagcgucgacugcaccauguacaucugcggcgacuccaccgagugcagcaaccuccugcugcaguacggguccuucugcacccagcucaaccgcgcgcugacgggcaucgccguggagcaggacaagaacacccaggagguguucgcccaggucaagcagaucuacaagacgcccccgaucaaggacuucgggggcuucaacuucagccagauccugcccgaccccuccaagcccagcaagcgguccuucaucgaggaccuccuguucaacaaggugacccuggccgacgccggcuucaucaagcaguacggggacugccucggcgacaucgcggcccgcgaccugaucugcgcccagaaguucaacgggcugaccgugcucccgccccugcugaccgacgagaugaucgcccaguacaccagcgcccuccuggcgggcaccaucacguccggguggaccuucggcgccggcgccgcccugcagauccccuucgcgaugcagauggccuaccgguucaacgggaucggcgucacccagaacgugcucuacgagaaccagaagcugaucgccaaccaguucaacagcgccaucgggaagauccaggacucccugagcuccaccgccagcgcgcucggcaagcugcaggacguggucaaccagaacgcccaggcccugaacacgcucgugaagcagcuguccagcaacuucggggccaucuccagcgugcugaacgacauccucucccgccuggacaaggucgaggccgaggugcagaucgaccggcugaucaccggccgccuccagagccugcagaccuacgugacccagcagcugauccgggcggccgagauccgcgccagcgccaaccucgccgcgaccaagauguccgagugcguccugggccagagcaagcggguggacuucugcgggaagggcuaccaccugauguccuucccccagagcgccccgcacgggguggucuuccuccacgugacguacguccccgcccaggagaagaacuucaccaccgcccccgcgaucugccacgacggcaaggcccacuucccccgcgaggggguguucguguccaacggcacccacugguucgucacgcagcggaacuucuacgagccgcagaucaucaccaccgacaacaccuucgugagcggcaacugcgacguggucaucgggaucgugaacaacacgguguacgacccccugcagcccgagcuggacuccuucaaggaggagcucgacaaguacuucaagaaccacaccagccccgacgucgaccugggcgacaucuccgggaucaacgccagcguggugaacauccagaaggagaucgaccgccugaacgaggucgccaagaaccucaacgagucccugaucgaccugcaggagcucggcaaguacgagcaguacaucaaguggccgugguacaucuggcugggcuucaucgccgggcugaucgcgaucgugauggugaccaucaugcucugcugcaugaccagcugcugcuccugccugaagggcugcugcagcugcggguccugcugcaaguucgacgaggacgacagcgagcccguccugaagggcgugaagcuccacuacacguga

SEQ ID NO: 22993 - RNA, 3816 nt, Artificial Sequence
  SARS-CoV-2/Wuhan/WIV05/2019__EPI_ISL_402128 spike protein CDS gc (1-1273)(H69del_V70del_D614G)
auguucguguuccugguccuccugccccuggugagcucccagugcgugaaccucaccacccgcacgcagcugccgcccgccuacaccaacagcuucacccggggcgucuacuaccccgacaagguguuccgcuccagcgugcugcacuccacccaggaccucuuccugcccuucuucagcaacgucacgugguuccacgccaucuccgggaccaacggcaccaagcgguucgacaacccggugcugcccuucaacgacgggguguacuucgcgagcaccgagaaguccaacaucauccgcggcuggaucuucgggacgacccucgacagcaagacccagucccugcugaucgucaacaacgccaccaacguggugaucaaggucugcgaguuccaguucugcaacgaccccuuccucggcguguacuaccacaagaacaacaagagcuggauggaguccgaguuccggguguacagcuccgccaacaacugcacguucgaguacgucagccagcccuuccugauggaccuggagggcaagcaggggaacuucaagaaccuccgcgaguucguguucaagaacaucgacggcuacuucaagaucuacuccaagcacaccccgaucaaccuggugcgggaccugccccagggguucagcgcccucgagccccuggucgaccugcccaucggcaucaacaucacccgcuuccagacccuccuggcccugcaccgguccuaccucacgccgggggacagcagcuccggcuggaccgcgggcgccgccgccuacuacgugggguaccugcagccccgcaccuuccugcucaaguacaacgagaacggcaccaucacggacgcgguggacugcgcccuggacccccugagcgagaccaagugcacccucaaguccuucaccgucgagaaggggaucuaccagacgagcaacuuccgggugcagcccaccgaguccaucgugcgcuucccgaacaucaccaaccugugccccuucggcgaggucuucaacgccacccgguucgccagcguguacgccuggaaccgcaagcggaucuccaacugcgucgcggacuacagcgugcuguacaacuccgccagcuucuccacguucaagugcuacggcgugagccccaccaagcucaacgaccugugcuucaccaacgucuacgccgacuccuucgugauccgcggggacgaggugcggcagaucgcccccggccagaccgggaagaucgccgacuacaacuacaagcugccggacgacuucacgggcugcgucaucgcguggaacagcaacaaccucgacuccaaggucgggggcaacuacaacuaccuguaccgccuguuccgcaagagcaaccucaagcccuucgagcgggacaucuccaccgagaucuaccaggccggcagcacccccugcaacgggguggagggcuucaacugcuacuucccccugcaguccuacggguuccagccgaccaacggcgugggguaccagcccuaccggguggugguccugagcuucgagcuccugcacgcccccgccacggugugcggccccaagaaguccaccaaccuggugaagaacaagugcgucaacuucaacuucaacggccucaccgggaccggcgugcugaccgagagcaacaagaaguuccugccguuccagcaguucgggcgcgacaucgccgacacgaccgacgcggugcgcgacccccagacccuggagauccucgacaucacccccugcagcuucggcggggucuccgugaucacgccgggcaccaacaccagcaaccagguggccguccuguaccagggcgugaacugcaccgaggugcccgucgccauccacgccgaccagcugacgcccaccuggcggguguacuccaccgggagcaacguguuccagacccgcgccggcugccucaucggggcggagcacgucaacaacuccuacgagugcgacauccccaucggcgccggcaucugcgccagcuaccagacgcagaccaacuccccgcggcgcgcccggagcguggcgucccagagcaucaucgccuacaccaugucccugggggccgagaacagcguggccuacuccaacaacagcaucgccauccccaccaacuucacgaucuccgucaccaccgagauccugcccgugagcaugaccaagacgagcguggacugcaccauguacaucugcggcgacuccaccgagugcagcaaccuccugcugcaguacggguccuucugcacccagcucaaccgcgcgcugacgggcaucgccgucgagcaggacaagaacacccaggagguguucgcccaggugaagcagaucuacaagacgcccccgaucaaggacuucgggggcuucaacuucagccagauccugcccgaccccuccaagcccagcaagcgguccuucaucgaggaccuccuguucaacaaggucacccuggccgacgccggcuucaucaagcaguacggggacugccucggcgacaucgcggcccgcgaccugaucugcgcccagaaguucaacgggcugaccgugcucccgccccugcugaccgacgagaugaucgcccaguacaccagcgcccuccuggcgggcaccaucacguccggguggaccuucggcgccggcgccgcccugcagauccccuucgcgaugcagauggccuaccgguucaacgggaucggcgugacccagaacguccucuacgagaaccagaagcugaucgccaaccaguucaacagcgccaucgggaagauccaggacucccugagcuccaccgccagcgcgcucggcaagcugcaggacguggugaaccagaacgcccaggcccugaacacgcucgucaagcagcuguccagcaacuucggggccaucuccagcgugcugaacgacauccucucccgccuggacaagguggaggccgagguccagaucgaccggcugaucaccggccgccuccagagccugcagaccuacgugacccagcagcugauccgggcggccgagauccgcgccagcgccaaccucgccgcgaccaagauguccgagugcgugcugggccagagcaagcgggucgacuucugcgggaagggcuaccaccugauguccuucccccagagcgccccgcacggggugguguuccuccacgucacguacgugcccgcccaggagaagaacuucaccaccgcccccgcgaucugccacgacggcaaggcccacuucccccgcgagggggucuucguguccaacggcacccacugguucgugacgcagcggaacuucuacgagccgcagaucaucaccaccgacaacaccuucgucagcggcaacugcgacguggugaucgggaucgucaacaacacgguguacgacccccugcagcccgagcuggacuccuucaaggaggagcucgacaaguacuucaagaaccacaccagccccgacguggaccugggcgacaucuccgggaucaacgccagcgucgugaacauccagaaggagaucgaccgccugaacgagguggccaagaaccucaacgagucccugaucgaccugcaggagcucggcaaguacgagcaguacaucaaguggccgugguacaucuggcugggcuucaucgccgggcugaucgcgaucgucauggugaccaucaugcucugcugcaugaccagcugcugcuccugccugaagggcugcugcagcugcggguccugcugcaaguucgacgaggacgacagcgagcccgugcugaagggcgucaagcuccacuacacguga

SEQ ID NO: 22994 - RNA, 3822 nt, Artificial Sequence
  SARS-CoV-2/Wuhan/WIV05/2019__EPI_ISL_402128 spike protein CDS gc (1-1273)(Y453F_D614G)
auguucguguuccugguccuccugccccuggugagcucccagugcgugaaccucaccacccgcacgcagcugccgcccgccuacaccaacagcuucacccggggcgucuacuaccccgacaagguguuccgcuccagcgugcugcacuccacccaggaccucuuccugcccuucuucagcaacgucacgugguuccacgccauccacguguccgggaccaacggcaccaagcgguucgacaacccggugcugcccuucaacgacggggucuacuucgcgagcaccgagaaguccaacaucauccgcggcuggaucuucgggacgacccucgacagcaagacccagucccugcugaucgugaacaacgccaccaacguggucaucaaggugugcgaguuccaguucugcaacgaccccuuccucggcguguacuaccacaagaacaacaagagcuggauggaguccgaguuccgggucuacagcuccgccaacaacugcacguucgaguacgugagccagcccuuccugauggaccuggagggcaagcaggggaacuucaagaaccuccgcgaguucguguucaagaacaucgacggcuacuucaagaucuacuccaagcacaccccgaucaaccugguccgggaccugccccagggguucagcgcccucgagccccugguggaccugcccaucggcaucaacaucacccgcuuccagacccuccuggcccugcaccgguccuaccucacgccgggggacagcagcuccggcuggaccgcgggcgccgccgccuacuacgugggguaccugcagccccgcaccuuccugcucaaguacaacgagaacggcaccaucacggacgcggucgacugcgcccuggacccccugagcgagaccaagugcacccucaaguccuucaccguggagaaggggaucuaccagacgagcaacuuccgggugcagcccaccgaguccaucguccgcuucccgaacaucaccaaccugugccccuucggcgagguguucaacgccacccgguucgccagcgucuacgccuggaaccgcaagcggaucuccaacugcguggcggacuacagcgugcuguacaacuccgccagcuucuccacguucaagugcuacggcgucagccccaccaagcucaacgaccugugcuucaccaacguguacgccgacuccuucgugauccgcggggacgagguccggcagaucgcccccggccagaccgggaagaucgccgacuacaacuacaagcugccggacgacuucacgggcugcgugaucgcguggaacagcaacaaccucgacuccaaggucgggggcaacuacaacuaccuguuccgccuguuccgcaagagcaaccucaagcccuucgagcgggacaucuccaccgagaucuaccaggccggcagcacccccugcaacgggguggagggcuucaacugcuacuucccccugcaguccuacggguuccagccgaccaacggcgugggguaccagcccuaccggguggucgugcugagcuucgagcuccugcacgcccccgccacggugugcggccccaagaaguccaccaaccuggucaagaacaagugcgugaacuucaacuucaacggccucaccgggaccggcgugcugaccgagagcaacaagaaguuccugccguuccagcaguucgggcgcgacaucgccgacacgaccgacgcgguccgcgacccccagacccuggagauccucgacaucacccccugcagcuucggcgggguguccgugaucacgccgggcaccaacaccagcaaccaggucgccgugcuguaccagggcgugaacugcaccgagguccccguggccauccacgccgaccagcugacgcccaccuggcggguguacuccaccgggagcaacgucuuccagacccgcgccggcugccucaucggggcggagcacgugaacaacuccuacgagugcgacauccccaucggcgccggcaucugcgccagcuaccagacgcagaccaacuccccgcggcgcgcccggagcguggcgucccagagcaucaucgccuacaccaugucccugggggccgagaacagcgucgccuacuccaacaacagcaucgccauccccaccaacuucacgaucuccgugaccaccgagauccugcccgugagcaugaccaagacgagcgucgacugcaccauguacaucugcggcgacuccaccgagugcagcaaccuccugcugcaguacggguccuucugcacccagcucaaccgcgcgcugacgggcaucgccguggagcaggacaagaacacccaggagguguucgcccaggucaagcagaucuacaagacgcccccgaucaaggacuucgggggcuucaacuucagccagauccugcccgaccccuccaagcccagcaagcgguccuucaucgaggaccuccuguucaacaaggugacccuggccgacgccggcuucaucaagcaguacggggacugccucggcgacaucgcggcccgcgaccugaucugcgcccagaaguucaacgggcugaccgugcucccgccccugcugaccgacgagaugaucgcccaguacaccagcgcccuccuggcgggcaccaucacguccggguggaccuucggcgccggcgccgcccugcagauccccuucgcgaugcagauggccuaccgguucaacgggaucggcgucacccagaacgugcucuacgagaaccagaagcugaucgccaaccaguucaacagcgccaucgggaagauccaggacucccugagcuccaccgccagcgcgcucggcaagcugcaggacguggucaaccagaacgcccaggcccugaacacgcucgugaagcagcuguccagcaacuucggggccaucuccagcgugcugaacgacauccucucccgccuggacaaggucgaggccgaggugcagaucgaccggcugaucaccggccgccuccagagccugcagaccuacgugacccagcagcugauccgggcggccgagauccgcgccagcgccaaccucgccgcgaccaagauguccgagugcguccugggccagagcaagcggguggacuucugcgggaagggcuaccaccugauguccuucccccagagcgccccgcacgggguggucuuccuccacgugacguacguccccgcccaggagaagaacuucaccaccgcccccgcgaucugccacgacggcaaggcccacuucccccgcgaggggguguucguguccaacggcacccacugguucgucacgcagcggaacuucuacgagccgcagaucaucaccaccgacaacaccuucgugagcggcaacugcgacguggucaucgggaucgugaacaacacgguguacgacccccugcagcccgagcuggacuccuucaaggaggagcucgacaaguacuucaagaaccacaccagccccgacgucgaccugggcgacaucuccgggaucaacgccagcguggugaacauccagaaggagaucgaccgccugaacgaggucgccaagaaccucaacgagucccugaucgaccugcaggagcucggcaaguacgagcaguacaucaaguggccgugguacaucuggcugggcuucaucgccgggcugaucgcgaucgugauggugaccaucaugcucugcugcaugaccagcugcugcuccugccugaagggcugcugcagcugcggguccugcugcaaguucgacgaggacgacagcgagcccguccugaagggcgugaagcuccacuacacguga

SEQ ID NO: 22995 - RNA, 3822 nt, Artificial Sequence
  SARS-CoV-2/Wuhan/WIV05/2019__EPI_ISL_402128 spike protein CDS gc (1-1273)(D614G_I692V)
auguucguguuccugguccuccugccccuggugagcucccagugcgugaaccucaccacccgcacgcagcugccgcccgccuacaccaacagcuucacccggggcgucuacuaccccgacaagguguuccgcuccagcgugcugcacuccacccaggaccucuuccugcccuucuucagcaacgucacgugguuccacgccauccacguguccgggaccaacggcaccaagcgguucgacaacccggugcugcccuucaacgacggggucuacuucgcgagcaccgagaaguccaacaucauccgcggcuggaucuucgggacgacccucgacagcaagacccagucccugcugaucgugaacaacgccaccaacguggucaucaaggugugcgaguuccaguucugcaacgaccccuuccucggcguguacuaccacaagaacaacaagagcuggauggaguccgaguuccgggucuacagcuccgccaacaacugcacguucgaguacgugagccagcccuuccugauggaccuggagggcaagcaggggaacuucaagaaccuccgcgaguucguguucaagaacaucgacggcuacuucaagaucuacuccaagcacaccccgaucaaccugguccgggaccugccccagggguucagcgcccucgagccccugguggaccugcccaucggcaucaacaucacccgcuuccagacccuccuggcccugcaccgguccuaccucacgccgggggacagcagcuccggcuggaccgcgggcgccgccgccuacuacgugggguaccugcagccccgcaccuuccugcucaaguacaacgagaacggcaccaucacggacgcggucgacugcgcccuggacccccugagcgagaccaagugcacccucaaguccuucaccguggagaaggggaucuaccagacgagcaacuuccgggugcagcccaccgaguccaucguccgcuucccgaacaucaccaaccugugccccuucggcgagguguucaacgccacccgguucgccagcgucuacgccuggaaccgcaagcggaucuccaacugcguggcggacuacagcgugcuguacaacuccgccagcuucuccacguucaagugcuacggcgucagccccaccaagcucaacgaccugugcuucaccaacguguacgccgacuccuucgugauccgcggggacgagguccggcagaucgcccccggccagaccgggaagaucgccgacuacaacuacaagcugccggacgacuucacgggcugcgugaucgcguggaacagcaacaaccucgacuccaaggucgggggcaacuacaacuaccuguaccgccuguuccgcaagagcaaccucaagcccuucgagcgggacaucuccaccgagaucuaccaggccggcagcacccccugcaacgggguggagggcuucaacugcuacuucccccugcaguccuacggguuccagccgaccaacggcgugggguaccagcccuaccggguggucgugcugagcuucgagcuccugcacgcccccgccacggugugcggccccaagaaguccaccaaccuggucaagaacaagugcgugaacuucaacuucaacggccucaccgggaccggcgugcugaccgagagcaacaagaaguuccugccguuccagcaguucgggcgcgacaucgccgacacgaccgacgcgguccgcgacccccagacccuggagauccucgacaucacccccugcagcuucggcgggguguccgugaucacgccgggcaccaacaccagcaaccaggucgccgugcuguaccagggcgugaacugcaccgagguccccguggccauccacgccgaccagcugacgcccaccuggcggguguacuccaccgggagcaacgucuuccagacccgcgccggcugccucaucggggcggagcacgugaacaacuccuacgagugcgacauccccaucggcgccggcaucugcgccagcuaccagacgcagaccaacuccccgcggcgcgcccggagcguggcgucccagagcgucaucgccuacaccaugucccugggggccgagaacagcguggccuacuccaacaacagcaucgccauccccaccaacuucacgaucuccgugaccaccgagauccugcccgucagcaugaccaagacgagcguggacugcaccauguacaucugcggcgacuccaccgagugcagcaaccuccugcugcaguacggguccuucugcacccagcucaaccgcgcgcugacgggcaucgccguggagcaggacaagaacacccaggaggucuucgcccaggugaagcagaucuacaagacgcccccgaucaaggacuucgggggcuucaacuucagccagauccugcccgaccccuccaagcccagcaagcgguccuucaucgaggaccuccuguucaacaaggugacccuggccgacgccggcuucaucaagcaguacggggacugccucggcgacaucgcggcccgcgaccugaucugcgcccagaaguucaacgggcugaccguccucccgccccugcugaccgacgagaugaucgcccaguacaccagcgcccuccuggcgggcaccaucacguccggguggaccuucggcgccggcgccgcccugcagauccccuucgcgaugcagauggccuaccgguucaacgggaucggcgugacccagaacgugcucuacgagaaccagaagcugaucgccaaccaguucaacagcgccaucgggaagauccaggacucccugagcuccaccgccagcgcgcucggcaagcugcaggacgucgugaaccagaacgcccaggcccugaacacgcucgugaagcagcuguccagcaacuucggggccaucuccagcguccugaacgacauccucucccgccuggacaagguggaggccgaggugcagaucgaccggcugaucaccggccgccuccagagccugcagaccuacgucacccagcagcugauccgggcggccgagauccgcgccagcgccaaccucgccgcgaccaagauguccgagugcgugcugggccagagcaagcggguggacuucugcgggaagggcuaccaccugauguccuucccccagagcgccccgcacggggucguguuccuccacgucacguacgugcccgcccaggagaagaacuucaccaccgcccccgcgaucugccacgacggcaaggcccacuucccccgcgaggggguguucgucuccaacggcacccacugguucgugacgcagcggaacuucuacgagccgcagaucaucaccaccgacaacaccuucgugagcggcaacugcgacgucgugaucgggaucgugaacaacacggucuacgacccccugcagcccgagcuggacuccuucaaggaggagcucgacaaguacuucaagaaccacaccagccccgacguggaccugggcgacaucuccgggaucaacgccagcguggucaacauccagaaggagaucgaccgccugaacgagguggccaagaaccucaacgagucccugaucgaccugcaggagcucggcaaguacgagcaguacaucaaguggccgugguacaucuggcugggcuucaucgccgggcugaucgcgaucgugauggucaccaucaugcucugcugcaugaccagcugcugcuccugccugaagggcugcugcagcugcggguccugcugcaaguucgacgaggacgacagcgagcccgugcugaagggcgugaagcuccacuacacguga

SEQ ID NO: 22996 - RNA, 3822 nt, Artificial Sequence; identical to SEQ ID NO: 11784
  SARS-CoV-2/Wuhan/WIV05/2019__EPI_ISL_402128 spike protein CDS gc (1-1273)(D614G_M1229I)

SEQ ID NO: 22997 - RNA, 3816 nt, Artificial Sequence
  SARS-CoV-2/Wuhan/WIV05/2019__EPI_ISL_402128 spike protein CDS gc (1-1273)(H69del_V70del_A222V_Y453F_S477N_D614G_I692V)
auguucguguuccugguccuccugccccuggugagcucccagugcgugaaccucaccacccgcacgcagcugccgcccgccuacaccaacagcuucacccggggcgucuacuaccccgacaagguguuccgcuccagcgugcugcacuccacccaggaccucuuccugcccuucuucagcaacgucacgugguuccacgccaucuccgggaccaacggcaccaagcgguucgacaacccggugcugcccuucaacgacgggguguacuucgcgagcaccgagaaguccaacaucauccgcggcuggaucuucgggacgacccucgacagcaagacccagucccugcugaucgucaacaacgccaccaacguggugaucaaggucugcgaguuccaguucugcaacgaccccuuccucggcguguacuaccacaagaacaacaagagcuggauggaguccgaguuccggguguacagcuccgccaacaacugcacguucgaguacgucagccagcccuuccugauggaccuggagggcaagcaggggaacuucaagaaccuccgcgaguucguguucaagaacaucgacggcuacuucaagaucuacuccaagcacaccccgaucaaccuggugcgggaccugccccagggguucagcguccucgagccccugguggaccugcccaucggcaucaacaucacccgcuuccagacccuccuggcccugcaccgguccuaccucacgccgggggacagcagcuccggcuggaccgccggcgcggccgccuacuacgugggguaccugcagccccgcaccuuccugcucaaguacaacgagaacggcaccaucacggacgccgucgacugcgcgcuggacccccugagcgagaccaagugcacccucaaguccuucaccguggagaaggggaucuaccagacgagcaacuuccgggugcagcccaccgaguccaucguccgcuucccgaacaucaccaaccugugccccuucggcgagguguucaacgccacccgguucgccagcgucuacgccuggaaccgcaagcggaucuccaacugcguggccgacuacagcgugcuguacaacuccgcgagcuucuccacguucaagugcuacggcgucagccccaccaagcucaacgaccugugcuucaccaacguguacgccgacuccuucgugauccgcggggacgagguccggcagaucgcccccggccagaccgggaagaucgccgacuacaacuacaagcugccggacgacuucacgggcugcgugaucgccuggaacagcaacaaccucgacuccaaggucgggggcaacuacaacuaccuguuccgccuguuccgcaagagcaaccucaagcccuucgagcgggacaucuccaccgagaucuaccaggcgggcaacacccccugcaacgggguggagggcuucaacugcuacuucccccugcagagcuacggguuccagccgaccaacggcgugggguaccagcccuaccggguggucgugcuguccuucgagcuccugcacgcccccgccacggugugcggccccaagaaguccaccaaccuggucaagaacaagugcgugaacuucaacuucaacggccucaccgggaccggcgugcugaccgagagcaacaagaaguuccugccguuccagcaguucgggcgcgacaucgccgacacgaccgacgccguccgcgacccccagacccuggagauccucgacaucacccccugcagcuucggcggggugagcgugaucacgccgggcaccaacaccuccaaccaggucgcggugcuguaccagggcgugaacugcaccgagguccccguggccauccacgccgaccagcugacgcccaccuggcggguguacagcaccggguccaacgucuuccagacccgcgccggcugccucaucggggccgagcacgugaacaacagcuacgagugcgacauccccaucggcgcgggcaucugcgccuccuaccagacgcagaccaacagcccgcggcgcgcccgguccguggccagccaguccgucaucgcguacaccaugagccugggggccgagaacuccguggccuacagcaacaacuccaucgccauccccaccaacuucacgaucagcgugaccaccgagauccugcccgucuccaugaccaagacgagcguggacugcaccauguacaucugcggcgacagcaccgagugcuccaaccuccugcugcaguacgggagcuucugcacccagcucaaccgcgcccugacgggcaucgcgguggagcaggacaagaacacccaggaggucuucgcccaggugaagcagaucuacaagacgcccccgaucaaggacuucgggggcuucaacuucucccagauccugcccgaccccagcaagcccuccaagcggagcuucaucgaggaccuccuguucaacaaggugacccuggccgacgccggcuucaucaagcaguacggggacugccucggcgacaucgccgcgcgcgaccugaucugcgcccagaaguucaacgggcugaccguccucccgccccugcugaccgacgagaugaucgcccaguacaccuccgcccuccuggccggcaccaucacgagcggguggaccuucggcgcgggcgccgcccugcagauccccuucgccaugcagauggcguaccgguucaacgggaucggcgugacccagaacgugcucuacgagaaccagaagcugaucgccaaccaguucaacuccgccaucgggaagauccaggacagccuguccagcaccgccuccgcccucggcaagcugcaggacgucgugaaccagaacgcgcaggcccugaacacgcucgugaagcagcugagcuccaacuucggggccaucagcuccguccugaacgacauccucagccgccuggacaagguggaggccgaggugcagaucgaccggcugaucaccggccgccuccagucccugcagaccuacgucacccagcagcugauccgggccgcggagauccgcgccagcgccaaccucgccgccaccaagaugagcgagugcgugcugggccaguccaagcggguggacuucugcgggaagggcuaccaccugaugagcuucccccaguccgcgccgcacggggucguguuccuccacgucacguacgugcccgcccaggagaagaacuucaccaccgcccccgccaucugccacgacggcaaggcgcacuucccccgcgaggggguguucgucagcaacggcacccacugguucgugacgcagcggaacuucuacgagccgcagaucaucaccaccgacaacaccuucguguccggcaacugcgacgucgugaucgggaucgugaacaacacggucuacgacccccugcagcccgagcuggacagcuucaaggaggagcucgacaaguacuucaagaaccacaccucccccgacguggaccugggcgacaucagcgggaucaacgccuccguggucaacauccagaaggagaucgaccgccugaacgagguggccaagaaccucaacgagagccugaucgaccugcaggagcucggcaaguacgagcaguacaucaaguggccgugguacaucuggcugggcuucaucgccgggcugaucgccaucgugauggucaccaucaugcucugcugcaugaccuccugcugcagcugccugaagggcugcugcuccugcgggagcugcugcaaguucgacgaggacgacuccgagcccgugcugaagggcgugaagcuccacuacacguga

SEQ ID NO: 22998 - RNA, 3816 nt, Artificial Sequence
  SARS-CoV-2/Wuhan/WIV05/2019__EPI_ISL_402128 spike protein CDS gc (1-1273)(H69del_V70del_Y453F_D614G_I692V_M1229I)
auguucguguuccugguccuccugccccuggugagcucccagugcgugaaccucaccacccgcacgcagcugccgcccgccuacaccaacagcuucacccggggcgucuacuaccccgacaagguguuccgcuccagcgugcugcacuccacccaggaccucuuccugcccuucuucagcaacgucacgugguuccacgccaucuccgggaccaacggcaccaagcgguucgacaacccggugcugcccuucaacgacgggguguacuucgcgagcaccgagaaguccaacaucauccgcggcuggaucuucgggacgacccucgacagcaagacccagucccugcugaucgucaacaacgccaccaacguggugaucaaggucugcgaguuccaguucugcaacgaccccuuccucggcguguacuaccacaagaacaacaagagcuggauggaguccgaguuccggguguacagcuccgccaacaacugcacguucgaguacgucagccagcccuuccugauggaccuggagggcaagcaggggaacuucaagaaccuccgcgaguucguguucaagaacaucgacggcuacuucaagaucuacuccaagcacaccccgaucaaccuggugcgggaccugccccagggguucagcgcccucgagccccuggucgaccugcccaucggcaucaacaucacccgcuuccagacccuccuggcccugcaccgguccuaccucacgccgggggacagcagcuccggcuggaccgcgggcgccgccgccuacuacgugggguaccugcagccccgcaccuuccugcucaaguacaacgagaacggcaccaucacggacgcgguggacugcgcccuggacccccugagcgagaccaagugcacccucaaguccuucaccgucgagaaggggaucuaccagacgagcaacuuccgggugcagcccaccgaguccaucgugcgcuucccgaacaucaccaaccugugccccuucggcgaggucuucaacgccacccgguucgccagcguguacgccuggaaccgcaagcggaucuccaacugcgucgcggacuacagcgugcuguacaacuccgccagcuucuccacguucaagugcuacggcgugagccccaccaagcucaacgaccugugcuucaccaacgucuacgccgacuccuucgugauccgcggggacgaggugcggcagaucgcccccggccagaccgggaagaucgccgacuacaacuacaagcugccggacgacuucacgggcugcgucaucgcguggaacagcaacaaccucgacuccaaggucgggggcaacuacaacuaccuguuccgccuguuccgcaagagcaaccucaagcccuucgagcgggacaucuccaccgagaucuaccaggccggcagcacccccugcaacgggguggagggcuucaacugcuacuucccccugcaguccuacggguuccagccgaccaacggcgugggguaccagcccuaccggguggugguccugagcuucgagcuccugcacgcccccgccacggugugcggccccaagaaguccaccaaccuggugaagaacaagugcgucaacuucaacuucaacggccucaccgggaccggcgugcugaccgagagcaacaagaaguuccugccguuccagcaguucgggcgcgacaucgccgacacgaccgacgcggugcgcgacccccagacccuggagauccucgacaucacccccugcagcuucggcggggucuccgugaucacgccgggcaccaacaccagcaaccagguggccguccuguaccagggcgugaacugcaccgaggugcccgucgccauccacgccgaccagcugacgcccaccuggcggguguacuccaccgggagcaacguguuccagacccgcgccggcugccucaucggggcggagcacgucaacaacuccuacgagugcgacauccccaucggcgccggcaucugcgccagcuaccagacgcagaccaacuccccgcggcgcgcccggagcguggcgucccagagcgugaucgccuacaccaugucccugggggccgagaacagcgucgccuacuccaacaacagcaucgccauccccaccaacuucacgaucuccgugaccaccgagauccugcccgugagcaugaccaagacgagcgucgacugcaccauguacaucugcggcgacuccaccgagugcagcaaccuccugcugcaguacggguccuucugcacccagcucaaccgcgcgcugacgggcaucgccguggagcaggacaagaacacccaggagguguucgcccaggucaagcagaucuacaagacgcccccgaucaaggacuucgggggcuucaacuucagccagauccugcccgaccccuccaagcccagcaagcgguccuucaucgaggaccuccuguucaacaaggugacccuggccgacgccggcuucaucaagcaguacggggacugccucggcgacaucgcggcccgcgaccugaucugcgcccagaaguucaacgggcugaccgugcucccgccccugcugaccgacgagaugaucgcccaguacaccagcgcccuccuggcgggcaccaucacguccggguggaccuucggcgccggcgccgcccugcagauccccuucgcgaugcagauggccuaccgguucaacgggaucggcgucacccagaacgugcucuacgagaaccagaagcugaucgccaaccaguucaacagcgccaucgggaagauccaggacucccugagcuccaccgccagcgcgcucggcaagcugcaggacguggucaaccagaacgcccaggcccugaacacgcucgugaagcagcuguccagcaacuucggggccaucuccagcgugcugaacgacauccucucccgccuggacaaggucgaggccgaggugcagaucgaccggcugaucaccggccgccuccagagccugcagaccuacgugacccagcagcugauccgggcggccgagauccgcgccagcgccaaccucgccgcgaccaagauguccgagugcguccugggccagagcaagcggguggacuucugcgggaagggcuaccaccugauguccuucccccagagcgccccgcacgggguggucuuccuccacgugacguacguccccgcccaggagaagaacuucaccaccgcccccgcgaucugccacgacggcaaggcccacuucccccgcgaggggguguucguguccaacggcacccacugguucgucacgcagcggaacuucuacgagccgcagaucaucaccaccgacaacaccuucgugagcggcaacugcgacguggucaucgggaucgugaacaacacgguguacgacccccugcagcccgagcuggacuccuucaaggaggagcucgacaaguacuucaagaaccacaccagccccgacgucgaccugggcgacaucuccgggaucaacgccagcguggugaacauccagaaggagaucgaccgccugaacgaggucgccaagaaccucaacgagucccugaucgaccugcaggagcucggcaaguacgagcaguacaucaaguggccgugguacaucuggcugggcuucaucgccgggcugaucgcgaucgugaucgugaccaucaugcucugcugcaugaccagcugcugcuccugccugaagggcugcugcagcugcggguccugcugcaaguucgacgaggacgacagcgagcccguccugaagggcgugaagcuccacuacacguga

SEQ ID NO: 22999 - RNA, 3813 nt, Artificial Sequence
  SARS-CoV-2/Wuhan/WIV05/2019__EPI_ISL_402128 spike protein CDS gc (1-1273)(H69del_V70del_Y144del_N501Y_A570D_D614G_P681H_T716I_S982 A_D1118H)
auguucguguuccugguccuccugccccuggugagcucccagugcgugaaccucaccacccgcacgcagcugccgcccgccuacaccaacagcuucacccggggcgucuacuaccccgacaagguguuccgcuccagcgugcugcacuccacccaggaccucuuccugcccuucuucagcaacgucacgugguuccacgccaucuccgggaccaacggcaccaagcgguucgacaacccggugcugcccuucaacgacgggguguacuucgcgagcaccgagaaguccaacaucauccgcggcuggaucuucgggacgacccucgacagcaagacccagucccugcugaucgucaacaacgccaccaacguggugaucaaggucugcgaguuccaguucugcaacgaccccuuccucggcguguaccacaagaacaacaagagcuggauggaguccgaguuccggguguacagcuccgccaacaacugcacguucgaguacgucagccagcccuuccugauggaccuggagggcaagcaggggaacuucaagaaccuccgcgaguucguguucaagaacaucgacggcuacuucaagaucuacuccaagcacaccccgaucaaccuggugcgggaccugccccagggguucagcgcccucgagccccuggucgaccugcccaucggcaucaacaucacccgcuuccagacccuccuggcccugcaccgguccuaccucacgccgggggacagcagcuccggcuggaccgcgggcgccgccgccuacuacgugggguaccugcagccccgcaccuuccugcucaaguacaacgagaacggcaccaucacggacgcgguggacugcgcccuggacccccugagcgagaccaagugcacccucaaguccuucaccgucgagaaggggaucuaccagacgagcaacuuccgggugcagcccaccgaguccaucgugcgcuucccgaacaucaccaaccugugccccuucggcgaggucuucaacgccacccgguucgccagcguguacgccuggaaccgcaagcggaucuccaacugcgucgcggacuacagcgugcuguacaacuccgccagcuucuccacguucaagugcuacggcgugagccccaccaagcucaacgaccugugcuucaccaacgucuacgccgacuccuucgugauccgcggggacgaggugcggcagaucgcccccggccagaccgggaagaucgccgacuacaacuacaagcugccggacgacuucacgggcugcgucaucgcguggaacagcaacaaccucgacuccaaggucgggggcaacuacaacuaccuguaccgccuguuccgcaagagcaaccucaagcccuucgagcgggacaucuccaccgagaucuaccaggccggcagcacccccugcaacgggguggagggcuucaacugcuacuucccccugcaguccuacggguuccagccgaccuacggcgugggguaccagcccuaccggguggugguccugagcuucgagcuccugcacgcccccgccacggugugcggccccaagaaguccaccaaccuggugaagaacaagugcgucaacuucaacuucaacggccucaccgggaccggcgugcugaccgagagcaacaagaaguuccugccguuccagcaguucgggcgcgacaucgacgacacgaccgacgccgugcgcgacccccagacccuggagauccucgacaucacccccugcagcuucggcggggucuccgugaucacgccgggcaccaacaccagcaaccagguggcgguccuguaccagggcgugaacugcaccgaggugcccgucgccauccacgccgaccagcugacgcccaccuggcggguguacuccaccgggagcaacguguuccagacccgcgccggcugccucaucggggccgagcacgucaacaacuccuacgagugcgacauccccaucggcgcgggcaucugcgccagcuaccagacgcagaccaacucccaccggcgcgcccggagcguggccucccagagcaucaucgcguacaccaugucccugggggccgagaacagcguggccuacuccaacaacagcaucgccaucccgaucaacuucaccaucuccgucacgaccgagauccugcccgugagcaugaccaagaccagcguggacugcacgauguacaucugcggcgacuccaccgagugcagcaaccuccugcugcaguacggguccuucugcacccagcucaaccgcgcccugaccggcaucgcggucgagcaggacaagaacacgcaggagguguucgcccaggugaagcagaucuacaagaccccgcccaucaaggacuucgggggcuucaacuucagccagauccugcccgaccccuccaagcccagcaagcgguccuucaucgaggaccuccuguucaacaaggucacccuggccgacgccggcuucaucaagcaguacggggacugccucggcgacaucgccgcgcgcgaccugaucugcgcccagaaguucaacgggcugaccgugcugcccccgcuccugacggacgagaugaucgcccaguacaccagcgcccuccuggccggcaccaucaccuccggguggacguucggcgcgggcgccgcccugcagauccccuucgccaugcagauggcguaccgguucaacgggaucggcgugacccagaacguccucuacgagaaccagaagcugaucgccaaccaguucaacagcgccaucgggaagauccaggacucccugagcuccaccgccagcgcccucggcaagcugcaggacguggugaaccagaacgcgcaggcccugaacacccucgucaagcagcuguccagcaacuucggggccaucuccagcgugcugaacgacauccucgcccgccuggacaagguggaggccgagguccagaucgaccggcugaucacgggccgccuccagucccugcagaccuacgugacccagcagcugauccgggcggccgagauccgcgccagcgccaaccucgccgcgaccaagaugagcgagugcgugcugggccaguccaagcgggucgacuucugcgggaagggcuaccaccugaugagcuucccccaguccgcgccccacggggugguguuccuccacgucaccuacgugccggcccaggagaagaacuucacgaccgcccccgccaucugccacgacggcaaggcccacuucccccgcgagggggucuucgugagcaacggcacccacugguucgugacccagcggaacuucuacgagccccagaucaucacgacccacaacaccuucgucuccggcaacugcgacguggugaucgggaucgucaacaacaccguguacgacccgcugcagcccgagcuggacagcuucaaggaggagcucgacaaguacuucaagaaccacacgucccccgacguggaccugggcgacaucagcgggaucaacgccuccgucgugaacauccagaaggagaucgaccgccugaacgagguggccaagaaccucaacgagagccugaucgaccugcaggagcucggcaaguacgagcaguacaucaaguggcccugguacaucuggcugggcuucaucgccgggcugaucgcgaucgucauggugaccaucaugcucugcugcaugaccuccugcugcagcugccugaagggcugcugcuccugcgggagcugcugcaaguucgacgaggacgacuccgagccggugcugaagggcgucaagcuccacuacaccuga

SEQ ID NO: 23000 - RNA, 3822 nt, Artificial Sequence
  SARS-CoV-2/Wuhan/WIV05/2019__EPI_ISL_402128 spike protein CDS gc (1-1273)(K417N_E484K_N501Y_D614G)
auguucguguuccugguccuccugccccuggugagcucccagugcgugaaccucaccacccgcacgcagcugccgcccgccuacaccaacagcuucacccggggcgucuacuaccccgacaagguguuccgcuccagcgugcugcacuccacccaggaccucuuccugcccuucuucagcaacgucacgugguuccacgccauccacguguccgggaccaacggcaccaagcgguucgacaacccggugcugcccuucaacgacggggucuacuucgcgagcaccgagaaguccaacaucauccgcggcuggaucuucgggacgacccucgacagcaagacccagucccugcugaucgugaacaacgccaccaacguggucaucaaggugugcgaguuccaguucugcaacgaccccuuccucggcguguacuaccacaagaacaacaagagcuggauggaguccgaguuccgggucuacagcuccgccaacaacugcacguucgaguacgugagccagcccuuccugauggaccuggagggcaagcaggggaacuucaagaaccuccgcgaguucguguucaagaacaucgacggcuacuucaagaucuacuccaagcacaccccgaucaaccugguccgggaccugccccagggguucagcgcccucgagccccugguggaccugcccaucggcaucaacaucacccgcuuccagacccuccuggcccugcaccgguccuaccucacgccgggggacagcagcuccggcuggaccgcgggcgccgccgccuacuacgugggguaccugcagccccgcaccuuccugcucaaguacaacgagaacggcaccaucacggacgcggucgacugcgcccuggacccccugagcgagaccaagugcacccucaaguccuucaccguggagaaggggaucuaccagacgagcaacuuccgggugcagcccaccgaguccaucguccgcuucccgaacaucaccaaccugugccccuucggcgagguguucaacgccacccgguucgccagcgucuacgccuggaaccgcaagcggaucuccaacugcguggcggacuacagcgugcuguacaacuccgccagcuucuccacguucaagugcuacggcgucagccccaccaagcucaacgaccugugcuucaccaacguguacgccgacuccuucgugauccgcggggacgagguccggcagaucgcccccggccagaccgggaacaucgccgacuacaacuacaagcugccggacgacuucacgggcugcgugaucgcguggaacagcaacaaccucgacuccaaggucgggggcaacuacaacuaccuguaccgccuguuccgcaagagcaaccucaagcccuucgagcgggacaucuccaccgagaucuaccaggccggcagcacccccugcaacggggugaagggcuucaacugcuacuucccccugcaguccuacggguuccagccgaccuacggcgugggguaccagcccuaccggguggucgugcugagcuucgagcuccugcacgcccccgccacggugugcggccccaagaaguccaccaaccuggucaagaacaagugcgugaacuucaacuucaacggccucaccgggaccggcgugcugaccgagagcaacaagaaguuccugccguuccagcaguucgggcgcgacaucgccgacacgaccgacgcgguccgcgacccccagacccuggagauccucgacaucacccccugcagcuucggcgggguguccgugaucacgccgggcaccaacaccagcaaccaggucgccgugcuguaccagggcgugaacugcaccgagguccccguggccauccacgccgaccagcugacgcccaccuggcggguguacuccaccgggagcaacgucuuccagacccgcgccggcugccucaucggggcggagcacgugaacaacuccuacgagugcgacauccccaucggcgccggcaucugcgccagcuaccagacgcagaccaacuccccgcggcgcgcccggagcguggcgucccagagcaucaucgccuacaccaugucccugggggccgagaacagcgucgccuacuccaacaacagcaucgccauccccaccaacuucacgaucuccgugaccaccgagauccugcccgugagcaugaccaagacgagcgucgacugcaccauguacaucugcggcgacuccaccgagugcagcaaccuccugcugcaguacggguccuucugcacccagcucaaccgcgcgcugacgggcaucgccguggagcaggacaagaacacccaggagguguucgcccaggucaagcagaucuacaagacgcccccgaucaaggacuucgggggcuucaacuucagccagauccugcccgaccccuccaagcccagcaagcgguccuucaucgaggaccuccuguucaacaaggugacccuggccgacgccggcuucaucaagcaguacggggacugccucggcgacaucgcggcccgcgaccugaucugcgcccagaaguucaacgggcugaccgugcucccgccccugcugaccgacgagaugaucgcccaguacaccagcgcccuccuggcgggcaccaucacguccggguggaccuucggcgccggcgccgcccugcagauccccuucgcgaugcagauggccuaccgguucaacgggaucggcgucacccagaacgugcucuacgagaaccagaagcugaucgccaaccaguucaacagcgccaucgggaagauccaggacucccugagcuccaccgccagcgcgcucggcaagcugcaggacguggucaaccagaacgcccaggcccugaacacgcucgugaagcagcuguccagcaacuucggggccaucuccagcgugcugaacgacauccucucccgccuggacaaggucgaggccgaggugcagaucgaccggcugaucaccggccgccuccagagccugcagaccuacgugacccagcagcugauccgggcggccgagauccgcgccagcgccaaccucgccgcgaccaagauguccgagugcguccugggccagagcaagcggguggacuucugcgggaagggcuaccaccugauguccuucccccagagcgccccgcacgggguggucuuccuccacgugacguacguccccgcccaggagaagaacuucaccaccgcccccgcgaucugccacgacggcaaggcccacuucccccgcgaggggguguucguguccaacggcacccacugguucgucacgcagcggaacuucuacgagccgcagaucaucaccaccgacaacaccuucgugagcggcaacugcgacguggucaucgggaucgugaacaacacgguguacgacccccugcagcccgagcuggacuccuucaaggaggagcucgacaaguacuucaagaaccacaccagccccgacgucgaccugggcgacaucuccgggaucaacgccagcguggugaacauccagaaggagaucgaccgccugaacgaggucgccaagaaccucaacgagucccugaucgaccugcaggagcucggcaaguacgagcaguacaucaaguggccgugguacaucuggcugggcuucaucgccgggcugaucgcgaucgugauggugaccaucaugcucugcugcaugaccagcugcugcuccugccugaagggcugcugcagcugcggguccugcugcaaguucgacgaggacgacagcgagcccguccugaagggcgugaagcuccacuacacguga

SEQ ID NO: 23001 - RNA, 3813 nt, Artificial Sequence
  SARS-CoV-2/Wuhan/WIV05/2019__EPI_ISL_402128 spike protein CDS gc (1-1273)(L18F_D80A_D215G_L242del_A243del_L244del_R246I_K417N_E484 K_N501Y_D614G_A701V)
auguucguguuccugguccuccugccccuggugagcucccagugcgugaacuucaccacccgcacgcagcucccgcccgccuacaccaacagcuucacccggggcgucuacuaccccgacaagguguuccgcuccagcgugcugcacuccacccaggaccuguuccuccccuucuucagcaacgucacgugguuccacgccauccacguguccgggaccaacggcaccaagcgguucgcgaacccggugcugcccuucaacgacggggucuacuucgccagcaccgagaaguccaacaucauccgcggcuggaucuucgggacgacccuggacagcaagacccagucccuccugaucgugaacaacgccaccaacguggucaucaaggugugcgaguuccaguucugcaacgaccccuuccugggcguguacuaccacaagaacaacaagagcuggauggaguccgaguuccgggucuacagcuccgccaacaacugcacguucgaguacgugagccagcccuuccucauggaccuggagggcaagcaggggaacuucaagaaccugcgcgaguucguguucaagaacaucgacggcuacuucaagaucuacuccaagcacaccccgaucaaccucguccgggggcugccccagggcuucagcgcccuggagccccucguggaccugcccaucgggaucaacaucacccgcuuccagacccugcacaucuccuaccucacgccgggcgacagcagcuccggcuggaccgcgggggccgccgccuacuacgugggcuaccugcagccccggaccuuccugcucaaguacaacgagaacgggaccaucacggacgcggucgacugcgcccuggacccccugagcgagaccaagugcacccucaaguccuucaccguggagaagggcaucuaccagacgagcaacuuccgcgugcagcccaccgaguccaucguccgguucccgaacaucaccaaccugugccccuucggcgagguguucaacgccacccgcuucgccagcgucuacgccuggaaccggaagcgcaucuccaacugcguggcggacuacagcgugcuguacaacuccgccagcuucuccacguucaagugcuacggggucagccccaccaagcucaacgaccugugcuucaccaacguguacgccgacuccuucgugauccggggcgacgagguccgccagaucgcccccgggcagaccggcaacaucgccgacuacaacuacaagcugccggacgacuucacggggugcgugaucgcguggaacagcaacaaccucgacuccaaggugggcggcaacuacaacuaccuguaccggcuguuccgcaagagcaaccucaagcccuucgagcgggacaucuccaccgagaucuaccaggccgggagcacccccugcaacggcgucaagggguucaacugcuacuucccccugcaguccuacggcuuccagccgaccuacggggugggcuaccagcccuaccgcguggucgugcugagcuucgagcuccugcacgcccccgccacggugugcggccccaagaaguccaccaaccuggucaagaacaagugcgugaacuucaacuucaacgggcucaccggcaccggggugcugaccgagagcaacaagaaguuccugccguuccagcaguucggccgggacaucgccgacacgaccgacgcgguccgcgacccccagacccucgagauccuggacaucacccccugcagcuucgggggcguguccgugaucacgccgggcaccaacaccagcaaccaggucgccgugcuguaccagggggugaacugcaccgagguccccguggccauccacgccgaccagcugacgcccaccuggcgcguguacuccaccggcagcaacgucuuccagacccgggccgggugccucaucggcgcggagcacgugaacaacuccuacgagugcgacauccccaucggcgccgggaucugcgccagcuaccagacgcagaccaacuccccgcgccgggcccgcagcguggcgucccagagcaucaucgccuacaccaugucccugggcgucgagaacagcguggccuacuccaacaacagcaucgccauccccaccaacuucacgaucuccgugaccaccgagauccugcccgucagcaugaccaagacgagcguggacugcaccauguacaucugcggggacuccaccgagugcagcaaccuccugcugcaguacggcuccuucugcacccagcucaaccgggcccugacggggaucgcgguggagcaggacaagaacacccaggaggucuucgcccaggugaagcagaucuacaagacgcccccgaucaaggacuucggcggcuucaacuucagccagauccugcccgaccccuccaagcccagcaagcgcuccuucaucgaggaccuccuguucaacaaggugacccuggccgacgccggguucaucaagcaguacggcgacugccucggggacaucgccgcgcgggaccugaucugcgcccagaaguucaacggccugaccguccucccgccccugcugaccgacgagaugaucgcccaguacaccagcgcccuccuggccgggaccaucacguccggcuggaccuucggcgcgggggccgcccugcagauccccuucgccaugcagauggcguaccgcuucaacggcaucggggugacccagaacgugcucuacgagaaccagaagcugaucgccaaccaguucaacagcgccaucggcaagauccaggacucccugagcuccaccgccagcgcccucgggaagcugcaggacgucgugaaccagaacgcgcaggcccugaacacgcucgugaagcagcuguccagcaacuucggcgccaucuccagcguccugaacgacauccucucccggcuggacaagguggaggccgaggugcagaucgaccgccugaucaccggccggcuccagagccugcagaccuacgucacccagcagcugauccgcgccgcggagauccgggccagcgccaaccucgccgccaccaagauguccgagugcgugcuggggcagagcaagcgcguggacuucugcggcaagggguaccaccugauguccuucccccagagcgcgccgcacggcgucguguuccuccacgucacguacgugcccgcccaggagaagaacuucaccaccgcccccgccaucugccacgacgggaaggcgcacuucccccgggagggcguguucgucuccaacggcacccacugguucgugacgcagcgcaacuucuacgagccgcagaucaucaccaccgacaacaccuucgugagcgggaacugcgacgucgugaucggcaucgugaacaacacggucuacgacccccugcagcccgagcuggacuccuucaaggaggagcucgacaaguacuucaagaaccacaccagccccgacguggaccugggggacaucuccggcaucaacgccagcguggucaacauccagaaggagaucgaccggcugaacgagguggccaagaaccucaacgagucccugaucgaccugcaggagcucggcaaguacgagcaguacaucaaguggccgugguacaucuggcugggguucaucgccggccugaucgccaucgugauggucaccaucaugcucugcugcaugaccagcugcugcuccugccugaaggggugcugcagcugcggcuccugcugcaaguucgacgaggacgacagcgagcccgugcugaagggggugaagcuccacuacacguga

SEQ ID NO: 23002 - RNA, 3822 nt, Artificial Sequence
  SARS-CoV-2/Wuhan/WIV05/2019__EPI_ISL_402128 spike protein CDS gc (1-1273)(E484K_D614G)
auguucguguuccugguccuccugccccuggugagcucccagugcgugaaccucaccacccgcacgcagcugccgcccgccuacaccaacagcuucacccggggcgucuacuaccccgacaagguguuccgcuccagcgugcugcacuccacccaggaccucuuccugcccuucuucagcaacgucacgugguuccacgccauccacguguccgggaccaacggcaccaagcgguucgacaacccggugcugcccuucaacgacggggucuacuucgcgagcaccgagaaguccaacaucauccgcggcuggaucuucgggacgacccucgacagcaagacccagucccugcugaucgugaacaacgccaccaacguggucaucaaggugugcgaguuccaguucugcaacgaccccuuccucggcguguacuaccacaagaacaacaagagcuggauggaguccgaguuccgggucuacagcuccgccaacaacugcacguucgaguacgugagccagcccuuccugauggaccuggagggcaagcaggggaacuucaagaaccuccgcgaguucguguucaagaacaucgacggcuacuucaagaucuacuccaagcacaccccgaucaaccugguccgggaccugccccagggguucagcgcccucgagccccugguggaccugcccaucggcaucaacaucacccgcuuccagacccuccuggcccugcaccgguccuaccucacgccgggggacagcagcuccggcuggaccgcgggcgccgccgccuacuacgugggguaccugcagccccgcaccuuccugcucaaguacaacgagaacggcaccaucacggacgcggucgacugcgcccuggacccccugagcgagaccaagugcacccucaaguccuucaccguggagaaggggaucuaccagacgagcaacuuccgggugcagcccaccgaguccaucguccgcuucccgaacaucaccaaccugugccccuucggcgagguguucaacgccacccgguucgccagcgucuacgccuggaaccgcaagcggaucuccaacugcguggcggacuacagcgugcuguacaacuccgccagcuucuccacguucaagugcuacggcgucagccccaccaagcucaacgaccugugcuucaccaacguguacgccgacuccuucgugauccgcggggacgagguccggcagaucgcccccggccagaccgggaagaucgccgacuacaacuacaagcugccggacgacuucacgggcugcgugaucgcguggaacagcaacaaccucgacuccaaggucgggggcaacuacaacuaccuguaccgccuguuccgcaagagcaaccucaagcccuucgagcgggacaucuccaccgagaucuaccaggccggcagcacccccugcaacggggugaagggcuucaacugcuacuucccccugcaguccuacggguuccagccgaccaacggcgugggguaccagcccuaccggguggucgugcugagcuucgagcuccugcacgcccccgccacggugugcggccccaagaaguccaccaaccuggucaagaacaagugcgugaacuucaacuucaacggccucaccgggaccggcgugcugaccgagagcaacaagaaguuccugccguuccagcaguucgggcgcgacaucgccgacacgaccgacgcgguccgcgacccccagacccuggagauccucgacaucacccccugcagcuucggcgggguguccgugaucacgccgggcaccaacaccagcaaccaggucgccgugcuguaccagggcgugaacugcaccgagguccccguggccauccacgccgaccagcugacgcccaccuggcggguguacuccaccgggagcaacgucuuccagacccgcgccggcugccucaucggggcggagcacgugaacaacuccuacgagugcgacauccccaucggcgccggcaucugcgccagcuaccagacgcagaccaacuccccgcggcgcgcccggagcguggcgucccagagcaucaucgccuacaccaugucccugggggccgagaacagcgucgccuacuccaacaacagcaucgccauccccaccaacuucacgaucuccgugaccaccgagauccugcccgugagcaugaccaagacgagcgucgacugcaccauguacaucugcggcgacuccaccgagugcagcaaccuccugcugcaguacggguccuucugcacccagcucaaccgcgcgcugacgggcaucgccguggagcaggacaagaacacccaggagguguucgcccaggucaagcagaucuacaagacgcccccgaucaaggacuucgggggcuucaacuucagccagauccugcccgaccccuccaagcccagcaagcgguccuucaucgaggaccuccuguucaacaaggugacccuggccgacgccggcuucaucaagcaguacggggacugccucggcgacaucgcggcccgcgaccugaucugcgcccagaaguucaacgggcugaccgugcucccgccccugcugaccgacgagaugaucgcccaguacaccagcgcccuccuggcgggcaccaucacguccggguggaccuucggcgccggcgccgcccugcagauccccuucgcgaugcagauggccuaccgguucaacgggaucggcgucacccagaacgugcucuacgagaaccagaagcugaucgccaaccaguucaacagcgccaucgggaagauccaggacucccugagcuccaccgccagcgcgcucggcaagcugcaggacguggucaaccagaacgcccaggcccugaacacgcucgugaagcagcuguccagcaacuucggggccaucuccagcgugcugaacgacauccucucccgccuggacaaggucgaggccgaggugcagaucgaccggcugaucaccggccgccuccagagccugcagaccuacgugacccagcagcugauccgggcggccgagauccgcgccagcgccaaccucgccgcgaccaagauguccgagugcguccugggccagagcaagcggguggacuucugcgggaagggcuaccaccugauguccuucccccagagcgccccgcacgggguggucuuccuccacgugacguacguccccgcccaggagaagaacuucaccaccgcccccgcgaucugccacgacggcaaggcccacuucccccgcgaggggguguucguguccaacggcacccacugguucgucacgcagcggaacuucuacgagccgcagaucaucaccaccgacaacaccuucgugagcggcaacugcgacguggucaucgggaucgugaacaacacgguguacgacccccugcagcccgagcuggacuccuucaaggaggagcucgacaaguacuucaagaaccacaccagccccgacgucgaccugggcgacaucuccgggaucaacgccagcguggugaacauccagaaggagaucgaccgccugaacgaggucgccaagaaccucaacgagucccugaucgaccugcaggagcucggcaaguacgagcaguacaucaaguggccgugguacaucuggcugggcuucaucgccgggcugaucgcgaucgugauggugaccaucaugcucugcugcaugaccagcugcugcuccugccugaagggcugcugcagcugcggguccugcugcaaguucgacgaggacgacagcgagcccguccugaagggcgugaagcuccacuacacguga

SEQ ID NO: 23003 - RNA, 3822 nt, Artificial Sequence
  SARS-CoV-2/Wuhan/WIV05/2019__EPI_ISL_402128 spike protein CDS gc (1-1273)(L18F_T20N_P26S_D138Y_R190S_K417T_E484K_N501Y_D614G_H655Y _T1027I)
auguucguguuccugguccuccugccccuggugagcucccagugcgugaacuucaccaaccgcacccagcucccgagcgccuacacgaacuccuucacccggggcgucuacuaccccgacaagguguuccgcagcuccgugcugcacagcacccaggaccuguuccuccccuucuucuccaacgucaccugguuccacgccauccacgugagcgggacgaacggcaccaagcgguucgacaaccccgugcugccguucaacgacggggucuacuucgcguccaccgagaaguccaacaucauccgcggcuggaucuucgggaccacgcuggacuccaagacccagagccuccugaucgugaacaacgccaccaacguggucaucaaggugugcgaguuccaguucugcaacuaccccuuccugggcguguacuaccacaagaacaacaaguccuggauggagagcgaguuccgggucuacuccagcgccaacaacugcaccuucgaguacgugucccagcccuuccucauggaccuggagggcaagcaggggaacuucaagaaccugagcgaguucguguucaagaacaucgacggcuacuucaagaucuacuccaagcacacgcccaucaaccucguccgcgaccugccgcagggguucagcgcccuggagccccucguggaccugcccaucggcaucaacaucacccgguuccagacccugcucgcccugcaccgcagcuaccugacccccggggacuccagcuccggcuggacggcgggcgccgccgccuacuacgugggguaccuccagccgcggaccuuccugcugaaguacaacgagaacggcaccaucaccgacgcggucgacugcgcccucgacccccugagcgagacgaagugcacccugaaguccuucaccguggagaaggggaucuaccagaccagcaacuuccgcgugcagcccacggaguccaucguccgguuccccaacaucaccaaccucugcccguucggcgagguguucaacgccacccgcuucgccagcgucuacgccuggaaccggaagcgcaucuccaacugcguggcggacuacagcgugcuguacaacuccgccagcuucuccaccuucaagugcuacggcgucagccccacgaagcugaacgaccucugcuucaccaacguguacgccgacuccuucgugauccgcggggacgagguccggcagaucgcccccggccagaccgggaccaucgccgacuacaacuacaagcugcccgacgacuucacgggcugcgugaucgcguggaacagcaacaaccuggacuccaaggucgggggcaacuacaacuaccucuaccggcuguuccgcaagagcaaccugaagccguucgagcgggacaucuccaccgagaucuaccaggccggcagcacccccugcaacggggugaagggcuucaacugcuacuucccccuccagagcuacggguuccagcccaccuacggcgugggguaccagccguaccgcguggucgugcuguccuucgagcugcuccacgcccccgccacggugugcggccccaagaaguccaccaaccuggucaagaacaagugcgugaacuucaacuucaacggccugaccgggaccggcgugcucaccgagagcaacaagaaguuccugcccuuccagcaguucgggcgggacaucgccgacacgaccgacgcgguccgcgacccgcagacccuggagauccuggacaucacccccugcagcuucggcgggguguccgugaucacgcccggcaccaacaccagcaaccaggucgccgugcucuaccagggcgugaacugcaccgaggucccgguggccauccacgccgaccagcugacgcccaccuggcgcguguacuccaccgggagcaacgucuuccagacccgggccggcugccugaucggggcggaguacgugaacaacuccuacgagugcgacauccccaucggcgccggcaucugcgccagcuaccagacgcagaccaacagcccccgccgggcccgcagcguggcgucccagagcaucaucgccuacaccaugucccucggggccgagaacagcgucgccuacuccaacaacagcaucgccaucccgaccaacuucacgaucagcgugaccaccgagauccugcccguguccaugaccaagacgagcgucgacugcaccauguacaucugcggcgacuccaccgagugcagcaaccugcuccugcaguacggguccuucugcacccagcugaaccgggcgcucacgggcaucgccguggagcaggacaagaacacccaggagguguucgcccaggucaagcagaucuacaagaccccgcccaucaaggacuucgggggcuucaacuucagccagauccugcccgaccccuccaagcccagcaagcgcuccuucaucgaggaccuccuguucaacaaggugacccuggccgacgccggcuucaucaagcaguacggggacugccugggcgacaucgcggcccgggaccucaucugcgcccagaaguucaacgggcugacggugcugcccccgcuccugaccgacgagaugaucgcccaguacaccagcgcccugcucgcgggcaccaucacguccggguggaccuucggcgccggcgccgcccugcagauccccuucgcgaugcagauggccuaccgcuucaacgggaucggcgucacccagaacgugcuguacgagaaccagaagcucaucgccaaccaguucaacagcgccaucgggaagauccaggacucccugagcuccaccgccagcgcgcugggcaagcuccaggacguggucaaccagaacgcccaggcccugaacacgcuggugaagcagcucuccagcaacuucggggccaucuccagcgugcugaacgacauccugagccggcucgacaaggucgaggccgaggugcagaucgaccgccugaucaccggccggcugcagucccuccagaccuacgugacccagcagcugauccgcgcggccgagauccgggccagcgccaaccuggccgcgaucaagauguccgagugcguccucggccagagcaagcgcguggacuucugcgggaagggcuaccaccugauguccuucccccagagcgcgccccacgggguggucuuccugcacgugaccuacgucccggcccaggagaagaacuucacgaccgcccccgccaucugccacgacggcaaggcccacuucccccgggaggggguguucguguccaacggcacccacugguucgucacccagcgcaacuucuacgagccccagaucaucacgaccgacaacaccuucgugagcggcaacugcgacguggucaucgggaucgugaacaacaccguguacgacccgcuccagcccgagcuggacuccuucaaggaggagcuggacaaguacuucaagaaccacacgagccccgacgucgaccucggcgacaucuccgggaucaacgccagcguggugaacauccagaaggagaucgaccggcugaacgaggucgccaagaaccugaacgagucccucaucgaccugcaggagcugggcaaguacgagcaguacaucaaguggcccugguacaucuggcucggcuucaucgccgggcugaucgcgaucgugauggugaccaucaugcugugcugcaugaccagcugcugcuccugccucaagggcugcugcagcugcggguccugcugcaaguucgacgaggacgacagcgagccgguccugaagggcgugaagcugcacuacaccuga

SEQ ID NO: 23004 - RNA, 3822 nt, Artificial Sequence
  SARS-CoV-2/Wuhan/WIV05/2019__EPI_ISL_402128 spike protein CDS gc (1-1273)(S13I_W152C_L452R_D614G)
auguucguguuccugguccuccugccccuggugagcauccagugcgugaaccucaccacccgcacgcagcugccgcccgccuacaccaacuccuucacccggggcgucuacuaccccgacaagguguuccgcagcuccgugcugcacagcacccaggaccucuuccugcccuucuucuccaacgucacgugguuccacgccauccacgugagcgggaccaacggcaccaagcgguucgacaacccggugcugcccuucaacgacggggucuacuucgcguccaccgagaaguccaacaucauccgcggcuggaucuucgggacgacccucgacagcaagacccagagccugcugaucgugaacaacgccaccaacguggucaucaaggugugcgaguuccaguucugcaacgaccccuuccucggcguguacuaccacaagaacaacaaguccugcauggagagcgaguuccgggucuacuccagcgccaacaacugcacguucgaguacgugucccagcccuuccugauggaccuggagggcaagcaggggaacuucaagaaccuccgcgaguucguguucaagaacaucgacggcuacuucaagaucuacagcaagcacaccccgaucaaccugguccgggaccugccccagggguucuccgcccucgagccccugguggaccugcccaucggcaucaacaucacccgcuuccagacccuccuggcccugcaccggagcuaccucacgccgggggacuccagcagcggcuggaccgcgggcgccgccgccuacuacgugggguaccugcagccccgcaccuuccugcucaaguacaacgagaacggcaccaucacggacgcggucgacugcgcccuggacccccuguccgagaccaagugcacccucaagagcuucaccguggagaaggggaucuaccagacguccaacuuccgggugcagcccaccgagagcaucguccgcuucccgaacaucaccaaccugugccccuucggcgagguguucaacgccacccgguucgccuccgucuacgccuggaaccgcaagcggaucagcaacugcguggcggacuacuccgugcuguacaacagcgccuccuucagcacguucaagugcuacggcgucucccccaccaagcucaacgaccugugcuucaccaacguguacgccgacagcuucgugauccgcggggacgagguccggcagaucgcccccggccagaccgggaagaucgccgacuacaacuacaagcugccggacgacuucacgggcugcgugaucgcguggaacuccaacaaccucgacagcaaggucgggggcaacuacaacuaccgcuaccggcuguuccgcaaguccaaccugaagcccuucgagcgggacaucagcaccgagaucuaccaggccggcuccacccccugcaacgggguggagggcuucaacugcuacuucccccuccagagcuacggguuccagccgaccaacggcgugggguaccagcccuaccgcguggucgugcuguccuucgagcugcuccacgcccccgccacggugugcggccccaagaaguccaccaaccuggucaagaacaagugcgugaacuucaacuucaacggccugaccgggaccggcgugcucaccgagagcaacaagaaguuccugccguuccagcaguucgggcgcgacaucgccgacacgaccgacgcgguccgggacccccagacccuggagauccuggacaucacccccugcagcuucggcggggugagcgugaucacgccgggcaccaacaccuccaaccaggucgccgugcucuaccagggcgugaacugcaccgagguccccguggccauccacgccgaccagcugacgcccaccuggcgcguguacagcaccggguccaacgucuuccagacccgggccggcugccugaucggggcggagcacgugaacaacagcuacgagugcgacauccccaucggcgccggcaucugcgccuccuaccagacgcagaccaacagcccgcgccgggcccgcuccguggcgagccaguccaucaucgccuacaccaugagccucggggccgagaacuccgucgccuacagcaacaacuccaucgccauccccaccaacuucacgaucagcgugaccaccgagauccugcccguguccaugaccaagacgagcgucgacugcaccauguacaucugcggcgacagcaccgagugcuccaaccugcuccugcaguacgggagcuucugcacccagcugaaccgggcgcucacgggcaucgccguggagcaggacaagaacacccaggagguguucgcccaggucaagcagaucuacaagacgcccccgaucaaggacuucgggggcuucaacuucucccagauccugcccgaccccagcaagcccuccaagcgcagcuucaucgaggaccuccuguucaacaaggugacccuggccgacgccggcuucaucaagcaguacggggacugccugggcgacaucgcggcccgggaccucaucugcgcccagaaguucaacgggcugaccgugcugccgccccuccugaccgacgagaugaucgcccaguacaccuccgcccugcucgcgggcaccaucacgagcggguggaccuucggcgccggcgccgcccugcagauccccuucgcgaugcagauggccuaccgcuucaacgggaucggcgucacccagaacgugcuguacgagaaccagaagcucaucgccaaccaguucaacuccgccaucgggaagauccaggacagccuguccagcaccgccuccgcgcugggcaagcuccaggacguggucaaccagaacgcccaggcccugaacacgcuggugaagcagcucagcuccaacuucggggccaucagcuccgugcugaacgacauccugagccggcucgacaaggucgaggccgaggugcagaucgaccgccugaucaccggccggcugcagucccuccagaccuacgugacccagcagcugauccgcgcggccgagauccgggccagcgccaaccuggccgcgaccaagaugagcgagugcguccucggccaguccaagcgcguggacuucugcgggaagggcuaccaccugaugagcuucccccaguccgccccgcacgggguggucuuccugcacgugacguacguccccgcccaggagaagaacuucaccaccgcccccgcgaucugccacgacggcaaggcccacuucccccgggaggggguguucgugagcaacggcacccacugguucgucacgcagcgcaacuucuacgagccgcagaucaucaccaccgacaacaccuucguguccggcaacugcgacguggucaucgggaucgugaacaacacgguguacgacccccuccagcccgagcuggacagcuucaaggaggagcuggacaaguacuucaagaaccacaccucccccgacgucgaccucggcgacaucagcgggaucaacgccuccguggugaacauccagaaggagaucgaccggcugaacgaggucgccaagaaccugaacgagagccucaucgaccugcaggagcugggcaaguacgagcaguacaucaaguggccgugguacaucuggcucggcuucaucgccgggcugaucgcgaucgugauggugaccaucaugcugugcugcaugaccuccugcugcagcugccucaagggcugcugcuccugcgggagcugcugcaaguucgacgaggacgacuccgagcccguccugaagggcgugaagcugcacuacacguga

SEQ ID NO: 23005 - RNA, 3822 nt, Artificial Sequence
  SARS-CoV-2/Wuhan/WIV05/2019__EPI_ISL_402128 spike protein CDS gc (1-1273)
auguucguguuccuggugcugcugccccuggugagcagccagugcgugaaccugaccacccggacccagcugccaccagccuacaccaacagcuucacccggggcgucuacuaccccgacaagguguuccggagcagcguccugcacagcacccaggaccuguuccugcccuucuucagcaacgugaccugguuccacgccauccacgugagcggcaccaacggcaccaagcgguucgacaaccccgugcugcccuucaacgacggcguguacuucgccagcaccgagaagagcaacaucauccggggcuggaucuucggcaccacccuggacagcaagacccagagccugcugaucgugaauaacgccaccaacguggugaucaaggugugcgaguuccaguucugcaacgaccccuuccugggcguguacuaccacaagaacaacaagagcuggauggagagcgaguuccggguguacagcagcgccaacaacugcaccuucgaguacgugagccagcccuuccugauggaccuggagggcaagcagggcaacuucaagaaccugcgggaguucguguucaagaacaucgacggcuacuucaagaucuacagcaagcacaccccaaucaaccuggugcgggaucugccccagggcuucucagcccuggagccccugguggaccugcccaucggcaucaacaucacccgguuccagacccugcuggcccugcaccggagcuaccugaccccaggcgacagcagcagcggguggacagcaggcgcggcugcuuacuacgugggcuaccugcagccccggaccuuccugcugaaguacaacgagaacggcaccaucaccgacgccguggacugcgcccuggacccucugagcgagaccaagugcacccugaagagcuucaccguggagaagggcaucuaccagaccagcaacuuccgggugcagcccaccgagagcaucgugcgguuccccaacaucaccaaccugugccccuucggcgagguguucaacgccacccgguucgccagcguguacgccuggaaccggaagcggaucagcaacugcguggccgacuacagcgugcuguacaacagcgccagcuucagcaccuucaagugcuacggcgugagccccaccaagcugaacgaccugugcuucaccaacguguacgccgacagcuucgugauccguggcgacgaggugcggcagaucgcacccggccagacaggcaagaucgccgacuacaacuacaagcugcccgacgacuucaccggcugcgugaucgccuggaacagcaacaaccucgacagcaaggugggcggcaacuacaacuaccuguaccggcuguuccggaagagcaaccugaagcccuucgagcgggacaucagcaccgagaucuaccaagccggcuccaccccuugcaacggcguggagggcuucaacugcuacuucccucugcagagcuacggcuuccagcccaccaacggcgugggcuaccagcccuaccgggugguggugcugagcuucgagcugcugcacgccccagccaccguguguggccccaagaagagcaccaaccuggugaagaacaagugcgugaacuucaacuucaacggccuuaccggcaccggcgugcugaccgagagcaacaagaaauuccugcccuuucagcaguucggccgggacaucgccgacaccaccgacgcugugcgggauccccagacccuggagauccuggacaucaccccuugcagcuucggcggcgugagcgugaucaccccaggcaccaacaccagcaaccagguggccgugcuguaccaggacgugaacugcaccgaggugcccguggccauccacgccgaccagcugacacccaccuggcgggucuacagcaccggcagcaacguguuccagacccgggccgguugccugaucggcgccgagcacgugaacaacagcuacgagugcgacauccccaucggcgccggcaucugugccagcuaccagacccagaccaauucaccccggagggcaaggagcguggccagccagagcaucaucgccuacaccaugagccugggcgccgagaacagcguggccuacagcaacaacagcaucgccauccccaccaacuucaccaucagcgugaccaccgagauucugcccgugagcaugaccaagaccagcguggacugcaccauguacaucugcggcgacagcaccgagugcagcaaccugcugcugcaguacggcagcuucugcacccagcugaaccgggcccugaccggcaucgccguggagcaggacaagaacacccaggagguguucgcccaggugaagcagaucuacaagaccccucccaucaaggacuucggcggcuucaacuucagccagauccugcccgaccccagcaagcccagcaagcggagcuucaucgaggaccugcuguucaacaaggugacccuagccgacgccggcuucaucaagcaguacggcgacugccucggcgacauagccgcccgggaccugaucugcgcccagaaguucaacggccugaccgugcugccuccccugcugaccgacgagaugaucgcccaguacaccagcgcccuguuagccggaaccaucaccagcggcuggacuuucggcgcuggagccgcucugcagauccccuucgccaugcagauggccuaccgguucaacggcaucggcgugacccagaacgugcuguacgagaaccagaagcugaucgccaaccaguucaacagcgccaucggcaagauccaggacagccugagcagcaccgcuagcgcccugggcaagcugcaggacguggugaaccagaacgcccaggcccugaacacccuggugaagcagcugagcagcaacuucggcgccaucagcagcgugcugaacgacauccugagccggcuggacaaggucgaggccgaggugcagaucgaccggcugaucacuggccggcugcagagccugcagaccuacgugacccagcagcugauccgggccgccgagauucgggccagcgccaaccuggccgccaccaagaugagcgagugcgugcugggccagagcaagcggguggacuucugcggcaagggcuaccaccugaugagcuuuccccagagcgcaccccacggagugguguuccugcacgugaccuacgugcccgcccaggagaagaacuucaccaccgccccagccaucugccacgacggcaaggcccacuuuccccgggagggcguguucgugagcaacggcacccacugguucgugacccagcggaacuucuacgagccccagaucaucaccaccgacaacaccuucgugagcggcaacugcgacguggugaucggcaucgugaacaacaccguguacgauccccugcagcccgagcuggacagcuucaaggaggagcuggacaaguacuucaagaaucacaccagccccgacguggaccugggcgacaucagcggcaucaacgccagcguggugaacauccagaaggagaucgaucggcugaacgagguggccaagaaccugaacgagagccugaucgaccugcaggagcugggcaaguacgagcaguacaucaaguggcccugguacaucuggcugggcuucaucgccggccugaucgccaucgugauggugaccaucaugcugugcugcaugaccagcugcugcagcugccugaagggcuguugcagcugcggcagcugcugcaaguucgacgaggacgacagcgagcccgugcugaagggcgugaagcugcacuacaccuga

SEQ ID NO: 23006 - RNA, 3822 nt, Artificial Sequence
  SARS-CoV-2/Wuhan/WIV05/2019__EPI_ISL_402128 spike protein CDS gc (1-1273)(D614G)
auguucguguuccuggugcugcugccccuggugagcagccagugcgugaaccugaccacccggacccagcugccaccagccuacaccaacagcuucacccggggcgucuacuaccccgacaagguguuccggagcagcguccugcacagcacccaggaccuguuccugcccuucuucagcaacgugaccugguuccacgccauccacgugagcggcaccaacggcaccaagcgguucgacaaccccgugcugcccuucaacgacggcguguacuucgccagcaccgagaagagcaacaucauccggggcuggaucuucggcaccacccuggacagcaagacccagagccugcugaucgugaauaacgccaccaacguggugaucaaggugugcgaguuccaguucugcaacgaccccuuccugggcguguacuaccacaagaacaacaagagcuggauggagagcgaguuccggguguacagcagcgccaacaacugcaccuucgaguacgugagccagcccuuccugauggaccuggagggcaagcagggcaacuucaagaaccugcgggaguucguguucaagaacaucgacggcuacuucaagaucuacagcaagcacaccccaaucaaccuggugcgggaucugccccagggcuucucagcccuggagccccugguggaccugcccaucggcaucaacaucacccgguuccagacccugcuggcccugcaccggagcuaccugaccccaggcgacagcagcagcggguggacagcaggcgcggcugcuuacuacgugggcuaccugcagccccggaccuuccugcugaaguacaacgagaacggcaccaucaccgacgccguggacugcgcccuggacccucugagcgagaccaagugcacccugaagagcuucaccguggagaagggcaucuaccagaccagcaacuuccgggugcagcccaccgagagcaucgugcgguuccccaacaucaccaaccugugccccuucggcgagguguucaacgccacccgguucgccagcguguacgccuggaaccggaagcggaucagcaacugcguggccgacuacagcgugcuguacaacagcgccagcuucagcaccuucaagugcuacggcgugagccccaccaagcugaacgaccugugcuucaccaacguguacgccgacagcuucgugauccguggcgacgaggugcggcagaucgcacccggccagacaggcaagaucgccgacuacaacuacaagcugcccgacgacuucaccggcugcgugaucgccuggaacagcaacaaccucgacagcaaggugggcggcaacuacaacuaccuguaccggcuguuccggaagagcaaccugaagcccuucgagcgggacaucagcaccgagaucuaccaagccggcuccaccccuugcaacggcguggagggcuucaacugcuacuucccucugcagagcuacggcuuccagcccaccaacggcgugggcuaccagcccuaccgggugguggugcugagcuucgagcugcugcacgccccagccaccguguguggccccaagaagagcaccaaccuggugaagaacaagugcgugaacuucaacuucaacggccuuaccggcaccggcgugcugaccgagagcaacaagaaauuccugcccuuucagcaguucggccgggacaucgccgacaccaccgacgcugugcgggauccccagacccuggagauccuggacaucaccccuugcagcuucggcggcgugagcgugaucaccccaggcaccaacaccagcaaccagguggccgugcuguaccagggcgugaacugcaccgaggugcccguggccauccacgccgaccagcugacacccaccuggcgggucuacagcaccggcagcaacguguuccagacccgggccgguugccugaucggcgccgagcacgugaacaacagcuacgagugcgacauccccaucggcgccggcaucugugccagcuaccagacccagaccaauucaccccggagggcaaggagcguggccagccagagcaucaucgccuacaccaugagccugggcgccgagaacagcguggccuacagcaacaacagcaucgccauccccaccaacuucaccaucagcgugaccaccgagauucugcccgugagcaugaccaagaccagcguggacugcaccauguacaucugcggcgacagcaccgagugcagcaaccugcugcugcaguacggcagcuucugcacccagcugaaccgggcccugaccggcaucgccguggagcaggacaagaacacccaggagguguucgcccaggugaagcagaucuacaagaccccucccaucaaggacuucggcggcuucaacuucagccagauccugcccgaccccagcaagcccagcaagcggagcuucaucgaggaccugcuguucaacaaggugacccuagccgacgccggcuucaucaagcaguacggcgacugccucggcgacauagccgcccgggaccugaucugcgcccagaaguucaacggccugaccgugcugccuccccugcugaccgacgagaugaucgcccaguacaccagcgcccuguuagccggaaccaucaccagcggcuggacuuucggcgcuggagccgcucugcagauccccuucgccaugcagauggccuaccgguucaacggcaucggcgugacccagaacgugcuguacgagaaccagaagcugaucgccaaccaguucaacagcgccaucggcaagauccaggacagccugagcagcaccgcuagcgcccugggcaagcugcaggacguggugaaccagaacgcccaggcccugaacacccuggugaagcagcugagcagcaacuucggcgccaucagcagcgugcugaacgacauccugagccggcuggacaaggucgaggccgaggugcagaucgaccggcugaucacuggccggcugcagagccugcagaccuacgugacccagcagcugauccgggccgccgagauucgggccagcgccaaccuggccgccaccaagaugagcgagugcgugcugggccagagcaagcggguggacuucugcggcaagggcuaccaccugaugagcuuuccccagagcgcaccccacggagugguguuccugcacgugaccuacgugcccgcccaggagaagaacuucaccaccgccccagccaucugccacgacggcaaggcccacuuuccccgggagggcguguucgugagcaacggcacccacugguucgugacccagcggaacuucuacgagccccagaucaucaccaccgacaacaccuucgugagcggcaacugcgacguggugaucggcaucgugaacaacaccguguacgauccccugcagcccgagcuggacagcuucaaggaggagcuggacaaguacuucaagaaucacaccagccccgacguggaccugggcgacaucagcggcaucaacgccagcguggugaacauccagaaggagaucgaucggcugaacgagguggccaagaaccugaacgagagccugaucgaccugcaggagcugggcaaguacgagcaguacaucaaguggcccugguacaucuggcugggcuucaucgccggccugaucgccaucgugauggugaccaucaugcugugcugcaugaccagcugcugcagcugccugaagggcuguugcagcugcggcagcugcugcaaguucgacgaggacgacagcgagcccgugcugaagggcgugaagcugcacuacaccuga

SEQ ID NO: 23007 - RNA, 3822 nt, Artificial Sequence
  SARS-CoV-2/Wuhan/WIV05/2019__EPI_ISL_402128 spike protein CDS gc (1-1273)(A222V_D614G)
auguucguguuccuggugcugcugccccuggugagcagccagugcgugaaccugaccacccggacccagcugccaccagccuacaccaacagcuucacccggggcgucuacuaccccgacaagguguuccggagcagcguccugcacagcacccaggaccuguuccugcccuucuucagcaacgugaccugguuccacgccauccacgugagcggcaccaacggcaccaagcgguucgacaaccccgugcugcccuucaacgacggcguguacuucgccagcaccgagaagagcaacaucauccggggcuggaucuucggcaccacccuggacagcaagacccagagccugcugaucgugaauaacgccaccaacguggugaucaaggugugcgaguuccaguucugcaacgaccccuuccugggcguguacuaccacaagaacaacaagagcuggauggagagcgaguuccggguguacagcagcgccaacaacugcaccuucgaguacgugagccagcccuuccugauggaccuggagggcaagcagggcaacuucaagaaccugcgggaguucguguucaagaacaucgacggcuacuucaagaucuacagcaagcacaccccaaucaaccuggugcgggaucugccccagggcuucucagugcuggagccccugguggaccugcccaucggcaucaacaucacccgguuccagacccugcuggcccugcaccggagcuaccugaccccaggcgacagcagcagcggguggacagcaggcgcggcugcuuacuacgugggcuaccugcagccccggaccuuccugcugaaguacaacgagaacggcaccaucaccgacgccguggacugcgcccuggacccucugagcgagaccaagugcacccugaagagcuucaccguggagaagggcaucuaccagaccagcaacuuccgggugcagcccaccgagagcaucgugcgguuccccaacaucaccaaccugugccccuucggcgagguguucaacgccacccgguucgccagcguguacgccuggaaccggaagcggaucagcaacugcguggccgacuacagcgugcuguacaacagcgccagcuucagcaccuucaagugcuacggcgugagccccaccaagcugaacgaccugugcuucaccaacguguacgccgacagcuucgugauccguggcgacgaggugcggcagaucgcacccggccagacaggcaagaucgccgacuacaacuacaagcugcccgacgacuucaccggcugcgugaucgccuggaacagcaacaaccucgacagcaaggugggcggcaacuacaacuaccuguaccggcuguuccggaagagcaaccugaagcccuucgagcgggacaucagcaccgagaucuaccaagccggcuccaccccuugcaacggcguggagggcuucaacugcuacuucccucugcagagcuacggcuuccagcccaccaacggcgugggcuaccagcccuaccgggugguggugcugagcuucgagcugcugcacgccccagccaccguguguggccccaagaagagcaccaaccuggugaagaacaagugcgugaacuucaacuucaacggccuuaccggcaccggcgugcugaccgagagcaacaagaaauuccugcccuuucagcaguucggccgggacaucgccgacaccaccgacgcugugcgggauccccagacccuggagauccuggacaucaccccuugcagcuucggcggcgugagcgugaucaccccaggcaccaacaccagcaaccagguggccgugcuguaccagggcgugaacugcaccgaggugcccguggccauccacgccgaccagcugacacccaccuggcgggucuacagcaccggcagcaacguguuccagacccgggccgguugccugaucggcgccgagcacgugaacaacagcuacgagugcgacauccccaucggcgccggcaucugugccagcuaccagacccagaccaauucaccccggagggcaaggagcguggccagccagagcaucaucgccuacaccaugagccugggcgccgagaacagcguggccuacagcaacaacagcaucgccauccccaccaacuucaccaucagcgugaccaccgagauucugcccgugagcaugaccaagaccagcguggacugcaccauguacaucugcggcgacagcaccgagugcagcaaccugcugcugcaguacggcagcuucugcacccagcugaaccgggcccugaccggcaucgccguggagcaggacaagaacacccaggagguguucgcccaggugaagcagaucuacaagaccccucccaucaaggacuucggcggcuucaacuucagccagauccugcccgaccccagcaagcccagcaagcggagcuucaucgaggaccugcuguucaacaaggugacccuagccgacgccggcuucaucaagcaguacggcgacugccucggcgacauagccgcccgggaccugaucugcgcccagaaguucaacggccugaccgugcugccuccccugcugaccgacgagaugaucgcccaguacaccagcgcccuguuagccggaaccaucaccagcggcuggacuuucggcgcuggagccgcucugcagauccccuucgccaugcagauggccuaccgguucaacggcaucggcgugacccagaacgugcuguacgagaaccagaagcugaucgccaaccaguucaacagcgccaucggcaagauccaggacagccugagcagcaccgcuagcgcccugggcaagcugcaggacguggugaaccagaacgcccaggcccugaacacccuggugaagcagcugagcagcaacuucggcgccaucagcagcgugcugaacgacauccugagccggcuggacaaggucgaggccgaggugcagaucgaccggcugaucacuggccggcugcagagccugcagaccuacgugacccagcagcugauccgggccgccgagauucgggccagcgccaaccuggccgccaccaagaugagcgagugcgugcugggccagagcaagcggguggacuucugcggcaagggcuaccaccugaugagcuuuccccagagcgcaccccacggagugguguuccugcacgugaccuacgugcccgcccaggagaagaacuucaccaccgccccagccaucugccacgacggcaaggcccacuuuccccgggagggcguguucgugagcaacggcacccacugguucgugacccagcggaacuucuacgagccccagaucaucaccaccgacaacaccuucgugagcggcaacugcgacguggugaucggcaucgugaacaacaccguguacgauccccugcagcccgagcuggacagcuucaaggaggagcuggacaaguacuucaagaaucacaccagccccgacguggaccugggcgacaucagcggcaucaacgccagcguggugaacauccagaaggagaucgaucggcugaacgagguggccaagaaccugaacgagagccugaucgaccugcaggagcugggcaaguacgagcaguacaucaaguggcccugguacaucuggcugggcuucaucgccggccugaucgccaucgugauggugaccaucaugcugugcugcaugaccagcugcugcagcugccugaagggcuguugcagcugcggcagcugcugcaaguucgacgaggacgacagcgagcccgugcugaagggcgugaagcugcacuacaccuga

SEQ ID NO: 23008 - RNA, 3822 nt, Artificial Sequence
  SARS-CoV-2/Wuhan/WIV05/2019__EPI_ISL_402128 spike protein CDS gc (1-1273)(N439K_D614G)
auguucguguuccuggugcugcugccccuggugagcagccagugcgugaaccugaccacccggacccagcugccaccagccuacaccaacagcuucacccggggcgucuacuaccccgacaagguguuccggagcagcguccugcacagcacccaggaccuguuccugcccuucuucagcaacgugaccugguuccacgccauccacgugagcggcaccaacggcaccaagcgguucgacaaccccgugcugcccuucaacgacggcguguacuucgccagcaccgagaagagcaacaucauccggggcuggaucuucggcaccacccuggacagcaagacccagagccugcugaucgugaauaacgccaccaacguggugaucaaggugugcgaguuccaguucugcaacgaccccuuccugggcguguacuaccacaagaacaacaagagcuggauggagagcgaguuccggguguacagcagcgccaacaacugcaccuucgaguacgugagccagcccuuccugauggaccuggagggcaagcagggcaacuucaagaaccugcgggaguucguguucaagaacaucgacggcuacuucaagaucuacagcaagcacaccccaaucaaccuggugcgggaucugccccagggcuucucagcccuggagccccugguggaccugcccaucggcaucaacaucacccgguuccagacccugcuggcccugcaccggagcuaccugaccccaggcgacagcagcagcggguggacagcaggcgcggcugcuuacuacgugggcuaccugcagccccggaccuuccugcugaaguacaacgagaacggcaccaucaccgacgccguggacugcgcccuggacccucugagcgagaccaagugcacccugaagagcuucaccguggagaagggcaucuaccagaccagcaacuuccgggugcagcccaccgagagcaucgugcgguuccccaacaucaccaaccugugccccuucggcgagguguucaacgccacccgguucgccagcguguacgccuggaaccggaagcggaucagcaacugcguggccgacuacagcgugcuguacaacagcgccagcuucagcaccuucaagugcuacggcgugagccccaccaagcugaacgaccugugcuucaccaacguguacgccgacagcuucgugauccguggcgacgaggugcggcagaucgcacccggccagacaggcaagaucgccgacuacaacuacaagcugcccgacgacuucaccggcugcgugaucgccuggaacagcaagaaccucgacagcaaggugggcggcaacuacaacuaccuguaccggcuguuccggaagagcaaccugaagcccuucgagcgggacaucagcaccgagaucuaccaagccggcuccaccccuugcaacggcguggagggcuucaacugcuacuucccucugcagagcuacggcuuccagcccaccaacggcgugggcuaccagcccuaccgggugguggugcugagcuucgagcugcugcacgccccagccaccguguguggccccaagaagagcaccaaccuggugaagaacaagugcgugaacuucaacuucaacggccuuaccggcaccggcgugcugaccgagagcaacaagaaauuccugcccuuucagcaguucggccgggacaucgccgacaccaccgacgcugugcgggauccccagacccuggagauccuggacaucaccccuugcagcuucggcggcgugagcgugaucaccccaggcaccaacaccagcaaccagguggccgugcuguaccagggcgugaacugcaccgaggugcccguggccauccacgccgaccagcugacacccaccuggcgggucuacagcaccggcagcaacguguuccagacccgggccgguugccugaucggcgccgagcacgugaacaacagcuacgagugcgacauccccaucggcgccggcaucugugccagcuaccagacccagaccaauucaccccggagggcaaggagcguggccagccagagcaucaucgccuacaccaugagccugggcgccgagaacagcguggccuacagcaacaacagcaucgccauccccaccaacuucaccaucagcgugaccaccgagauucugcccgugagcaugaccaagaccagcguggacugcaccauguacaucugcggcgacagcaccgagugcagcaaccugcugcugcaguacggcagcuucugcacccagcugaaccgggcccugaccggcaucgccguggagcaggacaagaacacccaggagguguucgcccaggugaagcagaucuacaagaccccucccaucaaggacuucggcggcuucaacuucagccagauccugcccgaccccagcaagcccagcaagcggagcuucaucgaggaccugcuguucaacaaggugacccuagccgacgccggcuucaucaagcaguacggcgacugccucggcgacauagccgcccgggaccugaucugcgcccagaaguucaacggccugaccgugcugccuccccugcugaccgacgagaugaucgcccaguacaccagcgcccuguuagccggaaccaucaccagcggcuggacuuucggcgcuggagccgcucugcagauccccuucgccaugcagauggccuaccgguucaacggcaucggcgugacccagaacgugcuguacgagaaccagaagcugaucgccaaccaguucaacagcgccaucggcaagauccaggacagccugagcagcaccgcuagcgcccugggcaagcugcaggacguggugaaccagaacgcccaggcccugaacacccuggugaagcagcugagcagcaacuucggcgccaucagcagcgugcugaacgacauccugagccggcuggacaaggucgaggccgaggugcagaucgaccggcugaucacuggccggcugcagagccugcagaccuacgugacccagcagcugauccgggccgccgagauucgggccagcgccaaccuggccgccaccaagaugagcgagugcgugcugggccagagcaagcggguggacuucugcggcaagggcuaccaccugaugagcuuuccccagagcgcaccccacggagugguguuccugcacgugaccuacgugcccgcccaggagaagaacuucaccaccgccccagccaucugccacgacggcaaggcccacuuuccccgggagggcguguucgugagcaacggcacccacugguucgugacccagcggaacuucuacgagccccagaucaucaccaccgacaacaccuucgugagcggcaacugcgacguggugaucggcaucgugaacaacaccguguacgauccccugcagcccgagcuggacagcuucaaggaggagcuggacaaguacuucaagaaucacaccagccccgacguggaccugggcgacaucagcggcaucaacgccagcguggugaacauccagaaggagaucgaucggcugaacgagguggccaagaaccugaacgagagccugaucgaccugcaggagcugggcaaguacgagcaguacaucaaguggcccugguacaucuggcugggcuucaucgccggccugaucgccaucgugauggugaccaucaugcugugcugcaugaccagcugcugcagcugccugaagggcuguugcagcugcggcagcugcugcaaguucgacgaggacgacagcgagcccgugcugaagggcgugaagcugcacuacaccuga

SEQ ID NO: 23009 - RNA, 3822 nt, Artificial Sequence
  SARS-CoV-2/Wuhan/WIV05/2019__EPI_ISL_402128 spike protein CDS gc (1-1273)(S477N_D614G)
auguucguguuccuggugcugcugccccuggugagcagccagugcgugaaccugaccacccggacccagcugccaccagccuacaccaacagcuucacccggggcgucuacuaccccgacaagguguuccggagcagcguccugcacagcacccaggaccuguuccugcccuucuucagcaacgugaccugguuccacgccauccacgugagcggcaccaacggcaccaagcgguucgacaaccccgugcugcccuucaacgacggcguguacuucgccagcaccgagaagagcaacaucauccggggcuggaucuucggcaccacccuggacagcaagacccagagccugcugaucgugaauaacgccaccaacguggugaucaaggugugcgaguuccaguucugcaacgaccccuuccugggcguguacuaccacaagaacaacaagagcuggauggagagcgaguuccggguguacagcagcgccaacaacugcaccuucgaguacgugagccagcccuuccugauggaccuggagggcaagcagggcaacuucaagaaccugcgggaguucguguucaagaacaucgacggcuacuucaagaucuacagcaagcacaccccaaucaaccuggugcgggaucugccccagggcuucucagcccuggagccccugguggaccugcccaucggcaucaacaucacccgguuccagacccugcuggcccugcaccggagcuaccugaccccaggcgacagcagcagcggguggacagcaggcgcggcugcuuacuacgugggcuaccugcagccccggaccuuccugcugaaguacaacgagaacggcaccaucaccgacgccguggacugcgcccuggacccucugagcgagaccaagugcacccugaagagcuucaccguggagaagggcaucuaccagaccagcaacuuccgggugcagcccaccgagagcaucgugcgguuccccaacaucaccaaccugugccccuucggcgagguguucaacgccacccgguucgccagcguguacgccuggaaccggaagcggaucagcaacugcguggccgacuacagcgugcuguacaacagcgccagcuucagcaccuucaagugcuacggcgugagccccaccaagcugaacgaccugugcuucaccaacguguacgccgacagcuucgugauccguggcgacgaggugcggcagaucgcacccggccagacaggcaagaucgccgacuacaacuacaagcugcccgacgacuucaccggcugcgugaucgccuggaacagcaacaaccucgacagcaaggugggcggcaacuacaacuaccuguaccggcuguuccggaagagcaaccugaagcccuucgagcgggacaucagcaccgagaucuaccaagccggcaacaccccuugcaacggcguggagggcuucaacugcuacuucccucugcagagcuacggcuuccagcccaccaacggcgugggcuaccagcccuaccgggugguggugcugagcuucgagcugcugcacgccccagccaccguguguggccccaagaagagcaccaaccuggugaagaacaagugcgugaacuucaacuucaacggccuuaccggcaccggcgugcugaccgagagcaacaagaaauuccugcccuuucagcaguucggccgggacaucgccgacaccaccgacgcugugcgggauccccagacccuggagauccuggacaucaccccuugcagcuucggcggcgugagcgugaucaccccaggcaccaacaccagcaaccagguggccgugcuguaccagggcgugaacugcaccgaggugcccguggccauccacgccgaccagcugacacccaccuggcgggucuacagcaccggcagcaacguguuccagacccgggccgguugccugaucggcgccgagcacgugaacaacagcuacgagugcgacauccccaucggcgccggcaucugugccagcuaccagacccagaccaauucaccccggagggcaaggagcguggccagccagagcaucaucgccuacaccaugagccugggcgccgagaacagcguggccuacagcaacaacagcaucgccauccccaccaacuucaccaucagcgugaccaccgagauucugcccgugagcaugaccaagaccagcguggacugcaccauguacaucugcggcgacagcaccgagugcagcaaccugcugcugcaguacggcagcuucugcacccagcugaaccgggcccugaccggcaucgccguggagcaggacaagaacacccaggagguguucgcccaggugaagcagaucuacaagaccccucccaucaaggacuucggcggcuucaacuucagccagauccugcccgaccccagcaagcccagcaagcggagcuucaucgaggaccugcuguucaacaaggugacccuagccgacgccggcuucaucaagcaguacggcgacugccucggcgacauagccgcccgggaccugaucugcgcccagaaguucaacggccugaccgugcugccuccccugcugaccgacgagaugaucgcccaguacaccagcgcccuguuagccggaaccaucaccagcggcuggacuuucggcgcuggagccgcucugcagauccccuucgccaugcagauggccuaccgguucaacggcaucggcgugacccagaacgugcuguacgagaaccagaagcugaucgccaaccaguucaacagcgccaucggcaagauccaggacagccugagcagcaccgcuagcgcccugggcaagcugcaggacguggugaaccagaacgcccaggcccugaacacccuggugaagcagcugagcagcaacuucggcgccaucagcagcgugcugaacgacauccugagccggcuggacaaggucgaggccgaggugcagaucgaccggcugaucacuggccggcugcagagccugcagaccuacgugacccagcagcugauccgggccgccgagauucgggccagcgccaaccuggccgccaccaagaugagcgagugcgugcugggccagagcaagcggguggacuucugcggcaagggcuaccaccugaugagcuuuccccagagcgcaccccacggagugguguuccugcacgugaccuacgugcccgcccaggagaagaacuucaccaccgccccagccaucugccacgacggcaaggcccacuuuccccgggagggcguguucgugagcaacggcacccacugguucgugacccagcggaacuucuacgagccccagaucaucaccaccgacaacaccuucgugagcggcaacugcgacguggugaucggcaucgugaacaacaccguguacgauccccugcagcccgagcuggacagcuucaaggaggagcuggacaaguacuucaagaaucacaccagccccgacguggaccugggcgacaucagcggcaucaacgccagcguggugaacauccagaaggagaucgaucggcugaacgagguggccaagaaccugaacgagagccugaucgaccugcaggagcugggcaaguacgagcaguacaucaaguggcccugguacaucuggcugggcuucaucgccggccugaucgccaucgugauggugaccaucaugcugugcugcaugaccagcugcugcagcugccugaagggcuguugcagcugcggcagcugcugcaaguucgacgaggacgacagcgagcccgugcugaagggcgugaagcugcacuacaccuga

SEQ ID NO: 23010 - RNA, 3822 nt, Artificial Sequence
  SARS-CoV-2/Wuhan/WIV05/2019__EPI_ISL_402128 spike protein CDS gc (1-1273)(N501Y_D614G)
auguucguguuccuggugcugcugccccuggugagcagccagugcgugaaccugaccacccggacccagcugccaccagccuacaccaacagcuucacccggggcgucuacuaccccgacaagguguuccggagcagcguccugcacagcacccaggaccuguuccugcccuucuucagcaacgugaccugguuccacgccauccacgugagcggcaccaacggcaccaagcgguucgacaaccccgugcugcccuucaacgacggcguguacuucgccagcaccgagaagagcaacaucauccggggcuggaucuucggcaccacccuggacagcaagacccagagccugcugaucgugaauaacgccaccaacguggugaucaaggugugcgaguuccaguucugcaacgaccccuuccugggcguguacuaccacaagaacaacaagagcuggauggagagcgaguuccggguguacagcagcgccaacaacugcaccuucgaguacgugagccagcccuuccugauggaccuggagggcaagcagggcaacuucaagaaccugcgggaguucguguucaagaacaucgacggcuacuucaagaucuacagcaagcacaccccaaucaaccuggugcgggaucugccccagggcuucucagcccuggagccccugguggaccugcccaucggcaucaacaucacccgguuccagacccugcuggcccugcaccggagcuaccugaccccaggcgacagcagcagcggguggacagcaggcgcggcugcuuacuacgugggcuaccugcagccccggaccuuccugcugaaguacaacgagaacggcaccaucaccgacgccguggacugcgcccuggacccucugagcgagaccaagugcacccugaagagcuucaccguggagaagggcaucuaccagaccagcaacuuccgggugcagcccaccgagagcaucgugcgguuccccaacaucaccaaccugugccccuucggcgagguguucaacgccacccgguucgccagcguguacgccuggaaccggaagcggaucagcaacugcguggccgacuacagcgugcuguacaacagcgccagcuucagcaccuucaagugcuacggcgugagccccaccaagcugaacgaccugugcuucaccaacguguacgccgacagcuucgugauccguggcgacgaggugcggcagaucgcacccggccagacaggcaagaucgccgacuacaacuacaagcugcccgacgacuucaccggcugcgugaucgccuggaacagcaacaaccucgacagcaaggugggcggcaacuacaacuaccuguaccggcuguuccggaagagcaaccugaagcccuucgagcgggacaucagcaccgagaucuaccaagccggcuccaccccuugcaacggcguggagggcuucaacugcuacuucccucugcagagcuacggcuuccagcccaccuacggcgugggcuaccagcccuaccgggugguggugcugagcuucgagcugcugcacgccccagccaccguguguggccccaagaagagcaccaaccuggugaagaacaagugcgugaacuucaacuucaacggccuuaccggcaccggcgugcugaccgagagcaacaagaaauuccugcccuuucagcaguucggccgggacaucgccgacaccaccgacgcugugcgggauccccagacccuggagauccuggacaucaccccuugcagcuucggcggcgugagcgugaucaccccaggcaccaacaccagcaaccagguggccgugcuguaccagggcgugaacugcaccgaggugcccguggccauccacgccgaccagcugacacccaccuggcgggucuacagcaccggcagcaacguguuccagacccgggccgguugccugaucggcgccgagcacgugaacaacagcuacgagugcgacauccccaucggcgccggcaucugugccagcuaccagacccagaccaauucaccccggagggcaaggagcguggccagccagagcaucaucgccuacaccaugagccugggcgccgagaacagcguggccuacagcaacaacagcaucgccauccccaccaacuucaccaucagcgugaccaccgagauucugcccgugagcaugaccaagaccagcguggacugcaccauguacaucugcggcgacagcaccgagugcagcaaccugcugcugcaguacggcagcuucugcacccagcugaaccgggcccugaccggcaucgccguggagcaggacaagaacacccaggagguguucgcccaggugaagcagaucuacaagaccccucccaucaaggacuucggcggcuucaacuucagccagauccugcccgaccccagcaagcccagcaagcggagcuucaucgaggaccugcuguucaacaaggugacccuagccgacgccggcuucaucaagcaguacggcgacugccucggcgacauagccgcccgggaccugaucugcgcccagaaguucaacggccugaccgugcugccuccccugcugaccgacgagaugaucgcccaguacaccagcgcccuguuagccggaaccaucaccagcggcuggacuuucggcgcuggagccgcucugcagauccccuucgccaugcagauggccuaccgguucaacggcaucggcgugacccagaacgugcuguacgagaaccagaagcugaucgccaaccaguucaacagcgccaucggcaagauccaggacagccugagcagcaccgcuagcgcccugggcaagcugcaggacguggugaaccagaacgcccaggcccugaacacccuggugaagcagcugagcagcaacuucggcgccaucagcagcgugcugaacgacauccugagccggcuggacaaggucgaggccgaggugcagaucgaccggcugaucacuggccggcugcagagccugcagaccuacgugacccagcagcugauccgggccgccgagauucgggccagcgccaaccuggccgccaccaagaugagcgagugcgugcugggccagagcaagcggguggacuucugcggcaagggcuaccaccugaugagcuuuccccagagcgcaccccacggagugguguuccugcacgugaccuacgugcccgcccaggagaagaacuucaccaccgccccagccaucugccacgacggcaaggcccacuuuccccgggagggcguguucgugagcaacggcacccacugguucgugacccagcggaacuucuacgagccccagaucaucaccaccgacaacaccuucgugagcggcaacugcgacguggugaucggcaucgugaacaacaccguguacgauccccugcagcccgagcuggacagcuucaaggaggagcuggacaaguacuucaagaaucacaccagccccgacguggaccugggcgacaucagcggcaucaacgccagcguggugaacauccagaaggagaucgaucggcugaacgagguggccaagaaccugaacgagagccugaucgaccugcaggagcugggcaaguacgagcaguacaucaaguggcccugguacaucuggcugggcuucaucgccggccugaucgccaucgugauggugaccaucaugcugugcugcaugaccagcugcugcagcugccugaagggcuguugcagcugcggcagcugcugcaaguucgacgaggacgacagcgagcccgugcugaagggcgugaagcugcacuacaccuga

SEQ ID NO: 23011 - RNA, 3816 nt, Artificial Sequence
  SARS-CoV-2/Wuhan/WIV05/2019__EPI_ISL_402128 spike protein CDS gc (1-1273)(H69del_V70del_D614G)
auguucguguuccuggugcugcugccccuggugagcagccagugcgugaaccugaccacccggacccagcugccaccagccuacaccaacagcuucacccggggcgucuacuaccccgacaagguguuccggagcagcguccugcacagcacccaggaccuguuccugcccuucuucagcaacgugaccugguuccacgccaucagcggcaccaacggcaccaagcgguucgacaaccccgugcugcccuucaacgacggcguguacuucgccagcaccgagaagagcaacaucauccggggcuggaucuucggcaccacccuggacagcaagacccagagccugcugaucgugaauaacgccaccaacguggugaucaaggugugcgaguuccaguucugcaacgaccccuuccugggcguguacuaccacaagaacaacaagagcuggauggagagcgaguuccggguguacagcagcgccaacaacugcaccuucgaguacgugagccagcccuuccugauggaccuggagggcaagcagggcaacuucaagaaccugcgggaguucguguucaagaacaucgacggcuacuucaagaucuacagcaagcacaccccaaucaaccuggugcgggaucugccccagggcuucucagcccuggagccccugguggaccugcccaucggcaucaacaucacccgguuccagacccugcuggcccugcaccggagcuaccugaccccaggcgacagcagcagcggguggacagcaggcgcggcugcuuacuacgugggcuaccugcagccccggaccuuccugcugaaguacaacgagaacggcaccaucaccgacgccguggacugcgcccuggacccucugagcgagaccaagugcacccugaagagcuucaccguggagaagggcaucuaccagaccagcaacuuccgggugcagcccaccgagagcaucgugcgguuccccaacaucaccaaccugugccccuucggcgagguguucaacgccacccgguucgccagcguguacgccuggaaccggaagcggaucagcaacugcguggccgacuacagcgugcuguacaacagcgccagcuucagcaccuucaagugcuacggcgugagccccaccaagcugaacgaccugugcuucaccaacguguacgccgacagcuucgugauccguggcgacgaggugcggcagaucgcacccggccagacaggcaagaucgccgacuacaacuacaagcugcccgacgacuucaccggcugcgugaucgccuggaacagcaacaaccucgacagcaaggugggcggcaacuacaacuaccuguaccggcuguuccggaagagcaaccugaagcccuucgagcgggacaucagcaccgagaucuaccaagccggcuccaccccuugcaacggcguggagggcuucaacugcuacuucccucugcagagcuacggcuuccagcccaccaacggcgugggcuaccagcccuaccgggugguggugcugagcuucgagcugcugcacgccccagccaccguguguggccccaagaagagcaccaaccuggugaagaacaagugcgugaacuucaacuucaacggccuuaccggcaccggcgugcugaccgagagcaacaagaaauuccugcccuuucagcaguucggccgggacaucgccgacaccaccgacgcugugcgggauccccagacccuggagauccuggacaucaccccuugcagcuucggcggcgugagcgugaucaccccaggcaccaacaccagcaaccagguggccgugcuguaccagggcgugaacugcaccgaggugcccguggccauccacgccgaccagcugacacccaccuggcgggucuacagcaccggcagcaacguguuccagacccgggccgguugccugaucggcgccgagcacgugaacaacagcuacgagugcgacauccccaucggcgccggcaucugugccagcuaccagacccagaccaauucaccccggagggcaaggagcguggccagccagagcaucaucgccuacaccaugagccugggcgccgagaacagcguggccuacagcaacaacagcaucgccauccccaccaacuucaccaucagcgugaccaccgagauucugcccgugagcaugaccaagaccagcguggacugcaccauguacaucugcggcgacagcaccgagugcagcaaccugcugcugcaguacggcagcuucugcacccagcugaaccgggcccugaccggcaucgccguggagcaggacaagaacacccaggagguguucgcccaggugaagcagaucuacaagaccccucccaucaaggacuucggcggcuucaacuucagccagauccugcccgaccccagcaagcccagcaagcggagcuucaucgaggaccugcuguucaacaaggugacccuagccgacgccggcuucaucaagcaguacggcgacugccucggcgacauagccgcccgggaccugaucugcgcccagaaguucaacggccugaccgugcugccuccccugcugaccgacgagaugaucgcccaguacaccagcgcccuguuagccggaaccaucaccagcggcuggacuuucggcgcuggagccgcucugcagauccccuucgccaugcagauggccuaccgguucaacggcaucggcgugacccagaacgugcuguacgagaaccagaagcugaucgccaaccaguucaacagcgccaucggcaagauccaggacagccugagcagcaccgcuagcgcccugggcaagcugcaggacguggugaaccagaacgcccaggcccugaacacccuggugaagcagcugagcagcaacuucggcgccaucagcagcgugcugaacgacauccugagccggcuggacaaggucgaggccgaggugcagaucgaccggcugaucacuggccggcugcagagccugcagaccuacgugacccagcagcugauccgggccgccgagauucgggccagcgccaaccuggccgccaccaagaugagcgagugcgugcugggccagagcaagcggguggacuucugcggcaagggcuaccaccugaugagcuuuccccagagcgcaccccacggagugguguuccugcacgugaccuacgugcccgcccaggagaagaacuucaccaccgccccagccaucugccacgacggcaaggcccacuuuccccgggagggcguguucgugagcaacggcacccacugguucgugacccagcggaacuucuacgagccccagaucaucaccaccgacaacaccuucgugagcggcaacugcgacguggugaucggcaucgugaacaacaccguguacgauccccugcagcccgagcuggacagcuucaaggaggagcuggacaaguacuucaagaaucacaccagccccgacguggaccugggcgacaucagcggcaucaacgccagcguggugaacauccagaaggagaucgaucggcugaacgagguggccaagaaccugaacgagagccugaucgaccugcaggagcugggcaaguacgagcaguacaucaaguggcccugguacaucuggcugggcuucaucgccggccugaucgccaucgugauggugaccaucaugcugugcugcaugaccagcugcugcagcugccugaagggcuguugcagcugcggcagcugcugcaaguucgacgaggacgacagcgagcccgugcugaagggcgugaagcugcacuacaccuga

SEQ ID NO: 23012 - RNA, 3822 nt, Artificial Sequence
  SARS-CoV-2/Wuhan/WIV05/2019__EPI_ISL_402128 spike protein CDS gc (1-1273)(Y453F_D614G)
auguucguguuccuggugcugcugccccuggugagcagccagugcgugaaccugaccacccggacccagcugccaccagccuacaccaacagcuucacccggggcgucuacuaccccgacaagguguuccggagcagcguccugcacagcacccaggaccuguuccugcccuucuucagcaacgugaccugguuccacgccauccacgugagcggcaccaacggcaccaagcgguucgacaaccccgugcugcccuucaacgacggcguguacuucgccagcaccgagaagagcaacaucauccggggcuggaucuucggcaccacccuggacagcaagacccagagccugcugaucgugaauaacgccaccaacguggugaucaaggugugcgaguuccaguucugcaacgaccccuuccugggcguguacuaccacaagaacaacaagagcuggauggagagcgaguuccggguguacagcagcgccaacaacugcaccuucgaguacgugagccagcccuuccugauggaccuggagggcaagcagggcaacuucaagaaccugcgggaguucguguucaagaacaucgacggcuacuucaagaucuacagcaagcacaccccaaucaaccuggugcgggaucugccccagggcuucucagcccuggagccccugguggaccugcccaucggcaucaacaucacccgguuccagacccugcuggcccugcaccggagcuaccugaccccaggcgacagcagcagcggguggacagcaggcgcggcugcuuacuacgugggcuaccugcagccccggaccuuccugcugaaguacaacgagaacggcaccaucaccgacgccguggacugcgcccuggacccucugagcgagaccaagugcacccugaagagcuucaccguggagaagggcaucuaccagaccagcaacuuccgggugcagcccaccgagagcaucgugcgguuccccaacaucaccaaccugugccccuucggcgagguguucaacgccacccgguucgccagcguguacgccuggaaccggaagcggaucagcaacugcguggccgacuacagcgugcuguacaacagcgccagcuucagcaccuucaagugcuacggcgugagccccaccaagcugaacgaccugugcuucaccaacguguacgccgacagcuucgugauccguggcgacgaggugcggcagaucgcacccggccagacaggcaagaucgccgacuacaacuacaagcugcccgacgacuucaccggcugcgugaucgccuggaacagcaacaaccucgacagcaaggugggcggcaacuacaacuaccuguuccggcuguuccggaagagcaaccugaagcccuucgagcgggacaucagcaccgagaucuaccaagccggcuccaccccuugcaacggcguggagggcuucaacugcuacuucccucugcagagcuacggcuuccagcccaccaacggcgugggcuaccagcccuaccgggugguggugcugagcuucgagcugcugcacgccccagccaccguguguggccccaagaagagcaccaaccuggugaagaacaagugcgugaacuucaacuucaacggccuuaccggcaccggcgugcugaccgagagcaacaagaaauuccugcccuuucagcaguucggccgggacaucgccgacaccaccgacgcugugcgggauccccagacccuggagauccuggacaucaccccuugcagcuucggcggcgugagcgugaucaccccaggcaccaacaccagcaaccagguggccgugcuguaccagggcgugaacugcaccgaggugcccguggccauccacgccgaccagcugacacccaccuggcgggucuacagcaccggcagcaacguguuccagacccgggccgguugccugaucggcgccgagcacgugaacaacagcuacgagugcgacauccccaucggcgccggcaucugugccagcuaccagacccagaccaauucaccccggagggcaaggagcguggccagccagagcaucaucgccuacaccaugagccugggcgccgagaacagcguggccuacagcaacaacagcaucgccauccccaccaacuucaccaucagcgugaccaccgagauucugcccgugagcaugaccaagaccagcguggacugcaccauguacaucugcggcgacagcaccgagugcagcaaccugcugcugcaguacggcagcuucugcacccagcugaaccgggcccugaccggcaucgccguggagcaggacaagaacacccaggagguguucgcccaggugaagcagaucuacaagaccccucccaucaaggacuucggcggcuucaacuucagccagauccugcccgaccccagcaagcccagcaagcggagcuucaucgaggaccugcuguucaacaaggugacccuagccgacgccggcuucaucaagcaguacggcgacugccucggcgacauagccgcccgggaccugaucugcgcccagaaguucaacggccugaccgugcugccuccccugcugaccgacgagaugaucgcccaguacaccagcgcccuguuagccggaaccaucaccagcggcuggacuuucggcgcuggagccgcucugcagauccccuucgccaugcagauggccuaccgguucaacggcaucggcgugacccagaacgugcuguacgagaaccagaagcugaucgccaaccaguucaacagcgccaucggcaagauccaggacagccugagcagcaccgcuagcgcccugggcaagcugcaggacguggugaaccagaacgcccaggcccugaacacccuggugaagcagcugagcagcaacuucggcgccaucagcagcgugcugaacgacauccugagccggcuggacaaggucgaggccgaggugcagaucgaccggcugaucacuggccggcugcagagccugcagaccuacgugacccagcagcugauccgggccgccgagauucgggccagcgccaaccuggccgccaccaagaugagcgagugcgugcugggccagagcaagcggguggacuucugcggcaagggcuaccaccugaugagcuuuccccagagcgcaccccacggagugguguuccugcacgugaccuacgugcccgcccaggagaagaacuucaccaccgccccagccaucugccacgacggcaaggcccacuuuccccgggagggcguguucgugagcaacggcacccacugguucgugacccagcggaacuucuacgagccccagaucaucaccaccgacaacaccuucgugagcggcaacugcgacguggugaucggcaucgugaacaacaccguguacgauccccugcagcccgagcuggacagcuucaaggaggagcuggacaaguacuucaagaaucacaccagccccgacguggaccugggcgacaucagcggcaucaacgccagcguggugaacauccagaaggagaucgaucggcugaacgagguggccaagaaccugaacgagagccugaucgaccugcaggagcugggcaaguacgagcaguacaucaaguggcccugguacaucuggcugggcuucaucgccggccugaucgccaucgugauggugaccaucaugcugugcugcaugaccagcugcugcagcugccugaagggcuguugcagcugcggcagcugcugcaaguucgacgaggacgacagcgagcccgugcugaagggcgugaagcugcacuacaccuga

SEQ ID NO: 23013 - RNA, 3822 nt, Artificial Sequence
  SARS-CoV-2/Wuhan/WIV05/2019__EPI_ISL_402128 spike protein CDS gc (1-1273)(D614G_I692V)
auguucguguuccuggugcugcugccccuggugagcagccagugcgugaaccugaccacccggacccagcugccaccagccuacaccaacagcuucacccggggcgucuacuaccccgacaagguguuccggagcagcguccugcacagcacccaggaccuguuccugcccuucuucagcaacgugaccugguuccacgccauccacgugagcggcaccaacggcaccaagcgguucgacaaccccgugcugcccuucaacgacggcguguacuucgccagcaccgagaagagcaacaucauccggggcuggaucuucggcaccacccuggacagcaagacccagagccugcugaucgugaauaacgccaccaacguggugaucaaggugugcgaguuccaguucugcaacgaccccuuccugggcguguacuaccacaagaacaacaagagcuggauggagagcgaguuccggguguacagcagcgccaacaacugcaccuucgaguacgugagccagcccuuccugauggaccuggagggcaagcagggcaacuucaagaaccugcgggaguucguguucaagaacaucgacggcuacuucaagaucuacagcaagcacaccccaaucaaccuggugcgggaucugccccagggcuucucagcccuggagccccugguggaccugcccaucggcaucaacaucacccgguuccagacccugcuggcccugcaccggagcuaccugaccccaggcgacagcagcagcggguggacagcaggcgcggcugcuuacuacgugggcuaccugcagccccggaccuuccugcugaaguacaacgagaacggcaccaucaccgacgccguggacugcgcccuggacccucugagcgagaccaagugcacccugaagagcuucaccguggagaagggcaucuaccagaccagcaacuuccgggugcagcccaccgagagcaucgugcgguuccccaacaucaccaaccugugccccuucggcgagguguucaacgccacccgguucgccagcguguacgccuggaaccggaagcggaucagcaacugcguggccgacuacagcgugcuguacaacagcgccagcuucagcaccuucaagugcuacggcgugagccccaccaagcugaacgaccugugcuucaccaacguguacgccgacagcuucgugauccguggcgacgaggugcggcagaucgcacccggccagacaggcaagaucgccgacuacaacuacaagcugcccgacgacuucaccggcugcgugaucgccuggaacagcaacaaccucgacagcaaggugggcggcaacuacaacuaccuguaccggcuguuccggaagagcaaccugaagcccuucgagcgggacaucagcaccgagaucuaccaagccggcuccaccccuugcaacggcguggagggcuucaacugcuacuucccucugcagagcuacggcuuccagcccaccaacggcgugggcuaccagcccuaccgggugguggugcugagcuucgagcugcugcacgccccagccaccguguguggccccaagaagagcaccaaccuggugaagaacaagugcgugaacuucaacuucaacggccuuaccggcaccggcgugcugaccgagagcaacaagaaauuccugcccuuucagcaguucggccgggacaucgccgacaccaccgacgcugugcgggauccccagacccuggagauccuggacaucaccccuugcagcuucggcggcgugagcgugaucaccccaggcaccaacaccagcaaccagguggccgugcuguaccagggcgugaacugcaccgaggugcccguggccauccacgccgaccagcugacacccaccuggcgggucuacagcaccggcagcaacguguuccagacccgggccgguugccugaucggcgccgagcacgugaacaacagcuacgagugcgacauccccaucggcgccggcaucugugccagcuaccagacccagaccaauucaccccggagggcaaggagcguggccagccagagcgugaucgccuacaccaugagccugggcgccgagaacagcguggccuacagcaacaacagcaucgccauccccaccaacuucaccaucagcgugaccaccgagauucugcccgugagcaugaccaagaccagcguggacugcaccauguacaucugcggcgacagcaccgagugcagcaaccugcugcugcaguacggcagcuucugcacccagcugaaccgggcccugaccggcaucgccguggagcaggacaagaacacccaggagguguucgcccaggugaagcagaucuacaagaccccucccaucaaggacuucggcggcuucaacuucagccagauccugcccgaccccagcaagcccagcaagcggagcuucaucgaggaccugcuguucaacaaggugacccuagccgacgccggcuucaucaagcaguacggcgacugccucggcgacauagccgcccgggaccugaucugcgcccagaaguucaacggccugaccgugcugccuccccugcugaccgacgagaugaucgcccaguacaccagcgcccuguuagccggaaccaucaccagcggcuggacuuucggcgcuggagccgcucugcagauccccuucgccaugcagauggccuaccgguucaacggcaucggcgugacccagaacgugcuguacgagaaccagaagcugaucgccaaccaguucaacagcgccaucggcaagauccaggacagccugagcagcaccgcuagcgcccugggcaagcugcaggacguggugaaccagaacgcccaggcccugaacacccuggugaagcagcugagcagcaacuucggcgccaucagcagcgugcugaacgacauccugagccggcuggacaaggucgaggccgaggugcagaucgaccggcugaucacuggccggcugcagagccugcagaccuacgugacccagcagcugauccgggccgccgagauucgggccagcgccaaccuggccgccaccaagaugagcgagugcgugcugggccagagcaagcggguggacuucugcggcaagggcuaccaccugaugagcuuuccccagagcgcaccccacggagugguguuccugcacgugaccuacgugcccgcccaggagaagaacuucaccaccgccccagccaucugccacgacggcaaggcccacuuuccccgggagggcguguucgugagcaacggcacccacugguucgugacccagcggaacuucuacgagccccagaucaucaccaccgacaacaccuucgugagcggcaacugcgacguggugaucggcaucgugaacaacaccguguacgauccccugcagcccgagcuggacagcuucaaggaggagcuggacaaguacuucaagaaucacaccagccccgacguggaccugggcgacaucagcggcaucaacgccagcguggugaacauccagaaggagaucgaucggcugaacgagguggccaagaaccugaacgagagccugaucgaccugcaggagcugggcaaguacgagcaguacaucaaguggcccugguacaucuggcugggcuucaucgccggccugaucgccaucgugauggugaccaucaugcugugcugcaugaccagcugcugcagcugccugaagggcuguugcagcugcggcagcugcugcaaguucgacgaggacgacagcgagcccgugcugaagggcgugaagcugcacuacaccuga

SEQ ID NO: 23014 - RNA, 3822 nt, Artificial Sequence
  SARS-CoV-2/Wuhan/WIV05/2019__EPI_ISL_402128 spike protein CDS gc (1-1273)(D614G_M1229I)
auguucguguuccuggugcugcugccccuggugagcagccagugcgugaaccugaccacccggacccagcugccaccagccuacaccaacagcuucacccggggcgucuacuaccccgacaagguguuccggagcagcguccugcacagcacccaggaccuguuccugcccuucuucagcaacgugaccugguuccacgccauccacgugagcggcaccaacggcaccaagcgguucgacaaccccgugcugcccuucaacgacggcguguacuucgccagcaccgagaagagcaacaucauccggggcuggaucuucggcaccacccuggacagcaagacccagagccugcugaucgugaauaacgccaccaacguggugaucaaggugugcgaguuccaguucugcaacgaccccuuccugggcguguacuaccacaagaacaacaagagcuggauggagagcgaguuccggguguacagcagcgccaacaacugcaccuucgaguacgugagccagcccuuccugauggaccuggagggcaagcagggcaacuucaagaaccugcgggaguucguguucaagaacaucgacggcuacuucaagaucuacagcaagcacaccccaaucaaccuggugcgggaucugccccagggcuucucagcccuggagccccugguggaccugcccaucggcaucaacaucacccgguuccagacccugcuggcccugcaccggagcuaccugaccccaggcgacagcagcagcggguggacagcaggcgcggcugcuuacuacgugggcuaccugcagccccggaccuuccugcugaaguacaacgagaacggcaccaucaccgacgccguggacugcgcccuggacccucugagcgagaccaagugcacccugaagagcuucaccguggagaagggcaucuaccagaccagcaacuuccgggugcagcccaccgagagcaucgugcgguuccccaacaucaccaaccugugccccuucggcgagguguucaacgccacccgguucgccagcguguacgccuggaaccggaagcggaucagcaacugcguggccgacuacagcgugcuguacaacagcgccagcuucagcaccuucaagugcuacggcgugagccccaccaagcugaacgaccugugcuucaccaacguguacgccgacagcuucgugauccguggcgacgaggugcggcagaucgcacccggccagacaggcaagaucgccgacuacaacuacaagcugcccgacgacuucaccggcugcgugaucgccuggaacagcaacaaccucgacagcaaggugggcggcaacuacaacuaccuguaccggcuguuccggaagagcaaccugaagcccuucgagcgggacaucagcaccgagaucuaccaagccggcuccaccccuugcaacggcguggagggcuucaacugcuacuucccucugcagagcuacggcuuccagcccaccaacggcgugggcuaccagcccuaccgggugguggugcugagcuucgagcugcugcacgccccagccaccguguguggccccaagaagagcaccaaccuggugaagaacaagugcgugaacuucaacuucaacggccuuaccggcaccggcgugcugaccgagagcaacaagaaauuccugcccuuucagcaguucggccgggacaucgccgacaccaccgacgcugugcgggauccccagacccuggagauccuggacaucaccccuugcagcuucggcggcgugagcgugaucaccccaggcaccaacaccagcaaccagguggccgugcuguaccagggcgugaacugcaccgaggugcccguggccauccacgccgaccagcugacacccaccuggcgggucuacagcaccggcagcaacguguuccagacccgggccgguugccugaucggcgccgagcacgugaacaacagcuacgagugcgacauccccaucggcgccggcaucugugccagcuaccagacccagaccaauucaccccggagggcaaggagcguggccagccagagcaucaucgccuacaccaugagccugggcgccgagaacagcguggccuacagcaacaacagcaucgccauccccaccaacuucaccaucagcgugaccaccgagauucugcccgugagcaugaccaagaccagcguggacugcaccauguacaucugcggcgacagcaccgagugcagcaaccugcugcugcaguacggcagcuucugcacccagcugaaccgggcccugaccggcaucgccguggagcaggacaagaacacccaggagguguucgcccaggugaagcagaucuacaagaccccucccaucaaggacuucggcggcuucaacuucagccagauccugcccgaccccagcaagcccagcaagcggagcuucaucgaggaccugcuguucaacaaggugacccuagccgacgccggcuucaucaagcaguacggcgacugccucggcgacauagccgcccgggaccugaucugcgcccagaaguucaacggccugaccgugcugccuccccugcugaccgacgagaugaucgcccaguacaccagcgcccuguuagccggaaccaucaccagcggcuggacuuucggcgcuggagccgcucugcagauccccuucgccaugcagauggccuaccgguucaacggcaucggcgugacccagaacgugcuguacgagaaccagaagcugaucgccaaccaguucaacagcgccaucggcaagauccaggacagccugagcagcaccgcuagcgcccugggcaagcugcaggacguggugaaccagaacgcccaggcccugaacacccuggugaagcagcugagcagcaacuucggcgccaucagcagcgugcugaacgacauccugagccggcuggacaaggucgaggccgaggugcagaucgaccggcugaucacuggccggcugcagagccugcagaccuacgugacccagcagcugauccgggccgccgagauucgggccagcgccaaccuggccgccaccaagaugagcgagugcgugcugggccagagcaagcggguggacuucugcggcaagggcuaccaccugaugagcuuuccccagagcgcaccccacggagugguguuccugcacgugaccuacgugcccgcccaggagaagaacuucaccaccgccccagccaucugccacgacggcaaggcccacuuuccccgggagggcguguucgugagcaacggcacccacugguucgugacccagcggaacuucuacgagccccagaucaucaccaccgacaacaccuucgugagcggcaacugcgacguggugaucggcaucgugaacaacaccguguacgauccccugcagcccgagcuggacagcuucaaggaggagcuggacaaguacuucaagaaucacaccagccccgacguggaccugggcgacaucagcggcaucaacgccagcguggugaacauccagaaggagaucgaucggcugaacgagguggccaagaaccugaacgagagccugaucgaccugcaggagcugggcaaguacgagcaguacaucaaguggcccugguacaucuggcugggcuucaucgccggccugaucgccaucgugaucgugaccaucaugcugugcugcaugaccagcugcugcagcugccugaagggcuguugcagcugcggcagcugcugcaaguucgacgaggacgacagcgagcccgugcugaagggcgugaagcugcacuacaccuga

SEQ ID NO: 23015 - RNA, 3816 nt, Artificial Sequence
  SARS-CoV-2/Wuhan/WIV05/2019__EPI_ISL_402128 spike protein CDS gc (1-1273)(H69del_V70del_A222V_Y453F_S477N_D614G_I692V)
auguucguguuccuggugcugcugccccuggugagcagccagugcgugaaccugaccacccggacccagcugccaccagccuacaccaacagcuucacccggggcgucuacuaccccgacaagguguuccggagcagcguccugcacagcacccaggaccuguuccugcccuucuucagcaacgugaccugguuccacgccaucagcggcaccaacggcaccaagcgguucgacaaccccgugcugcccuucaacgacggcguguacuucgccagcaccgagaagagcaacaucauccggggcuggaucuucggcaccacccuggacagcaagacccagagccugcugaucgugaauaacgccaccaacguggugaucaaggugugcgaguuccaguucugcaacgaccccuuccugggcguguacuaccacaagaacaacaagagcuggauggagagcgaguuccggguguacagcagcgccaacaacugcaccuucgaguacgugagccagcccuuccugauggaccuggagggcaagcagggcaacuucaagaaccugcgggaguucguguucaagaacaucgacggcuacuucaagaucuacagcaagcacaccccaaucaaccuggugcgggaucugccccagggcuucucagugcuggagccccugguggaccugcccaucggcaucaacaucacccgguuccagacccugcuggcccugcaccggagcuaccugaccccaggcgacagcagcagcggguggacagcaggcgcggcugcuuacuacgugggcuaccugcagccccggaccuuccugcugaaguacaacgagaacggcaccaucaccgacgccguggacugcgcccuggacccucugagcgagaccaagugcacccugaagagcuucaccguggagaagggcaucuaccagaccagcaacuuccgggugcagcccaccgagagcaucgugcgguuccccaacaucaccaaccugugccccuucggcgagguguucaacgccacccgguucgccagcguguacgccuggaaccggaagcggaucagcaacugcguggccgacuacagcgugcuguacaacagcgccagcuucagcaccuucaagugcuacggcgugagccccaccaagcugaacgaccugugcuucaccaacguguacgccgacagcuucgugauccguggcgacgaggugcggcagaucgcacccggccagacaggcaagaucgccgacuacaacuacaagcugcccgacgacuucaccggcugcgugaucgccuggaacagcaacaaccucgacagcaaggugggcggcaacuacaacuaccuguuccggcuguuccggaagagcaaccugaagcccuucgagcgggacaucagcaccgagaucuaccaagccggcaacaccccuugcaacggcguggagggcuucaacugcuacuucccucugcagagcuacggcuuccagcccaccaacggcgugggcuaccagcccuaccgggugguggugcugagcuucgagcugcugcacgccccagccaccguguguggccccaagaagagcaccaaccuggugaagaacaagugcgugaacuucaacuucaacggccuuaccggcaccggcgugcugaccgagagcaacaagaaauuccugcccuuucagcaguucggccgggacaucgccgacaccaccgacgcugugcgggauccccagacccuggagauccuggacaucaccccuugcagcuucggcggcgugagcgugaucaccccaggcaccaacaccagcaaccagguggccgugcuguaccagggcgugaacugcaccgaggugcccguggccauccacgccgaccagcugacacccaccuggcgggucuacagcaccggcagcaacguguuccagacccgggccgguugccugaucggcgccgagcacgugaacaacagcuacgagugcgacauccccaucggcgccggcaucugugccagcuaccagacccagaccaauucaccccggagggcaaggagcguggccagccagagcgugaucgccuacaccaugagccugggcgccgagaacagcguggccuacagcaacaacagcaucgccauccccaccaacuucaccaucagcgugaccaccgagauucugcccgugagcaugaccaagaccagcguggacugcaccauguacaucugcggcgacagcaccgagugcagcaaccugcugcugcaguacggcagcuucugcacccagcugaaccgggcccugaccggcaucgccguggagcaggacaagaacacccaggagguguucgcccaggugaagcagaucuacaagaccccucccaucaaggacuucggcggcuucaacuucagccagauccugcccgaccccagcaagcccagcaagcggagcuucaucgaggaccugcuguucaacaaggugacccuagccgacgccggcuucaucaagcaguacggcgacugccucggcgacauagccgcccgggaccugaucugcgcccagaaguucaacggccugaccgugcugccuccccugcugaccgacgagaugaucgcccaguacaccagcgcccuguuagccggaaccaucaccagcggcuggacuuucggcgcuggagccgcucugcagauccccuucgccaugcagauggccuaccgguucaacggcaucggcgugacccagaacgugcuguacgagaaccagaagcugaucgccaaccaguucaacagcgccaucggcaagauccaggacagccugagcagcaccgcuagcgcccugggcaagcugcaggacguggugaaccagaacgcccaggcccugaacacccuggugaagcagcugagcagcaacuucggcgccaucagcagcgugcugaacgacauccugagccggcuggacaaggucgaggccgaggugcagaucgaccggcugaucacuggccggcugcagagccugcagaccuacgugacccagcagcugauccgggccgccgagauucgggccagcgccaaccuggccgccaccaagaugagcgagugcgugcugggccagagcaagcggguggacuucugcggcaagggcuaccaccugaugagcuuuccccagagcgcaccccacggagugguguuccugcacgugaccuacgugcccgcccaggagaagaacuucaccaccgccccagccaucugccacgacggcaaggcccacuuuccccgggagggcguguucgugagcaacggcacccacugguucgugacccagcggaacuucuacgagccccagaucaucaccaccgacaacaccuucgugagcggcaacugcgacguggugaucggcaucgugaacaacaccguguacgauccccugcagcccgagcuggacagcuucaaggaggagcuggacaaguacuucaagaaucacaccagccccgacguggaccugggcgacaucagcggcaucaacgccagcguggugaacauccagaaggagaucgaucggcugaacgagguggccaagaaccugaacgagagccugaucgaccugcaggagcugggcaaguacgagcaguacaucaaguggcccugguacaucuggcugggcuucaucgccggccugaucgccaucgugauggugaccaucaugcugugcugcaugaccagcugcugcagcugccugaagggcuguugcagcugcggcagcugcugcaaguucgacgaggacgacagcgagcccgugcugaagggcgugaagcugcacuacaccuga

SEQ ID NO: 23016 - RNA, 3816 nt, Artificial Sequence
  SARS-CoV-2/Wuhan/WIV05/2019__EPI_ISL_402128 spike protein CDS gc (1-1273)(H69del_V70del_Y453F_D614G_I692V_M1229I)
auguucguguuccuggugcugcugccccuggugagcagccagugcgugaaccugaccacccggacccagcugccaccagccuacaccaacagcuucacccggggcgucuacuaccccgacaagguguuccggagcagcguccugcacagcacccaggaccuguuccugcccuucuucagcaacgugaccugguuccacgccaucagcggcaccaacggcaccaagcgguucgacaaccccgugcugcccuucaacgacggcguguacuucgccagcaccgagaagagcaacaucauccggggcuggaucuucggcaccacccuggacagcaagacccagagccugcugaucgugaauaacgccaccaacguggugaucaaggugugcgaguuccaguucugcaacgaccccuuccugggcguguacuaccacaagaacaacaagagcuggauggagagcgaguuccggguguacagcagcgccaacaacugcaccuucgaguacgugagccagcccuuccugauggaccuggagggcaagcagggcaacuucaagaaccugcgggaguucguguucaagaacaucgacggcuacuucaagaucuacagcaagcacaccccaaucaaccuggugcgggaucugccccagggcuucucagcccuggagccccugguggaccugcccaucggcaucaacaucacccgguuccagacccugcuggcccugcaccggagcuaccugaccccaggcgacagcagcagcggguggacagcaggcgcggcugcuuacuacgugggcuaccugcagccccggaccuuccugcugaaguacaacgagaacggcaccaucaccgacgccguggacugcgcccuggacccucugagcgagaccaagugcacccugaagagcuucaccguggagaagggcaucuaccagaccagcaacuuccgggugcagcccaccgagagcaucgugcgguuccccaacaucaccaaccugugccccuucggcgagguguucaacgccacccgguucgccagcguguacgccuggaaccggaagcggaucagcaacugcguggccgacuacagcgugcuguacaacagcgccagcuucagcaccuucaagugcuacggcgugagccccaccaagcugaacgaccugugcuucaccaacguguacgccgacagcuucgugauccguggcgacgaggugcggcagaucgcacccggccagacaggcaagaucgccgacuacaacuacaagcugcccgacgacuucaccggcugcgugaucgccuggaacagcaacaaccucgacagcaaggugggcggcaacuacaacuaccuguuccggcuguuccggaagagcaaccugaagcccuucgagcgggacaucagcaccgagaucuaccaagccggcuccaccccuugcaacggcguggagggcuucaacugcuacuucccucugcagagcuacggcuuccagcccaccaacggcgugggcuaccagcccuaccgggugguggugcugagcuucgagcugcugcacgccccagccaccguguguggccccaagaagagcaccaaccuggugaagaacaagugcgugaacuucaacuucaacggccuuaccggcaccggcgugcugaccgagagcaacaagaaauuccugcccuuucagcaguucggccgggacaucgccgacaccaccgacgcugugcgggauccccagacccuggagauccuggacaucaccccuugcagcuucggcggcgugagcgugaucaccccaggcaccaacaccagcaaccagguggccgugcuguaccagggcgugaacugcaccgaggugcccguggccauccacgccgaccagcugacacccaccuggcgggucuacagcaccggcagcaacguguuccagacccgggccgguugccugaucggcgccgagcacgugaacaacagcuacgagugcgacauccccaucggcgccggcaucugugccagcuaccagacccagaccaauucaccccggagggcaaggagcguggccagccagagcgugaucgccuacaccaugagccugggcgccgagaacagcguggccuacagcaacaacagcaucgccauccccaccaacuucaccaucagcgugaccaccgagauucugcccgugagcaugaccaagaccagcguggacugcaccauguacaucugcggcgacagcaccgagugcagcaaccugcugcugcaguacggcagcuucugcacccagcugaaccgggcccugaccggcaucgccguggagcaggacaagaacacccaggagguguucgcccaggugaagcagaucuacaagaccccucccaucaaggacuucggcggcuucaacuucagccagauccugcccgaccccagcaagcccagcaagcggagcuucaucgaggaccugcuguucaacaaggugacccuagccgacgccggcuucaucaagcaguacggcgacugccucggcgacauagccgcccgggaccugaucugcgcccagaaguucaacggccugaccgugcugccuccccugcugaccgacgagaugaucgcccaguacaccagcgcccuguuagccggaaccaucaccagcggcuggacuuucggcgcuggagccgcucugcagauccccuucgccaugcagauggccuaccgguucaacggcaucggcgugacccagaacgugcuguacgagaaccagaagcugaucgccaaccaguucaacagcgccaucggcaagauccaggacagccugagcagcaccgcuagcgcccugggcaagcugcaggacguggugaaccagaacgcccaggcccugaacacccuggugaagcagcugagcagcaacuucggcgccaucagcagcgugcugaacgacauccugagccggcuggacaaggucgaggccgaggugcagaucgaccggcugaucacuggccggcugcagagccugcagaccuacgugacccagcagcugauccgggccgccgagauucgggccagcgccaaccuggccgccaccaagaugagcgagugcgugcugggccagagcaagcggguggacuucugcggcaagggcuaccaccugaugagcuuuccccagagcgcaccccacggagugguguuccugcacgugaccuacgugcccgcccaggagaagaacuucaccaccgccccagccaucugccacgacggcaaggcccacuuuccccgggagggcguguucgugagcaacggcacccacugguucgugacccagcggaacuucuacgagccccagaucaucaccaccgacaacaccuucgugagcggcaacugcgacguggugaucggcaucgugaacaacaccguguacgauccccugcagcccgagcuggacagcuucaaggaggagcuggacaaguacuucaagaaucacaccagccccgacguggaccugggcgacaucagcggcaucaacgccagcguggugaacauccagaaggagaucgaucggcugaacgagguggccaagaaccugaacgagagccugaucgaccugcaggagcugggcaaguacgagcaguacaucaaguggcccugguacaucuggcugggcuucaucgccggccugaucgccaucgugaucgugaccaucaugcugugcugcaugaccagcugcugcagcugccugaagggcuguugcagcugcggcagcugcugcaaguucgacgaggacgacagcgagcccgugcugaagggcgugaagcugcacuacaccuga

SEQ ID NO: 23017 - RNA, 3813 nt, Artificial Sequence
  SARS-CoV-2/Wuhan/WIV05/2019__EPI_ISL_402128 spike protein CDS gc (1-1273)(H69del_V70del_Y144del_N501Y_A570D_D614G_P681H_T716I_S982 A_D1118H)
auguucguguuccuggugcugcugccccuggugagcagccagugcgugaaccugaccacccggacccagcugccaccagccuacaccaacagcuucacccggggcgucuacuaccccgacaagguguuccggagcagcguccugcacagcacccaggaccuguuccugcccuucuucagcaacgugaccugguuccacgccaucagcggcaccaacggcaccaagcgguucgacaaccccgugcugcccuucaacgacggcguguacuucgccagcaccgagaagagcaacaucauccggggcuggaucuucggcaccacccuggacagcaagacccagagccugcugaucgugaauaacgccaccaacguggugaucaaggugugcgaguuccaguucugcaacgaccccuuccugggcguguaccacaagaacaacaagagcuggauggagagcgaguuccggguguacagcagcgccaacaacugcaccuucgaguacgugagccagcccuuccugauggaccuggagggcaagcagggcaacuucaagaaccugcgggaguucguguucaagaacaucgacggcuacuucaagaucuacagcaagcacaccccaaucaaccuggugcgggaucugccccagggcuucucagcccuggagccccugguggaccugcccaucggcaucaacaucacccgguuccagacccugcuggcccugcaccggagcuaccugaccccaggcgacagcagcagcggguggacagcaggcgcggcugcuuacuacgugggcuaccugcagccccggaccuuccugcugaaguacaacgagaacggcaccaucaccgacgccguggacugcgcccuggacccucugagcgagaccaagugcacccugaagagcuucaccguggagaagggcaucuaccagaccagcaacuuccgggugcagcccaccgagagcaucgugcgguuccccaacaucaccaaccugugccccuucggcgagguguucaacgccacccgguucgccagcguguacgccuggaaccggaagcggaucagcaacugcguggccgacuacagcgugcuguacaacagcgccagcuucagcaccuucaagugcuacggcgugagccccaccaagcugaacgaccugugcuucaccaacguguacgccgacagcuucgugauccguggcgacgaggugcggcagaucgcacccggccagacaggcaagaucgccgacuacaacuacaagcugcccgacgacuucaccggcugcgugaucgccuggaacagcaacaaccucgacagcaaggugggcggcaacuacaacuaccuguaccggcuguuccggaagagcaaccugaagcccuucgagcgggacaucagcaccgagaucuaccaagccggcuccaccccuugcaacggcguggagggcuucaacugcuacuucccucugcagagcuacggcuuccagcccaccuacggcgugggcuaccagcccuaccgggugguggugcugagcuucgagcugcugcacgccccagccaccguguguggccccaagaagagcaccaaccuggugaagaacaagugcgugaacuucaacuucaacggccuuaccggcaccggcgugcugaccgagagcaacaagaaauuccugcccuuucagcaguucggccgggacaucgacgacaccaccgacgcugugcgggauccccagacccuggagauccuggacaucaccccuugcagcuucggcggcgugagcgugaucaccccaggcaccaacaccagcaaccagguggccgugcuguaccagggcgugaacugcaccgaggugcccguggccauccacgccgaccagcugacacccaccuggcgggucuacagcaccggcagcaacguguuccagacccgggccgguugccugaucggcgccgagcacgugaacaacagcuacgagugcgacauccccaucggcgccggcaucugugccagcuaccagacccagaccaauucacaccggagggcaaggagcguggccagccagagcaucaucgccuacaccaugagccugggcgccgagaacagcguggccuacagcaacaacagcaucgccauccccaucaacuucaccaucagcgugaccaccgagauucugcccgugagcaugaccaagaccagcguggacugcaccauguacaucugcggcgacagcaccgagugcagcaaccugcugcugcaguacggcagcuucugcacccagcugaaccgggcccugaccggcaucgccguggagcaggacaagaacacccaggagguguucgcccaggugaagcagaucuacaagaccccucccaucaaggacuucggcggcuucaacuucagccagauccugcccgaccccagcaagcccagcaagcggagcuucaucgaggaccugcuguucaacaaggugacccuagccgacgccggcuucaucaagcaguacggcgacugccucggcgacauagccgcccgggaccugaucugcgcccagaaguucaacggccugaccgugcugccuccccugcugaccgacgagaugaucgcccaguacaccagcgcccuguuagccggaaccaucaccagcggcuggacuuucggcgcuggagccgcucugcagauccccuucgccaugcagauggccuaccgguucaacggcaucggcgugacccagaacgugcuguacgagaaccagaagcugaucgccaaccaguucaacagcgccaucggcaagauccaggacagccugagcagcaccgcuagcgcccugggcaagcugcaggacguggugaaccagaacgcccaggcccugaacacccuggugaagcagcugagcagcaacuucggcgccaucagcagcgugcugaacgacauccuggcccggcuggacaaggucgaggccgaggugcagaucgaccggcugaucacuggccggcugcagagccugcagaccuacgugacccagcagcugauccgggccgccgagauucgggccagcgccaaccuggccgccaccaagaugagcgagugcgugcugggccagagcaagcggguggacuucugcggcaagggcuaccaccugaugagcuuuccccagagcgcaccccacggagugguguuccugcacgugaccuacgugcccgcccaggagaagaacuucaccaccgccccagccaucugccacgacggcaaggcccacuuuccccgggagggcguguucgugagcaacggcacccacugguucgugacccagcggaacuucuacgagccccagaucaucaccacccacaacaccuucgugagcggcaacugcgacguggugaucggcaucgugaacaacaccguguacgauccccugcagcccgagcuggacagcuucaaggaggagcuggacaaguacuucaagaaucacaccagccccgacguggaccugggcgacaucagcggcaucaacgccagcguggugaacauccagaaggagaucgaucggcugaacgagguggccaagaaccugaacgagagccugaucgaccugcaggagcugggcaaguacgagcaguacaucaaguggcccugguacaucuggcugggcuucaucgccggccugaucgccaucgugauggugaccaucaugcugugcugcaugaccagcugcugcagcugccugaagggcuguugcagcugcggcagcugcugcaaguucgacgaggacgacagcgagcccgugcugaagggcgugaagcugcacuacaccuga

SEQ ID NO: 23018 - RNA, 3822 nt, Artificial Sequence
  SARS-CoV-2/Wuhan/WIV05/2019__EPI_ISL_402128 spike protein CDS gc (1-1273)(K417N_E484K_N501Y_D614G)
auguucguguuccuggugcugcugccccuggugagcagccagugcgugaaccugaccacccggacccagcugccaccagccuacaccaacagcuucacccggggcgucuacuaccccgacaagguguuccggagcagcguccugcacagcacccaggaccuguuccugcccuucuucagcaacgugaccugguuccacgccauccacgugagcggcaccaacggcaccaagcgguucgacaaccccgugcugcccuucaacgacggcguguacuucgccagcaccgagaagagcaacaucauccggggcuggaucuucggcaccacccuggacagcaagacccagagccugcugaucgugaauaacgccaccaacguggugaucaaggugugcgaguuccaguucugcaacgaccccuuccugggcguguacuaccacaagaacaacaagagcuggauggagagcgaguuccggguguacagcagcgccaacaacugcaccuucgaguacgugagccagcccuuccugauggaccuggagggcaagcagggcaacuucaagaaccugcgggaguucguguucaagaacaucgacggcuacuucaagaucuacagcaagcacaccccaaucaaccuggugcgggaucugccccagggcuucucagcccuggagccccugguggaccugcccaucggcaucaacaucacccgguuccagacccugcuggcccugcaccggagcuaccugaccccaggcgacagcagcagcggguggacagcaggcgcggcugcuuacuacgugggcuaccugcagccccggaccuuccugcugaaguacaacgagaacggcaccaucaccgacgccguggacugcgcccuggacccucugagcgagaccaagugcacccugaagagcuucaccguggagaagggcaucuaccagaccagcaacuuccgggugcagcccaccgagagcaucgugcgguuccccaacaucaccaaccugugccccuucggcgagguguucaacgccacccgguucgccagcguguacgccuggaaccggaagcggaucagcaacugcguggccgacuacagcgugcuguacaacagcgccagcuucagcaccuucaagugcuacggcgugagccccaccaagcugaacgaccugugcuucaccaacguguacgccgacagcuucgugauccguggcgacgaggugcggcagaucgcacccggccagacaggcaacaucgccgacuacaacuacaagcugcccgacgacuucaccggcugcgugaucgccuggaacagcaacaaccucgacagcaaggugggcggcaacuacaacuaccuguaccggcuguuccggaagagcaaccugaagcccuucgagcgggacaucagcaccgagaucuaccaagccggcuccaccccuugcaacggcgugaagggcuucaacugcuacuucccucugcagagcuacggcuuccagcccaccuacggcgugggcuaccagcccuaccgggugguggugcugagcuucgagcugcugcacgccccagccaccguguguggccccaagaagagcaccaaccuggugaagaacaagugcgugaacuucaacuucaacggccuuaccggcaccggcgugcugaccgagagcaacaagaaauuccugcccuuucagcaguucggccgggacaucgccgacaccaccgacgcugugcgggauccccagacccuggagauccuggacaucaccccuugcagcuucggcggcgugagcgugaucaccccaggcaccaacaccagcaaccagguggccgugcuguaccagggcgugaacugcaccgaggugcccguggccauccacgccgaccagcugacacccaccuggcgggucuacagcaccggcagcaacguguuccagacccgggccgguugccugaucggcgccgagcacgugaacaacagcuacgagugcgacauccccaucggcgccggcaucugugccagcuaccagacccagaccaauucaccccggagggcaaggagcguggccagccagagcaucaucgccuacaccaugagccugggcgccgagaacagcguggccuacagcaacaacagcaucgccauccccaccaacuucaccaucagcgugaccaccgagauucugcccgugagcaugaccaagaccagcguggacugcaccauguacaucugcggcgacagcaccgagugcagcaaccugcugcugcaguacggcagcuucugcacccagcugaaccgggcccugaccggcaucgccguggagcaggacaagaacacccaggagguguucgcccaggugaagcagaucuacaagaccccucccaucaaggacuucggcggcuucaacuucagccagauccugcccgaccccagcaagcccagcaagcggagcuucaucgaggaccugcuguucaacaaggugacccuagccgacgccggcuucaucaagcaguacggcgacugccucggcgacauagccgcccgggaccugaucugcgcccagaaguucaacggccugaccgugcugccuccccugcugaccgacgagaugaucgcccaguacaccagcgcccuguuagccggaaccaucaccagcggcuggacuuucggcgcuggagccgcucugcagauccccuucgccaugcagauggccuaccgguucaacggcaucggcgugacccagaacgugcuguacgagaaccagaagcugaucgccaaccaguucaacagcgccaucggcaagauccaggacagccugagcagcaccgcuagcgcccugggcaagcugcaggacguggugaaccagaacgcccaggcccugaacacccuggugaagcagcugagcagcaacuucggcgccaucagcagcgugcugaacgacauccugagccggcuggacaaggucgaggccgaggugcagaucgaccggcugaucacuggccggcugcagagccugcagaccuacgugacccagcagcugauccgggccgccgagauucgggccagcgccaaccuggccgccaccaagaugagcgagugcgugcugggccagagcaagcggguggacuucugcggcaagggcuaccaccugaugagcuuuccccagagcgcaccccacggagugguguuccugcacgugaccuacgugcccgcccaggagaagaacuucaccaccgccccagccaucugccacgacggcaaggcccacuuuccccgggagggcguguucgugagcaacggcacccacugguucgugacccagcggaacuucuacgagccccagaucaucaccaccgacaacaccuucgugagcggcaacugcgacguggugaucggcaucgugaacaacaccguguacgauccccugcagcccgagcuggacagcuucaaggaggagcuggacaaguacuucaagaaucacaccagccccgacguggaccugggcgacaucagcggcaucaacgccagcguggugaacauccagaaggagaucgaucggcugaacgagguggccaagaaccugaacgagagccugaucgaccugcaggagcugggcaaguacgagcaguacaucaaguggcccugguacaucuggcugggcuucaucgccggccugaucgccaucgugauggugaccaucaugcugugcugcaugaccagcugcugcagcugccugaagggcuguugcagcugcggcagcugcugcaaguucgacgaggacgacagcgagcccgugcugaagggcgugaagcugcacuacaccuga

SEQ ID NO: 23019 - RNA, 3813 nt, Artificial Sequence
  SARS-CoV-2/Wuhan/WIV05/2019__EPI_ISL_402128 spike protein CDS gc (1-1273)(L18F_D80A_D215G_L242del_A243del_L244del_R246I_K417N_E484 K_N501Y_D614G_A701V)
auguucguguuccuggugcugcugccccuggugagcagccagugcgugaacuucaccacccggacccagcugccaccagccuacaccaacagcuucacccggggcgucuacuaccccgacaagguguuccggagcagcguccugcacagcacccaggaccuguuccugcccuucuucagcaacgugaccugguuccacgccauccacgugagcggcaccaacggcaccaagcgguucgccaaccccgugcugcccuucaacgacggcguguacuucgccagcaccgagaagagcaacaucauccggggcuggaucuucggcaccacccuggacagcaagacccagagccugcugaucgugaauaacgccaccaacguggugaucaaggugugcgaguuccaguucugcaacgaccccuuccugggcguguacuaccacaagaacaacaagagcuggauggagagcgaguuccggguguacagcagcgccaacaacugcaccuucgaguacgugagccagcccuuccugauggaccuggagggcaagcagggcaacuucaagaaccugcgggaguucguguucaagaacaucgacggcuacuucaagaucuacagcaagcacaccccaaucaaccuggugcggggccugccccagggcuucucagcccuggagccccugguggaccugcccaucggcaucaacaucacccgguuccagacccugcacaucagcuaccugaccccaggcgacagcagcagcggguggacagcaggcgcggcugcuuacuacgugggcuaccugcagccccggaccuuccugcugaaguacaacgagaacggcaccaucaccgacgccguggacugcgcccuggacccucugagcgagaccaagugcacccugaagagcuucaccguggagaagggcaucuaccagaccagcaacuuccgggugcagcccaccgagagcaucgugcgguuccccaacaucaccaaccugugccccuucggcgagguguucaacgccacccgguucgccagcguguacgccuggaaccggaagcggaucagcaacugcguggccgacuacagcgugcuguacaacagcgccagcuucagcaccuucaagugcuacggcgugagccccaccaagcugaacgaccugugcuucaccaacguguacgccgacagcuucgugauccguggcgacgaggugcggcagaucgcacccggccagacaggcaacaucgccgacuacaacuacaagcugcccgacgacuucaccggcugcgugaucgccuggaacagcaacaaccucgacagcaaggugggcggcaacuacaacuaccuguaccggcuguuccggaagagcaaccugaagcccuucgagcgggacaucagcaccgagaucuaccaagccggcuccaccccuugcaacggcgugaagggcuucaacugcuacuucccucugcagagcuacggcuuccagcccaccuacggcgugggcuaccagcccuaccgggugguggugcugagcuucgagcugcugcacgccccagccaccguguguggccccaagaagagcaccaaccuggugaagaacaagugcgugaacuucaacuucaacggccuuaccggcaccggcgugcugaccgagagcaacaagaaauuccugcccuuucagcaguucggccgggacaucgccgacaccaccgacgcugugcgggauccccagacccuggagauccuggacaucaccccuugcagcuucggcggcgugagcgugaucaccccaggcaccaacaccagcaaccagguggccgugcuguaccagggcgugaacugcaccgaggugcccguggccauccacgccgaccagcugacacccaccuggcgggucuacagcaccggcagcaacguguuccagacccgggccgguugccugaucggcgccgagcacgugaacaacagcuacgagugcgacauccccaucggcgccggcaucugugccagcuaccagacccagaccaauucaccccggagggcaaggagcguggccagccagagcaucaucgccuacaccaugagccugggcguggagaacagcguggccuacagcaacaacagcaucgccauccccaccaacuucaccaucagcgugaccaccgagauucugcccgugagcaugaccaagaccagcguggacugcaccauguacaucugcggcgacagcaccgagugcagcaaccugcugcugcaguacggcagcuucugcacccagcugaaccgggcccugaccggcaucgccguggagcaggacaagaacacccaggagguguucgcccaggugaagcagaucuacaagaccccucccaucaaggacuucggcggcuucaacuucagccagauccugcccgaccccagcaagcccagcaagcggagcuucaucgaggaccugcuguucaacaaggugacccuagccgacgccggcuucaucaagcaguacggcgacugccucggcgacauagccgcccgggaccugaucugcgcccagaaguucaacggccugaccgugcugccuccccugcugaccgacgagaugaucgcccaguacaccagcgcccuguuagccggaaccaucaccagcggcuggacuuucggcgcuggagccgcucugcagauccccuucgccaugcagauggccuaccgguucaacggcaucggcgugacccagaacgugcuguacgagaaccagaagcugaucgccaaccaguucaacagcgccaucggcaagauccaggacagccugagcagcaccgcuagcgcccugggcaagcugcaggacguggugaaccagaacgcccaggcccugaacacccuggugaagcagcugagcagcaacuucggcgccaucagcagcgugcugaacgacauccugagccggcuggacaaggucgaggccgaggugcagaucgaccggcugaucacuggccggcugcagagccugcagaccuacgugacccagcagcugauccgggccgccgagauucgggccagcgccaaccuggccgccaccaagaugagcgagugcgugcugggccagagcaagcggguggacuucugcggcaagggcuaccaccugaugagcuuuccccagagcgcaccccacggagugguguuccugcacgugaccuacgugcccgcccaggagaagaacuucaccaccgccccagccaucugccacgacggcaaggcccacuuuccccgggagggcguguucgugagcaacggcacccacugguucgugacccagcggaacuucuacgagccccagaucaucaccaccgacaacaccuucgugagcggcaacugcgacguggugaucggcaucgugaacaacaccguguacgauccccugcagcccgagcuggacagcuucaaggaggagcuggacaaguacuucaagaaucacaccagccccgacguggaccugggcgacaucagcggcaucaacgccagcguggugaacauccagaaggagaucgaucggcugaacgagguggccaagaaccugaacgagagccugaucgaccugcaggagcugggcaaguacgagcaguacaucaaguggcccugguacaucuggcugggcuucaucgccggccugaucgccaucgugauggugaccaucaugcugugcugcaugaccagcugcugcagcugccugaagggcuguugcagcugcggcagcugcugcaaguucgacgaggacgacagcgagcccgugcugaagggcgugaagcugcacuacaccuga

SEQ ID NO: 23020 - RNA, 3822 nt, Artificial Sequence
  SARS-CoV-2/Wuhan/WIV05/2019__EPI_ISL_402128 spike protein CDS gc (1-1273)(E484K_D614G)
auguucguguuccuggugcugcugccccuggugagcagccagugcgugaaccugaccacccggacccagcugccaccagccuacaccaacagcuucacccggggcgucuacuaccccgacaagguguuccggagcagcguccugcacagcacccaggaccuguuccugcccuucuucagcaacgugaccugguuccacgccauccacgugagcggcaccaacggcaccaagcgguucgacaaccccgugcugcccuucaacgacggcguguacuucgccagcaccgagaagagcaacaucauccggggcuggaucuucggcaccacccuggacagcaagacccagagccugcugaucgugaauaacgccaccaacguggugaucaaggugugcgaguuccaguucugcaacgaccccuuccugggcguguacuaccacaagaacaacaagagcuggauggagagcgaguuccggguguacagcagcgccaacaacugcaccuucgaguacgugagccagcccuuccugauggaccuggagggcaagcagggcaacuucaagaaccugcgggaguucguguucaagaacaucgacggcuacuucaagaucuacagcaagcacaccccaaucaaccuggugcgggaucugccccagggcuucucagcccuggagccccugguggaccugcccaucggcaucaacaucacccgguuccagacccugcuggcccugcaccggagcuaccugaccccaggcgacagcagcagcggguggacagcaggcgcggcugcuuacuacgugggcuaccugcagccccggaccuuccugcugaaguacaacgagaacggcaccaucaccgacgccguggacugcgcccuggacccucugagcgagaccaagugcacccugaagagcuucaccguggagaagggcaucuaccagaccagcaacuuccgggugcagcccaccgagagcaucgugcgguuccccaacaucaccaaccugugccccuucggcgagguguucaacgccacccgguucgccagcguguacgccuggaaccggaagcggaucagcaacugcguggccgacuacagcgugcuguacaacagcgccagcuucagcaccuucaagugcuacggcgugagccccaccaagcugaacgaccugugcuucaccaacguguacgccgacagcuucgugauccguggcgacgaggugcggcagaucgcacccggccagacaggcaagaucgccgacuacaacuacaagcugcccgacgacuucaccggcugcgugaucgccuggaacagcaacaaccucgacagcaaggugggcggcaacuacaacuaccuguaccggcuguuccggaagagcaaccugaagcccuucgagcgggacaucagcaccgagaucuaccaagccggcuccaccccuugcaacggcgugaagggcuucaacugcuacuucccucugcagagcuacggcuuccagcccaccaacggcgugggcuaccagcccuaccgggugguggugcugagcuucgagcugcugcacgccccagccaccguguguggccccaagaagagcaccaaccuggugaagaacaagugcgugaacuucaacuucaacggccuuaccggcaccggcgugcugaccgagagcaacaagaaauuccugcccuuucagcaguucggccgggacaucgccgacaccaccgacgcugugcgggauccccagacccuggagauccuggacaucaccccuugcagcuucggcggcgugagcgugaucaccccaggcaccaacaccagcaaccagguggccgugcuguaccagggcgugaacugcaccgaggugcccguggccauccacgccgaccagcugacacccaccuggcgggucuacagcaccggcagcaacguguuccagacccgggccgguugccugaucggcgccgagcacgugaacaacagcuacgagugcgacauccccaucggcgccggcaucugugccagcuaccagacccagaccaauucaccccggagggcaaggagcguggccagccagagcaucaucgccuacaccaugagccugggcgccgagaacagcguggccuacagcaacaacagcaucgccauccccaccaacuucaccaucagcgugaccaccgagauucugcccgugagcaugaccaagaccagcguggacugcaccauguacaucugcggcgacagcaccgagugcagcaaccugcugcugcaguacggcagcuucugcacccagcugaaccgggcccugaccggcaucgccguggagcaggacaagaacacccaggagguguucgcccaggugaagcagaucuacaagaccccucccaucaaggacuucggcggcuucaacuucagccagauccugcccgaccccagcaagcccagcaagcggagcuucaucgaggaccugcuguucaacaaggugacccuagccgacgccggcuucaucaagcaguacggcgacugccucggcgacauagccgcccgggaccugaucugcgcccagaaguucaacggccugaccgugcugccuccccugcugaccgacgagaugaucgcccaguacaccagcgcccuguuagccggaaccaucaccagcggcuggacuuucggcgcuggagccgcucugcagauccccuucgccaugcagauggccuaccgguucaacggcaucggcgugacccagaacgugcuguacgagaaccagaagcugaucgccaaccaguucaacagcgccaucggcaagauccaggacagccugagcagcaccgcuagcgcccugggcaagcugcaggacguggugaaccagaacgcccaggcccugaacacccuggugaagcagcugagcagcaacuucggcgccaucagcagcgugcugaacgacauccugagccggcuggacaaggucgaggccgaggugcagaucgaccggcugaucacuggccggcugcagagccugcagaccuacgugacccagcagcugauccgggccgccgagauucgggccagcgccaaccuggccgccaccaagaugagcgagugcgugcugggccagagcaagcggguggacuucugcggcaagggcuaccaccugaugagcuuuccccagagcgcaccccacggagugguguuccugcacgugaccuacgugcccgcccaggagaagaacuucaccaccgccccagccaucugccacgacggcaaggcccacuuuccccgggagggcguguucgugagcaacggcacccacugguucgugacccagcggaacuucuacgagccccagaucaucaccaccgacaacaccuucgugagcggcaacugcgacguggugaucggcaucgugaacaacaccguguacgauccccugcagcccgagcuggacagcuucaaggaggagcuggacaaguacuucaagaaucacaccagccccgacguggaccugggcgacaucagcggcaucaacgccagcguggugaacauccagaaggagaucgaucggcugaacgagguggccaagaaccugaacgagagccugaucgaccugcaggagcugggcaaguacgagcaguacaucaaguggcccugguacaucuggcugggcuucaucgccggccugaucgccaucgugauggugaccaucaugcugugcugcaugaccagcugcugcagcugccugaagggcuguugcagcugcggcagcugcugcaaguucgacgaggacgacagcgagcccgugcugaagggcgugaagcugcacuacaccuga

SEQ ID NO: 23021 - RNA, 3822 nt, Artificial Sequence
  SARS-CoV-2/Wuhan/WIV05/2019__EPI_ISL_402128 spike protein CDS gc (1-1273)(L18F_T20N_P26S_D138Y_R190S_K417T_E484K_N501Y_D614G_H655Y _T1027I)
auguucguguuccuggugcugcugccccuggugagcagccagugcgugaacuucaccaaccggacccagcugccaagcgccuacaccaacagcuucacccggggcgucuacuaccccgacaagguguuccggagcagcguccugcacagcacccaggaccuguuccugcccuucuucagcaacgugaccugguuccacgccauccacgugagcggcaccaacggcaccaagcgguucgacaaccccgugcugcccuucaacgacggcguguacuucgccagcaccgagaagagcaacaucauccggggcuggaucuucggcaccacccuggacagcaagacccagagccugcugaucgugaauaacgccaccaacguggugaucaaggugugcgaguuccaguucugcaacuaccccuuccugggcguguacuaccacaagaacaacaagagcuggauggagagcgaguuccggguguacagcagcgccaacaacugcaccuucgaguacgugagccagcccuuccugauggaccuggagggcaagcagggcaacuucaagaaccugagcgaguucguguucaagaacaucgacggcuacuucaagaucuacagcaagcacaccccaaucaaccuggugcgggaucugccccagggcuucucagcccuggagccccugguggaccugcccaucggcaucaacaucacccgguuccagacccugcuggcccugcaccggagcuaccugaccccaggcgacagcagcagcggguggacagcaggcgcggcugcuuacuacgugggcuaccugcagccccggaccuuccugcugaaguacaacgagaacggcaccaucaccgacgccguggacugcgcccuggacccucugagcgagaccaagugcacccugaagagcuucaccguggagaagggcaucuaccagaccagcaacuuccgggugcagcccaccgagagcaucgugcgguuccccaacaucaccaaccugugccccuucggcgagguguucaacgccacccgguucgccagcguguacgccuggaaccggaagcggaucagcaacugcguggccgacuacagcgugcuguacaacagcgccagcuucagcaccuucaagugcuacggcgugagccccaccaagcugaacgaccugugcuucaccaacguguacgccgacagcuucgugauccguggcgacgaggugcggcagaucgcacccggccagacaggcaccaucgccgacuacaacuacaagcugcccgacgacuucaccggcugcgugaucgccuggaacagcaacaaccucgacagcaaggugggcggcaacuacaacuaccuguaccggcuguuccggaagagcaaccugaagcccuucgagcgggacaucagcaccgagaucuaccaagccggcuccaccccuugcaacggcgugaagggcuucaacugcuacuucccucugcagagcuacggcuuccagcccaccuacggcgugggcuaccagcccuaccgggugguggugcugagcuucgagcugcugcacgccccagccaccguguguggccccaagaagagcaccaaccuggugaagaacaagugcgugaacuucaacuucaacggccuuaccggcaccggcgugcugaccgagagcaacaagaaauuccugcccuuucagcaguucggccgggacaucgccgacaccaccgacgcugugcgggauccccagacccuggagauccuggacaucaccccuugcagcuucggcggcgugagcgugaucaccccaggcaccaacaccagcaaccagguggccgugcuguaccagggcgugaacugcaccgaggugcccguggccauccacgccgaccagcugacacccaccuggcgggucuacagcaccggcagcaacguguuccagacccgggccgguugccugaucggcgccgaguacgugaacaacagcuacgagugcgacauccccaucggcgccggcaucugugccagcuaccagacccagaccaauucaccccggagggcaaggagcguggccagccagagcaucaucgccuacaccaugagccugggcgccgagaacagcguggccuacagcaacaacagcaucgccauccccaccaacuucaccaucagcgugaccaccgagauucugcccgugagcaugaccaagaccagcguggacugcaccauguacaucugcggcgacagcaccgagugcagcaaccugcugcugcaguacggcagcuucugcacccagcugaaccgggcccugaccggcaucgccguggagcaggacaagaacacccaggagguguucgcccaggugaagcagaucuacaagaccccucccaucaaggacuucggcggcuucaacuucagccagauccugcccgaccccagcaagcccagcaagcggagcuucaucgaggaccugcuguucaacaaggugacccuagccgacgccggcuucaucaagcaguacggcgacugccucggcgacauagccgcccgggaccugaucugcgcccagaaguucaacggccugaccgugcugccuccccugcugaccgacgagaugaucgcccaguacaccagcgcccuguuagccggaaccaucaccagcggcuggacuuucggcgcuggagccgcucugcagauccccuucgccaugcagauggccuaccgguucaacggcaucggcgugacccagaacgugcuguacgagaaccagaagcugaucgccaaccaguucaacagcgccaucggcaagauccaggacagccugagcagcaccgcuagcgcccugggcaagcugcaggacguggugaaccagaacgcccaggcccugaacacccuggugaagcagcugagcagcaacuucggcgccaucagcagcgugcugaacgacauccugagccggcuggacaaggucgaggccgaggugcagaucgaccggcugaucacuggccggcugcagagccugcagaccuacgugacccagcagcugauccgggccgccgagauucgggccagcgccaaccuggccgccaucaagaugagcgagugcgugcugggccagagcaagcggguggacuucugcggcaagggcuaccaccugaugagcuuuccccagagcgcaccccacggagugguguuccugcacgugaccuacgugcccgcccaggagaagaacuucaccaccgccccagccaucugccacgacggcaaggcccacuuuccccgggagggcguguucgugagcaacggcacccacugguucgugacccagcggaacuucuacgagccccagaucaucaccaccgacaacaccuucgugagcggcaacugcgacguggugaucggcaucgugaacaacaccguguacgauccccugcagcccgagcuggacagcuucaaggaggagcuggacaaguacuucaagaaucacaccagccccgacguggaccugggcgacaucagcggcaucaacgccagcguggugaacauccagaaggagaucgaucggcugaacgagguggccaagaaccugaacgagagccugaucgaccugcaggagcugggcaaguacgagcaguacaucaaguggcccugguacaucuggcugggcuucaucgccggccugaucgccaucgugauggugaccaucaugcugugcugcaugaccagcugcugcagcugccugaagggcuguugcagcugcggcagcugcugcaaguucgacgaggacgacagcgagcccgugcugaagggcgugaagcugcacuacaccuga

SEQ ID NO: 23022 - RNA, 3822 nt, Artificial Sequence
  SARS-CoV-2/Wuhan/WIV05/2019__EPI_ISL_402128 spike protein CDS gc (1-1273)(S13I_W152C_L452R_D614G)
auguucguguuccuggugcugcugccccuggugagcauccagugcgugaaccugaccacccggacccagcugccaccagccuacaccaacagcuucacccggggcgucuacuaccccgacaagguguuccggagcagcguccugcacagcacccaggaccuguuccugcccuucuucagcaacgugaccugguuccacgccauccacgugagcggcaccaacggcaccaagcgguucgacaaccccgugcugcccuucaacgacggcguguacuucgccagcaccgagaagagcaacaucauccggggcuggaucuucggcaccacccuggacagcaagacccagagccugcugaucgugaauaacgccaccaacguggugaucaaggugugcgaguuccaguucugcaacgaccccuuccugggcguguacuaccacaagaacaacaagagcugcauggagagcgaguuccggguguacagcagcgccaacaacugcaccuucgaguacgugagccagcccuuccugauggaccuggagggcaagcagggcaacuucaagaaccugcgggaguucguguucaagaacaucgacggcuacuucaagaucuacagcaagcacaccccaaucaaccuggugcgggaucugccccagggcuucucagcccuggagccccugguggaccugcccaucggcaucaacaucacccgguuccagacccugcuggcccugcaccggagcuaccugaccccaggcgacagcagcagcggguggacagcaggcgcggcugcuuacuacgugggcuaccugcagccccggaccuuccugcugaaguacaacgagaacggcaccaucaccgacgccguggacugcgcccuggacccucugagcgagaccaagugcacccugaagagcuucaccguggagaagggcaucuaccagaccagcaacuuccgggugcagcccaccgagagcaucgugcgguuccccaacaucaccaaccugugccccuucggcgagguguucaacgccacccgguucgccagcguguacgccuggaaccggaagcggaucagcaacugcguggccgacuacagcgugcuguacaacagcgccagcuucagcaccuucaagugcuacggcgugagccccaccaagcugaacgaccugugcuucaccaacguguacgccgacagcuucgugauccguggcgacgaggugcggcagaucgcacccggccagacaggcaagaucgccgacuacaacuacaagcugcccgacgacuucaccggcugcgugaucgccuggaacagcaacaaccucgacagcaaggugggcggcaacuacaacuaccgcuaccggcuguuccggaagagcaaccugaagcccuucgagcgggacaucagcaccgagaucuaccaagccggcuccaccccuugcaacggcguggagggcuucaacugcuacuucccucugcagagcuacggcuuccagcccaccaacggcgugggcuaccagcccuaccgggugguggugcugagcuucgagcugcugcacgccccagccaccguguguggccccaagaagagcaccaaccuggugaagaacaagugcgugaacuucaacuucaacggccuuaccggcaccggcgugcugaccgagagcaacaagaaauuccugcccuuucagcaguucggccgggacaucgccgacaccaccgacgcugugcgggauccccagacccuggagauccuggacaucaccccuugcagcuucggcggcgugagcgugaucaccccaggcaccaacaccagcaaccagguggccgugcuguaccagggcgugaacugcaccgaggugcccguggccauccacgccgaccagcugacacccaccuggcgggucuacagcaccggcagcaacguguuccagacccgggccgguugccugaucggcgccgagcacgugaacaacagcuacgagugcgacauccccaucggcgccggcaucugugccagcuaccagacccagaccaauucaccccggagggcaaggagcguggccagccagagcaucaucgccuacaccaugagccugggcgccgagaacagcguggccuacagcaacaacagcaucgccauccccaccaacuucaccaucagcgugaccaccgagauucugcccgugagcaugaccaagaccagcguggacugcaccauguacaucugcggcgacagcaccgagugcagcaaccugcugcugcaguacggcagcuucugcacccagcugaaccgggcccugaccggcaucgccguggagcaggacaagaacacccaggagguguucgcccaggugaagcagaucuacaagaccccucccaucaaggacuucggcggcuucaacuucagccagauccugcccgaccccagcaagcccagcaagcggagcuucaucgaggaccugcuguucaacaaggugacccuagccgacgccggcuucaucaagcaguacggcgacugccucggcgacauagccgcccgggaccugaucugcgcccagaaguucaacggccugaccgugcugccuccccugcugaccgacgagaugaucgcccaguacaccagcgcccuguuagccggaaccaucaccagcggcuggacuuucggcgcuggagccgcucugcagauccccuucgccaugcagauggccuaccgguucaacggcaucggcgugacccagaacgugcuguacgagaaccagaagcugaucgccaaccaguucaacagcgccaucggcaagauccaggacagccugagcagcaccgcuagcgcccugggcaagcugcaggacguggugaaccagaacgcccaggcccugaacacccuggugaagcagcugagcagcaacuucggcgccaucagcagcgugcugaacgacauccugagccggcuggacaaggucgaggccgaggugcagaucgaccggcugaucacuggccggcugcagagccugcagaccuacgugacccagcagcugauccgggccgccgagauucgggccagcgccaaccuggccgccaccaagaugagcgagugcgugcugggccagagcaagcggguggacuucugcggcaagggcuaccaccugaugagcuuuccccagagcgcaccccacggagugguguuccugcacgugaccuacgugcccgcccaggagaagaacuucaccaccgccccagccaucugccacgacggcaaggcccacuuuccccgggagggcguguucgugagcaacggcacccacugguucgugacccagcggaacuucuacgagccccagaucaucaccaccgacaacaccuucgugagcggcaacugcgacguggugaucggcaucgugaacaacaccguguacgauccccugcagcccgagcuggacagcuucaaggaggagcuggacaaguacuucaagaaucacaccagccccgacguggaccugggcgacaucagcggcaucaacgccagcguggugaacauccagaaggagaucgaucggcugaacgagguggccaagaaccugaacgagagccugaucgaccugcaggagcugggcaaguacgagcaguacaucaaguggcccugguacaucuggcugggcuucaucgccggccugaucgccaucgugauggugaccaucaugcugugcugcaugaccagcugcugcagcugccugaagggcuguugcagcugcggcagcugcugcaaguucgacgaggacgacagcgagcccgugcugaagggcgugaagcugcacuacaccuga

SEQ ID NO: 23023 - RNA, 3822 nt, Artificial Sequence
  SARS-CoV-2/Wuhan/WIV05/2019__EPI_ISL_402128 spike protein CDS gc (1-1273)
auguucguguuccuggugcugcugccccuggugagcagccagugcgugaaccugaccacccggacccagcugcccccugccuacaccaacagcuucacccggggcguguacuaccccgacaagguguuccggagcagcgugcugcacagcacccaggaccuguuccugcccuucuucagcaacgugaccugguuccacgccauccacgugagcggcaccaacggcaccaagcgguucgacaacccagugcugcccuucaacgacggcguguacuucgccagcaccgagaagucaaacaucauccggggcuggaucuucggcaccacccuggacagcaagacacagagccugcugaucgugaacaacgccaccaacguggugaucaaggugugcgaguuucaguucugcaacgaccccuuccugggcguguacuaccacaagaacaacaagagcuggauggagagcgaguuccgggucuacagcagcgcuaacaauugcaccuucgaguacgugagccagcccuuccugauggaccucgagggcaagcagggcaacuucaagaaccugcgggaguucguguucaagaacaucgauggcuacuucaagaucuacagcaagcacacccccaucaaccuggugcgggaccugccccagggauucagcgcccuggagccucugguggaccugcccaucggcaucaacaucaccagguuccagacccugcuggcccugcaccggagcuaccugacccccggcgacagcagcagcggcuggaccgccggcgccgccgcauacuacgugggcuaccugcagccacggaccuuccugcugaaguacaacgagaacggcaccaucaccgacgccguggacugcgcccuggacccccugagcgagaccaagugcacccuaaagagcuucaccguggagaagggcaucuaccagaccagcaacuuccgggugcagcccacugagagcaucgugcgguuccccaacauuaccaaccugugucccuucggcgagguguucaacgccacccgguucgccagcguguacgccuggaaccggaagcggaucagcaacugcguggccgacuacagcgugcuguacaacagcgccagcuucagcaccuucaagugcuacggcgugagcccuaccaagcugaacgaccugugcuucaccaacguguacgcugacagcuucgugauccggggcgacgaggugcggcagaucgcccccggccagaccggcaagaucgccgacuacaacuacaagcugcccgacgacuucaccggcugcgugaucgccuggaacagcaacaaccuggacagcaaggugggcggcaacuacaacuaccuguaccggcuguuccguaagagcaaccugaagccauucgagcgggacaucagcaccgagaucuaccaggccggcagcacccccugcaacgguguggagggcuuuaacugcuacuucccccugcagagcuacggcuuccagcccaccaacggcgugggcuaccagcccuaccgggugguggugcugagcuucgagcugcugcacgcccccgccaccgugugcggcccuaaaaagagcaccaaccuggugaagaacaagugcgugaacuucaauuucaacggccugaccggcaccggcgugcugaccgagagcaacaagaaguuccugcccuuccagcaguucggccgggauaucgccgacaccaccgacgcagugcgggacccccagacccuggagauccuggacaucaccccaugcagcuucggcggcgugagcgucaucacccccggcacaaacaccagcaaccagguggccgugcuguaccaggacgugaacugcaccgaggugcccguggccauccacgccgaccagcugacccccaccuggcggguguacagcaccggaagcaacguguuccagacccgggccggcugccugaucggcgccgagcacgugaacaacuccuacgagugcgacauccccaucggcgcuggcaucugcgccagcuaccagacccagaccaacagcccccggcgggcccggagcguggccagccagagcaucaucgccuacaccaugagcuuaggcgccgagaacagcguggccuacagcaacaacagcaucgcgaucccuaccaacuucaccaucagcgugaccaccgagauacugcccgugagcaugaccaagaccagcguggacuguaccauguacaucugcggcgacagcaccgagugcagcaaccugcugcugcaguacggcagcuucugcacccagcugaaccgggcccugaccggcaucgccguggagcaggacaagaacacccaagagguguucgcccaggugaagcagaucuacaagacucccccaaucaaggacuucggcggcuucaacuucagccagauccugcccgaccccagcaagcccagcaagcggagcuucaucgaggaccugcuguucaacaaggugacccuggccgacgccggcuucaucaagcaguacggcgauugccugggcgacaucgccgcucgggaccugaucugcgcccagaaguucaacgggcugaccgugcugcccccucugcugaccgacgagaugaucgcccaguacaccagcgcccugcuugccggcaccaucaccagcggcuggaccuucggcgccggcgcagcccugcagauccccuucgccaugcagauggccuaccgguucaacggcaucggcgugacccagaacgugcuguacgagaaccagaagcugaucgccaaccaguucaacagcgccaucggcaagauccaggacagccugagcagcaccgccagcgcccugggcaagcugcaggacguggugaaccagaacgcucaggcccugaacacccuggugaagcagcugagcagcaacuucggcgccaucagcucagugcugaaugacauccugagcaggcuggacaagguggaggccgaggugcagaucgaccggcugaucaccggccggcugcagagccugcagaccuacgugacccagcagcugauccgggccgccgagauccgggccagcgccaaccuggcagccaccaagaugagcgagugcgugcugggccagagcaagcggguggacuuuugcggcaagggcuaccaccugaugagcuucccccagagcgccccacacggcgugguguuccuccacgucacauacgugcccgcccaggagaagaacuucaccaccgcccccgccauuugccacgacggcaaggcucacuucccccgggagggcguguucgugagcaacggaacccacugguucgugacccagcggaacuucuacgagccccagaucaucaccaccgacaacaccuucgugagcggcaacugcgacguggugaucggcaucgugaacaacaccguguacgacccccugcagccugagcuggacagcuucaaggaggagcuggacaaguacuucaagaaccacaccagccccgauguggaccugggcgacaucagcggcaucaacgccagcguggugaacauccagaaggagaucgaccggcugaacgagguggccaagaaccugaacgagagccugaucgaccugcaggagcugggcaaguacgagcaguacaucaaguggcccugguacaucuggcugggcuucaucgccggccugaucgccaucgugauggugaccaucaugcugugcugcaugaccagcugcuguagcugccugaagggcugcugcagcugcggcagcugcugcaaguucgacgaggacgacagcgagccagugcugaagggcgugaagcugcacuacaccuga

SEQ ID NO: 23024 - RNA, 3822 nt, Artificial Sequence
  SARS-CoV-2/Wuhan/WIV05/2019__EPI_ISL_402128 spike protein CDS gc (1-1273)(D614G)
auguucguguuccuggugcugcugccccuggugagcagccagugcgugaaccugaccacccggacccagcugcccccugccuacaccaacagcuucacccggggcguguacuaccccgacaagguguuccggagcagcgugcugcacagcacccaggaccuguuccugcccuucuucagcaacgugaccugguuccacgccauccacgugagcggcaccaacggcaccaagcgguucgacaacccagugcugcccuucaacgacggcguguacuucgccagcaccgagaagucaaacaucauccggggcuggaucuucggcaccacccuggacagcaagacacagagccugcugaucgugaacaacgccaccaacguggugaucaaggugugcgaguuucaguucugcaacgaccccuuccugggcguguacuaccacaagaacaacaagagcuggauggagagcgaguuccgggucuacagcagcgcuaacaauugcaccuucgaguacgugagccagcccuuccugauggaccucgagggcaagcagggcaacuucaagaaccugcgggaguucguguucaagaacaucgauggcuacuucaagaucuacagcaagcacacccccaucaaccuggugcgggaccugccccagggauucagcgcccuggagccucugguggaccugcccaucggcaucaacaucaccagguuccagacccugcuggcccugcaccggagcuaccugacccccggcgacagcagcagcggcuggaccgccggcgccgccgcauacuacgugggcuaccugcagccacggaccuuccugcugaaguacaacgagaacggcaccaucaccgacgccguggacugcgcccuggacccccugagcgagaccaagugcacccuaaagagcuucaccguggagaagggcaucuaccagaccagcaacuuccgggugcagcccacugagagcaucgugcgguuccccaacauuaccaaccugugucccuucggcgagguguucaacgccacccgguucgccagcguguacgccuggaaccggaagcggaucagcaacugcguggccgacuacagcgugcuguacaacagcgccagcuucagcaccuucaagugcuacggcgugagcccuaccaagcugaacgaccugugcuucaccaacguguacgcugacagcuucgugauccggggcgacgaggugcggcagaucgcccccggccagaccggcaagaucgccgacuacaacuacaagcugcccgacgacuucaccggcugcgugaucgccuggaacagcaacaaccuggacagcaaggugggcggcaacuacaacuaccuguaccggcuguuccguaagagcaaccugaagccauucgagcgggacaucagcaccgagaucuaccaggccggcagcacccccugcaacgguguggagggcuuuaacugcuacuucccccugcagagcuacggcuuccagcccaccaacggcgugggcuaccagcccuaccgggugguggugcugagcuucgagcugcugcacgcccccgccaccgugugcggcccuaaaaagagcaccaaccuggugaagaacaagugcgugaacuucaauuucaacggccugaccggcaccggcgugcugaccgagagcaacaagaaguuccugcccuuccagcaguucggccgggauaucgccgacaccaccgacgcagugcgggacccccagacccuggagauccuggacaucaccccaugcagcuucggcggcgugagcgucaucacccccggcacaaacaccagcaaccagguggccgugcuguaccagggagugaacugcaccgaggugcccguggccauccacgccgaccagcugacccccaccuggcggguguacagcaccggcagcaacguguuccagacccgggccggcugccugaucggcgccgagcacgugaacaacuccuacgagugcgacauccccaucggcgcuggcaucugcgccagcuaccagacccagaccaacagcccccggcgggcccggagcguggccagccagagcaucaucgccuacaccaugagcuuaggcgccgagaacagcguggccuacagcaacaacagcaucgcgaucccuaccaacuucaccaucagcgugaccaccgagauacugcccgugagcaugaccaagaccagcguggacuguaccauguacaucugcggcgacagcaccgagugcagcaaccugcugcugcaguacggcagcuucugcacccagcugaaccgggcccugaccggcaucgccguggagcaggacaagaacacccaagagguguucgcccaggugaagcagaucuacaagacucccccaaucaaggacuucggcggcuucaacuucagccagauccugcccgaccccagcaagcccagcaagcggagcuucaucgaggaccugcuguucaacaaggugacccuggccgacgccggcuucaucaagcaguacggcgacugccugggggauaucgccgcucgggaccugaucugcgcccagaaguucaacggccugaccgugcugcccccucugcugaccgacgagaugaucgcccaguacaccagcgcccugcuugccggcaccaucaccagcggcuggaccuucggcgccggcgcagcccugcagauccccuucgccaugcagauggccuaccgguucaacggcaucggcgugacccagaacgugcuguacgagaaccagaagcugaucgccaaccaguucaacagcgccaucggcaagauccaggacagccugagcagcaccgccagcgcccugggcaagcugcaggacguggugaaccagaacgcucaggcccugaacacccuggugaagcagcugagcagcaacuucggcgccaucagcucagugcugaaugacauccugagcaggcuggacaagguggaggccgaggugcagaucgaccggcugaucaccggccggcugcagagccugcagaccuacgugacccagcagcugauccgggccgccgagauccgggccagcgccaaccuggcagccaccaagaugagcgagugcgugcugggccagagcaagcggguggacuuuugcggcaagggcuaccaccugaugagcuucccccagagcgccccacacggcgugguguuccuccacgucacauacgugcccgcccaggagaagaacuucaccaccgcccccgccauuugccacgacggcaaggcucacuucccccgggagggaguguucgugagcaacggcacccacugguucgugacccagcggaacuucuacgagccccagaucaucaccaccgacaacaccuucgugagcggcaacugcgacguggugaucggcaucgugaacaacaccguguacgacccccugcagccugagcuggacagcuucaaggaggagcuggacaaguacuucaagaaccacaccagccccgacguggaucugggcgacaucagcggcaucaacgccagcguggugaacauccagaaggagaucgaccggcugaacgagguggccaagaaccugaacgagagccugaucgaccugcaggagcugggcaaguacgagcaguacaucaaguggcccugguacaucuggcugggcuucaucgccggccugaucgccaucgugauggugaccaucaugcugugcugcaugaccagcugcuguagcugccugaagggcugcugcagcugcggcagcugcugcaaguucgacgaggacgacagcgagccagugcugaagggcgugaagcugcacuacaccuga

SEQ ID NO: 23025 - RNA, 3822 nt, Artificial Sequence
  SARS-CoV-2/Wuhan/WIV05/2019__EPI_ISL_402128 spike protein CDS gc (1-1273)(A222V_D614G)
auguucguguuccuggugcugcugccccuggugagcagccagugcgugaaccugaccacccggacccagcugcccccugccuacaccaacagcuucacccggggcguguacuaccccgacaagguguuccggagcagcgugcugcacagcacccaggaccuguuccugcccuucuucagcaacgugaccugguuccacgccauccacgugagcggcaccaacggcaccaagcgguucgacaacccagugcugcccuucaacgacggcguguacuucgccagcaccgagaagucaaacaucauccggggcuggaucuucggcaccacccuggacagcaagacacagagccugcugaucgugaacaacgccaccaacguggugaucaaggugugcgaguuucaguucugcaacgaccccuuccugggcguguacuaccacaagaacaacaagagcuggauggagagcgaguuccgggucuacagcagcgcuaacaauugcaccuucgaguacgugagccagcccuuccugauggaccucgagggcaagcagggcaacuucaagaaccugcgggaguucguguucaagaacaucgauggcuacuucaagaucuacagcaagcacacccccaucaaccuggugcgggaccugccccagggauucagcgugcuggagccucugguggaccugcccaucggcaucaacaucaccagguuccagacccugcuggcccugcaccggagcuaccugacccccggcgacagcagcagcggcuggaccgccggcgccgccgccuacuacgugggcuaccugcagccacggaccuuccugcugaaguacaacgagaacggcaccaucaccgacgcaguggacugcgcccuggacccccugagcgagaccaagugcacccuaaagagcuucaccguggagaagggcaucuaccagaccagcaacuuccgggugcagcccacugagagcaucgugcgguuccccaacauuaccaaccugugucccuucggcgagguguucaacgccacccgguucgccagcguguacgccuggaaccggaagcggaucagcaacugcguggccgacuacagcgugcuguacaacagcgccagcuucagcaccuucaagugcuacggcgugagcccuaccaagcugaacgaccugugcuucaccaacguguacgccgacagcuucgugauccggggcgacgaggugcggcagaucgcucccggccagaccggcaagaucgccgacuacaacuacaagcugcccgacgacuucaccggcugcgugaucgccuggaacagcaacaaccuggacagcaaggugggcggcaacuacaacuaccuguaccggcuguuccguaagagcaaccugaagccauucgagcgggacaucagcaccgagaucuaccaggccggcagcacccccugcaacgguguggagggcuuuaacugcuacuucccccugcagagcuacggcuuccagcccaccaacggcgugggcuaccagcccuaccgggugguggugcugagcuucgagcugcugcacgcccccgccaccgugugcggcccuaaaaagagcaccaaccuggugaagaacaagugcgugaacuucaauuucaacggccugaccggcaccggcgugcugaccgagagcaacaagaaguuccugcccuuccagcaguucggccgggauaucgccgacaccaccgacgccgugcgggacccccagacccuggagauccuggacaucaccccaugcagcuucggcggcgucagcgugaucacccccggcacaaacaccagcaaccagguggcagugcuguaccagggagugaacugcaccgaggugcccguggccauccacgccgaccagcugacccccaccuggcggguguacagcaccggcagcaacguguuccagacccgggccggcugccugaucggcgccgagcacgugaacaacuccuacgagugcgacauccccaucggcgccggcaucugcgcuagcuaccagacccagaccaacagcccccggcgggcccggagcguggccagccagagcaucaucgccuacaccaugagcuuaggcgccgagaacagcguggccuacagcaacaacagcaucgccaucccuaccaacuucaccaucagcgugaccaccgagauacugcccgugagcaugaccaagaccagcguggacuguaccauguacaucugcggcgacagcaccgagugcagcaaccugcugcugcaguacggcagcuucugcacccagcugaaccgggcgcugaccggcaucgccguggagcaggacaagaacacccaagagguguucgcccaggugaagcagaucuacaagacucccccaaucaaggacuucggcggcuucaacuucagccagauccugcccgaccccagcaagcccagcaagcggagcuucaucgaggaccugcuguucaacaaggugacccuggccgacgccggcuucaucaagcaguacggcgacugccugggggauaucgccgcccgggaccugaucugcgcucagaaguucaacggccugaccgugcugcccccucugcugaccgacgagaugaucgcccaguacaccagcgcccugcuugccggcaccaucaccagcggcuggaccuucggcgccggcgccgcacugcagauccccuucgccaugcagauggccuaccgguucaacggcaucggcgugacccagaacgugcuguacgagaaccagaagcugaucgccaaccaguucaacagcgccaucggcaagauccaggacagccugagcagcaccgccagcgcccugggcaagcugcaggacguggugaaccagaacgcccaggcucugaacacccuggugaagcagcugagcagcaacuucggcgccaucagcucagugcugaaugacauccugagcaggcuggacaagguggaggccgaggugcagaucgaccggcugaucaccggccggcugcagagccugcagaccuacgugacccagcagcugauccgggccgccgagauccgggccagcgccaaccuggccgcaaccaagaugagcgagugcgugcugggccagagcaagcggguggacuuuugcggcaagggcuaccaccugaugagcuucccccagagcgccccacacggcguggucuuccuccacgugacauacgugcccgcccaggagaagaacuucaccaccgcccccgccauuugccacgacggcaaggcccacuucccccgggagggaguguucgugagcaacggcacccacugguucgugacccagcggaacuucuacgagccccagaucaucaccaccgacaacaccuucgugagcggcaacugcgacguggugaucggcaucgugaacaacaccguguacgacccccugcagccugagcuggacagcuucaaggaggagcuggacaaguacuucaagaaccacaccagccccgacguggaucugggcgacaucagcggcaucaacgcuagcguggugaacauccagaaggagaucgaccggcugaacgagguggccaagaaccugaacgagagccugaucgaccugcaggagcugggcaaguacgagcaguacaucaaguggcccugguacaucuggcugggcuucaucgccggccugaucgccaucgugauggugaccaucaugcugugcugcaugaccagcugcuguagcugccugaagggcugcugcagcugcggcagcugcugcaaguucgacgaggacgacagcgagccagugcugaagggcgugaagcugcacuacaccuga

SEQ ID NO: 23026 - RNA, 3822 nt, Artificial Sequence
  SARS-CoV-2/Wuhan/WIV05/2019__EPI_ISL_402128 spike protein CDS gc (1-1273)(N439K_D614G)
auguucguguuccuggugcugcugccccuggugagcagccagugcgugaaccugaccacccggacccagcugcccccugccuacaccaacagcuucacccggggcguguacuaccccgacaagguguuccggagcagcgugcugcacagcacccaggaccuguuccugcccuucuucagcaacgugaccugguuccacgccauccacgugagcggcaccaacggcaccaagcgguucgacaacccagugcugcccuucaacgacggcguguacuucgccagcaccgagaagucaaacaucauccggggcuggaucuucggcaccacccuggacagcaagacacagagccugcugaucgugaacaacgccaccaacguggugaucaaggugugcgaguuucaguucugcaacgaccccuuccugggcguguacuaccacaagaacaacaagagcuggauggagagcgaguuccgggucuacagcagcgcuaacaauugcaccuucgaguacgugagccagcccuuccugauggaccucgagggcaagcagggcaacuucaagaaccugcgggaguucguguucaagaacaucgauggcuacuucaagaucuacagcaagcacacccccaucaaccuggugcgggaccugccccagggauucagcgcccuggagccucugguggaccugcccaucggcaucaacaucaccagguuccagacccugcuggcccugcaccggagcuaccugacccccggcgacagcagcagcggcuggaccgccggcgccgccgcauacuacgugggcuaccugcagccacggaccuuccugcugaaguacaacgagaacggcaccaucaccgacgccguggacugcgcccuggacccccugagcgagaccaagugcacccuaaagagcuucaccguggagaagggcaucuaccagaccagcaacuuccgggugcagcccacugagagcaucgugcgguuccccaacauuaccaaccugugucccuucggcgagguguucaacgccacccgguucgccagcguguacgccuggaaccggaagcggaucagcaacugcguggccgacuacagcgugcuguacaacagcgccagcuucagcaccuucaagugcuacggcgugagcccuaccaagcugaacgaccugugcuucaccaacguguacgcugacagcuucgugauccggggcgacgaggugcggcagaucgcccccggccagaccggcaagaucgccgacuacaacuacaagcugcccgacgacuucaccggcugcgugaucgccuggaacagcaagaaccuggacagcaaggugggcggcaacuacaacuaccuguaccggcuguuccguaagagcaaccugaagccauucgagcgggacaucagcaccgagaucuaccaggccggcagcacccccugcaacgguguggagggcuuuaacugcuacuucccccugcagagcuacggcuuccagcccaccaacggcgugggcuaccagcccuaccgggugguggugcugagcuucgagcugcugcacgcccccgccaccgugugcggcccuaaaaagagcaccaaccuggugaagaacaagugcgugaacuucaacuucaauggccugaccggcaccggcgugcugaccgagagcaacaagaaguuccugcccuuccagcaguucggccgggauaucgccgacaccaccgacgcagugcgggacccccagacccuggagauccuggacaucaccccaugcagcuucggcggcgugagcgucaucacccccggcacaaacaccagcaaccagguggccgugcuguaccagggagugaacugcaccgaggugcccguggccauccacgccgaccagcugacccccaccuggcggguguacagcaccggcagcaacguguuccagacccgggccggcugccugaucggcgccgagcacgugaacaacuccuacgagugcgacauccccaucggcgcuggcaucugcgccagcuaccagacccagaccaacagcccccggcgggcccggagcguggccagccagagcaucaucgccuacaccaugagcuuaggcgccgagaacagcguggccuacagcaacaacagcaucgcgaucccuaccaacuucaccaucagcgugaccaccgagauacugcccgugagcaugaccaagaccagcguggacuguaccauguacaucugcggcgacagcaccgagugcagcaaccugcugcugcaguacggcagcuucugcacccagcugaaccgggcccugaccggcaucgccguggagcaggacaagaacacccaagagguguucgcccaggugaagcagaucuacaagacucccccaaucaaggacuucggcggcuucaacuucagccagauccugcccgaccccagcaagcccagcaagcggagcuucaucgaggaccugcuguucaacaaggugacccuggccgacgccggcuucaucaagcaguacggcgacugccugggggauaucgccgcucgggaccugaucugcgcccagaaguucaacggccugaccgugcugcccccucugcugaccgacgagaugaucgcccaguacaccagcgcccugcuugccggcaccaucaccagcggcuggaccuucggcgccggcgcagcccugcagauccccuucgccaugcagauggccuaccgguucaacggcaucggcgugacccagaacgugcuguacgagaaccagaagcugaucgccaaccaguucaacagcgccaucggcaagauccaggacagccugagcagcaccgccagcgcccugggcaagcugcaggacguggugaaccagaacgcucaggcccugaacacccuggugaagcagcugagcagcaacuucggcgccaucagcucagugcugaacgacauccugagcaggcuggacaagguggaggccgaggugcagaucgaccggcugaucaccggccggcugcagagccugcagaccuacgugacccagcagcugauccgggccgccgagauccgggccagcgccaaucuggcagccaccaagaugagcgagugcgugcugggccagagcaagcggguggacuuuugcggcaagggcuaccaccugaugagcuucccccagagcgccccacacggcgugguguuccuccacgucacauacgugcccgcccaggagaagaacuucaccaccgcccccgccauuugccacgacggcaaggcucacuucccccgggagggaguguucgugagcaacggcacccacugguucgugacccagcggaacuucuacgagccccagaucaucaccaccgacaacaccuucgugagcggcaacugcgacguggugaucggcaucgugaacaacaccguguacgacccccugcagccugagcuggacagcuucaaggaggagcuggacaaguacuucaagaaccacaccagccccgacguggaucugggcgacaucagcggcaucaacgccagcguggugaacauccagaaggagaucgaccggcugaacgagguggccaagaaccugaacgagagccugaucgaccugcaggagcugggcaaguacgagcaguacaucaaguggcccugguacaucuggcugggcuucaucgccggccugaucgccaucgugauggugaccaucaugcugugcugcaugaccagcugcuguagcugccugaagggcugcugcagcugcggcagcugcugcaaguucgacgaggacgacagcgagccagugcugaagggcgugaagcugcacuacaccuga

SEQ ID NO: 23027 - RNA, 3822 nt, Artificial Sequence
  SARS-CoV-2/Wuhan/WIV05/2019__EPI_ISL_402128 spike protein CDS gc (1-1273)(S477N_D614G)
auguucguguuccuggugcugcugccccuggugagcagccagugcgugaaccugaccacccggacccagcugcccccugccuacaccaacagcuucacccggggcguguacuaccccgacaagguguuccggagcagcgugcugcacagcacccaggaccuguuccugcccuucuucagcaacgugaccugguuccacgccauccacgugagcggcaccaacggcaccaagcgguucgacaacccagugcugcccuucaacgacggcguguacuucgccagcaccgagaagucaaacaucauccggggcuggaucuucggcaccacccuggacagcaagacacagagccugcugaucgugaacaacgccaccaacguggugaucaaggugugcgaguuucaguucugcaacgaccccuuccugggcguguacuaccacaagaacaacaagagcuggauggagagcgaguuccgggucuacagcagcgcuaacaauugcaccuucgaguacgugagccagcccuuccugauggaccucgagggcaagcagggcaacuucaagaaccugcgggaguucguguucaagaacaucgauggcuacuucaagaucuacagcaagcacacccccaucaaccuggugcgggaccugccccagggauucagcgcccuggagccucugguggaccugcccaucggcaucaacaucaccagguuccagacccugcuggcccugcaccggagcuaccugacccccggcgacagcagcagcggcuggaccgccggcgccgccgcauacuacgugggcuaccugcagccacggaccuuccugcugaaguacaacgagaacggcaccaucaccgacgccguggacugcgcccuggacccccugagcgagaccaagugcacccuaaagagcuucaccguggagaagggcaucuaccagaccagcaacuuccgggugcagcccacugagagcaucgugcgguuccccaacauuaccaaccugugucccuucggcgagguguucaacgccacccgguucgccagcguguacgccuggaaccggaagcggaucagcaacugcguggccgacuacagcgugcuguacaacagcgccagcuucagcaccuucaagugcuacggcgugagcccuaccaagcugaacgaccugugcuucaccaacguguacgcugacagcuucgugauccggggcgacgaggugcggcagaucgcccccggccagaccggcaagaucgccgacuacaacuacaagcugcccgacgacuucaccggcugcgugaucgccuggaacagcaacaaccuggacagcaaggugggcggcaacuacaacuaccuguaccggcuguuccguaagagcaaccugaagccauucgagcgggacaucagcaccgagaucuaccaggccggcaacacccccugcaacgguguggagggcuuuaacugcuacuucccccugcagagcuacggcuuccagcccaccaacggcgugggcuaccagcccuaccgggugguggugcugagcuucgagcugcugcacgcccccgccaccgugugcggcccuaaaaagagcaccaaccuggugaagaacaagugcgugaauuucaacuucaacggccugaccggcaccggcgugcugaccgagagcaacaagaaguuccugcccuuccagcaguucggccgggauaucgccgacaccaccgacgcagugcgggacccccagacccuggagauccuggacaucaccccaugcagcuucggcggcgugagcgucaucacccccggcacaaacaccagcaaccagguggccgugcuguaccagggagugaacugcaccgaggugcccguggccauccacgccgaccagcugacccccaccuggcggguguacagcaccggcagcaacguguuccagacccgggccggcugccugaucggcgccgagcacgugaacaacagcuacgagugcgacauccccaucggcgcuggcaucugcgccuccuaccagacccagaccaacagcccccggcgggcccggagcguggccagccagagcaucaucgccuacaccaugagcuuaggcgccgagaacagcguggccuacagcaacaacagcaucgcgaucccuaccaacuucaccaucagcgugaccaccgagauacugcccgugagcaugaccaagaccagcguggacuguaccauguacaucugcggcgacagcaccgagugcagcaaccugcugcugcaguacggcagcuucugcacccagcugaaccgggcccugaccggcaucgccguggagcaggacaagaacacccaagagguguucgcccaggugaagcagaucuacaagacucccccaaucaaggacuucggcggcuucaacuucagccagauccugcccgaccccagcaagcccagcaagcggagcuucaucgaggaccugcuguucaacaaggugacccuggccgacgccggcuucaucaagcaguacggcgacugccugggggauaucgccgcucgggaccugaucugcgcccagaaguucaacggccugaccgugcugcccccucugcugaccgacgagaugaucgcccaguacaccagcgcccugcuugccggcaccaucaccagcggcuggaccuucggcgccggcgcagcccugcagauccccuucgccaugcagauggccuaccgguucaacggcaucggcgugacccagaacgugcuguacgagaaccagaagcugaucgccaaccaguucaacagcgccaucggcaagauccaggacagccugagcagcaccgccagcgcccugggcaagcugcaggacguggugaaccagaacgcucaggcccugaacacccuggugaagcagcugagcagcaauuucggcgccaucagcagcgugcugaacgacauccugucaaggcuggacaagguggaggccgaggugcagaucgaccggcugaucaccggccggcugcagagccugcagaccuacgugacccagcagcugauccgggccgccgagauccgggccagcgccaaccuggcagccaccaagaugagcgagugcgugcugggccagagcaagcggguggacuuuugcggcaagggcuaccaccugaugagcuucccccagagcgccccacacggcgugguguuccuccacgucacauacgugcccgcccaggagaagaacuucaccaccgcccccgccauuugccacgacggcaaggcucacuucccccgggagggaguguucgugagcaacggcacccacugguucgugacccagcggaacuucuacgagccccagaucaucaccaccgacaacaccuucgugagcggcaacugcgacguggugaucggcaucgugaacaacaccguguacgacccccugcagccugagcuggacagcuucaaggaggagcuggacaaguacuucaagaaccacaccagccccgacguggaucugggcgacaucagcggcaucaacgccagcguggugaacauccagaaggagaucgaccggcugaacgagguggccaagaaccugaacgagagccugaucgaccugcaggagcugggcaaguacgagcaguacaucaaguggcccugguacaucuggcugggcuucaucgccggccugaucgccaucgugauggugaccaucaugcugugcugcaugaccagcugcuguagcugccugaagggcugcugcagcugcggcagcugcugcaaguucgacgaggacgacagcgagccagugcugaagggcgugaagcugcacuacaccuga

SEQ ID NO: 23028 - RNA, 3822 nt, Artificial Sequence
  SARS-CoV-2/Wuhan/WIV05/2019__EPI_ISL_402128 spike protein CDS gc (1-1273)(N501Y_D614G)
auguucguguuccuggugcugcugccccuggugagcagccagugcgugaaccugaccacccggacccagcugcccccugccuacaccaacagcuucacccggggcguguacuaccccgacaagguguuccggagcagcgugcugcacagcacccaggaccuguuccugcccuucuucagcaacgugaccugguuccacgccauccacgugagcggcaccaacggcaccaagcgguucgacaacccagugcugcccuucaacgacggcguguacuucgccagcaccgagaagucaaacaucauccggggcuggaucuucggcaccacccuggacagcaagacacagagccugcugaucgugaacaacgccaccaacguggugaucaaggugugcgaguuucaguucugcaacgaccccuuccugggcguguacuaccacaagaacaacaagagcuggauggagagcgaguuccgggucuacagcagcgcuaacaauugcaccuucgaguacgugagccagcccuuccugauggaccucgagggcaagcagggcaacuucaagaaccugcgggaguucguguucaagaacaucgauggcuacuucaagaucuacagcaagcacacccccaucaaccuggugcgggaccugccccagggauucagcgcccuggagccucugguggaccugcccaucggcaucaacaucaccagguuccagacccugcuggcccugcaccggagcuaccugacccccggcgacagcagcagcggcuggaccgccggcgccgccgcauacuacgugggcuaccugcagccacggaccuuccugcugaaguacaacgagaacggcaccaucaccgacgccguggacugcgcccuggacccccugagcgagaccaagugcacccuaaagagcuucaccguggagaagggcaucuaccagaccagcaacuuccgggugcagcccacugagagcaucgugcgguuccccaacauuaccaaccugugucccuucggcgagguguucaacgccacccgguucgccagcguguacgccuggaaccggaagcggaucagcaacugcguggccgacuacagcgugcuguacaacagcgccagcuucagcaccuucaagugcuacggcgugagcccuaccaagcugaacgaccugugcuucaccaacguguacgcugacagcuucgugauccggggcgacgaggugcggcagaucgcccccggccagaccggcaagaucgccgacuacaacuacaagcugcccgacgacuucaccggcugcgugaucgccuggaacagcaacaaccuggacagcaaggugggcggcaacuacaacuaccuguaccggcuguuccguaagagcaaccugaagccauucgagcgggacaucagcaccgagaucuaccaggccggcagcacccccugcaacgguguggagggcuuuaacugcuacuucccccugcagagcuacggcuuccagcccaccuacggcgugggcuaccagcccuaccgggugguggugcugagcuucgagcugcugcacgcccccgccaccgugugcggcccuaaaaagagcaccaaccuggugaagaacaagugcgugaacuucaacuucaauggccugaccggcaccggcgugcugaccgagagcaacaagaaguuccugcccuuccagcaguucggccgggauaucgccgacaccaccgacgcagugcgggacccccagacccuggagauccuggacaucaccccaugcagcuucggcggcgugagcgucaucacccccggcacaaacaccagcaaccagguggccgugcuguaccagggagugaacugcaccgaggugcccguggccauccacgccgaccagcugacccccaccuggcggguguacagcaccggcagcaacguguuccagacccgggccggcugccugaucggcgccgagcacgugaacaacuccuacgagugcgacauccccaucggcgcuggcaucugcgccagcuaccagacccagaccaacagcccccggcgggcccggagcguggccagccagagcaucaucgccuacaccaugagcuuaggcgccgagaacagcguggccuacagcaacaacagcaucgcgaucccuaccaacuucaccaucagcgugaccaccgagauacugcccgugagcaugaccaagaccagcguggacuguaccauguacaucugcggcgacagcaccgagugcagcaaccugcugcugcaguacggcagcuucugcacccagcugaaccgggcccugaccggcaucgccguggagcaggacaagaacacccaagagguguucgcccaggugaagcagaucuacaagacucccccaaucaaggacuucggcggcuucaacuucagccagauccugcccgaccccagcaagcccagcaagcggagcuucaucgaggaccugcuguucaacaaggugacccuggccgacgccggcuucaucaagcaguacggcgacugccugggggauaucgccgcucgggaccugaucugcgcccagaaguucaacggccugaccgugcugcccccucugcugaccgacgagaugaucgcccaguacaccagcgcccugcuugccggcaccaucaccagcggcuggaccuucggcgccggcgcagcccugcagauccccuucgccaugcagauggccuaccgguucaacggcaucggcgugacccagaacgugcuguacgagaaccagaagcugaucgccaaccaguucaacagcgccaucggcaagauccaggacagccugagcagcaccgccagcgcccugggcaagcugcaggacguggugaaccagaacgcucaggcccugaacacccuggugaagcagcugagcagcaacuucggcgccaucagcucagugcugaacgacauccugagcaggcuggacaagguggaggccgaggugcagaucgaccggcugaucaccggccggcugcagagccugcagaccuacgugacccagcagcugauccgggccgccgagauccgggccagcgccaaucuggcagccaccaagaugagcgagugcgugcugggccagagcaagcggguggacuuuugcggcaagggcuaccaccugaugagcuucccccagagcgccccacacggcgugguguuccuccacgucacauacgugcccgcccaggagaagaacuucaccaccgcccccgccauuugccacgacggcaaggcucacuucccccgggagggaguguucgugagcaacggcacccacugguucgugacccagcggaacuucuacgagccccagaucaucaccaccgacaacaccuucgugagcggcaacugcgacguggugaucggcaucgugaacaacaccguguacgacccccugcagccugagcuggacagcuucaaggaggagcuggacaaguacuucaagaaccacaccagccccgacguggaucugggcgacaucagcggcaucaacgccagcguggugaacauccagaaggagaucgaccggcugaacgagguggccaagaaccugaacgagagccugaucgaccugcaggagcugggcaaguacgagcaguacaucaaguggcccugguacaucuggcugggcuucaucgccggccugaucgccaucgugauggugaccaucaugcugugcugcaugaccagcugcuguagcugccugaagggcugcugcagcugcggcagcugcugcaaguucgacgaggacgacagcgagccagugcugaagggcgugaagcugcacuacaccuga

SEQ ID NO: 23029 - RNA, 3816 nt, Artificial Sequence
  SARS-CoV-2/Wuhan/WIV05/2019__EPI_ISL_402128 spike protein CDS gc (1-1273)(H69del_V70del_D614G)
auguucguguuccuggugcugcugccccuggugagcagccagugcgugaaccugaccacccggacccagcugcccccugccuacaccaacagcuucacccggggcguguacuaccccgacaagguguuccggagcagcgugcugcacagcacccaggaccuguuccugcccuucuucagcaacgugaccugguuccacgccaucagcggcaccaacggcaccaagcgguucgacaacccagugcugcccuucaacgacggcguguacuucgccagcaccgagaagucaaacaucauccggggcuggaucuucggcaccacccuggacagcaagacacagagccugcugaucgugaacaacgccaccaacguggugaucaaggugugcgaguuucaguucugcaacgaccccuuccugggcguguacuaccacaagaacaacaagagcuggauggagagcgaguuccggguguacagcagcgcuaacaauugcaccuucgaguacgucagccagcccuuccugauggaccucgagggcaagcagggcaacuucaagaaccugcgggaguucguguucaagaacaucgauggcuacuucaagaucuacagcaagcacacccccaucaaccuggugcgggaccugccccagggauucagcgcccuggagccucugguggaccugcccaucggcaucaacaucaccagguuccagacccugcuggcccugcaccggagcuaccugacccccggcgacagcagcagcggcuggaccgccggcgccgccgcauacuacgugggcuaccugcagccacggaccuuccugcugaaguacaacgagaacggcaccaucaccgacgccguggacugcgcccuggacccccugagcgagaccaagugcacccuaaagagcuucaccguggagaagggcaucuaccagaccagcaacuuccgggugcagcccacugagagcaucgugcgguuccccaacauuaccaaccugugucccuucggcgagguguucaacgccacccgguucgccagcguguacgccuggaaccggaagcggaucagcaacugcguggccgacuacagcgugcuguacaacagcgccagcuucagcaccuucaagugcuacggcgugagcccuaccaagcugaacgaccugugcuucaccaacguguacgcugacagcuucgugauccggggcgacgaggugcggcagaucgcccccggccagaccggcaagaucgccgacuacaacuacaagcugcccgacgacuucaccggcugcgugaucgccuggaacagcaacaaccuggacagcaaggugggcggcaacuacaacuaccuguaccggcuguuccguaagagcaaccugaagccauucgagcgggacaucagcaccgagaucuaccaggccggcagcacccccugcaacgguguggagggcuuuaacugcuacuucccccugcagagcuacggcuuccagcccaccaacggcgugggcuaccagcccuaccgggugguggugcugagcuucgagcugcugcacgcccccgccaccgugugcggcccuaaaaagagcaccaaccuggugaagaacaagugcgugaacuucaauuucaacggccugaccggcaccggcgugcugaccgagagcaacaagaaguuccugcccuuccagcaguucggccgggauaucgccgacaccaccgacgcagugcgggacccccagacccuggagauccuggacaucaccccaugcagcuucggcggcgugagcgugaucacccccggcacaaacaccagcaaccaggucgccgugcuguaccagggagugaacugcaccgaggugcccguggccauccacgccgaccagcugacccccaccuggcggguguacagcaccggcagcaacguguuccagacccgggccggcugccugaucggcgccgagcacgugaacaacuccuacgagugcgacauccccaucggcgcuggcaucugcgccagcuaccagacccagaccaacagcccccggcgggcccggagcguggccagccagagcaucaucgccuacaccaugagcuuaggcgccgagaacagcguggccuacagcaacaacagcaucgcgaucccuaccaacuucaccaucagcgugaccaccgagauacugcccgugagcaugaccaagaccagcguggacuguaccauguacaucugcggcgacagcaccgagugcagcaaccugcugcugcaguacggcagcuucugcacccagcugaaccgggcccugaccggcaucgccguggagcaggacaagaacacccaagagguguucgcccaggugaagcagaucuacaagacucccccaaucaaggacuucggcggcuucaacuucagccagauccugcccgaccccagcaagcccagcaagcggagcuucaucgaggaccugcuguucaacaaggugacccuggccgacgccggcuucaucaagcaguacggcgacugccugggggauaucgccgcucgggaccugaucugcgcccagaaguucaacggccugaccgugcugcccccucugcugaccgacgagaugaucgcccaguacaccagcgcccugcuugccggcaccaucaccagcggcuggaccuucggcgccggcgcagcccugcagauccccuucgccaugcagauggccuaccgguucaacggcaucggcgugacccagaacgugcuguacgagaaccagaagcugaucgccaaccaguucaacagcgccaucggcaagauccaggacagccugagcagcaccgccagcgcccugggcaagcugcaggacguggugaaccagaacgcucaggcccugaacacccuggugaagcagcugagcagcaacuucggcgccaucagcucagugcugaaugacauccugagcaggcuggacaagguggaggccgaggugcagaucgaccggcugaucaccggccggcugcagagccugcagaccuacgugacccagcagcugauccgggccgccgagauccgggccagcgccaaccuggcagccaccaagaugagcgagugcgugcugggccagagcaagcggguggacuuuugcggcaagggcuaccaccugaugagcuucccccagagcgccccacacggcgugguguuccuccacgugacauacguccccgcccaggagaagaacuucaccaccgcccccgccauuugccacgacggcaaggcucacuucccccgggagggaguguucgugagcaacggcacccacugguucgugacccagcggaacuucuacgagccccagaucaucaccaccgacaacaccuucgugagcggcaacugcgacguggugaucggcaucgugaacaacaccguguacgacccccugcagccugagcuggacagcuucaaggaggagcuggacaaguacuucaagaaccacaccagccccgacguggaucugggcgacaucagcggcaucaacgccagcguggugaacauccagaaggagaucgaccggcugaacgagguggccaagaaccugaacgagagccugaucgaccugcaggagcugggcaaguacgagcaguacaucaaguggcccugguacaucuggcugggcuucaucgccggccugaucgccaucgugauggugaccaucaugcugugcugcaugaccagcugcuguagcugccugaagggcugcugcagcugcggcagcugcugcaaguucgacgaggacgacagcgagccagugcugaagggcgugaagcugcacuacaccuga

SEQ ID NO: 23030 - RNA, 3822 nt, Artificial Sequence
  SARS-CoV-2/Wuhan/WIV05/2019__EPI_ISL_402128 spike protein CDS gc (1-1273)(Y453F_D614G)
auguucguguuccuggugcugcugccccuggugagcagccagugcgugaaccugaccacccggacccagcugcccccugccuacaccaacagcuucacccggggcguguacuaccccgacaagguguuccggagcagcgugcugcacagcacccaggaccuguuccugcccuucuucagcaacgugaccugguuccacgccauccacgugagcggcaccaacggcaccaagcgguucgacaacccagugcugcccuucaacgacggcguguacuucgccagcaccgagaagucaaacaucauccggggcuggaucuucggcaccacccuggacagcaagacacagagccugcugaucgugaacaacgccaccaacguggugaucaaggugugcgaguuucaguucugcaacgaccccuuccugggcguguacuaccacaagaacaacaagagcuggauggagagcgaguuccgggucuacagcagcgcuaacaauugcaccuucgaguacgugagccagcccuuccugauggaccucgagggcaagcagggcaacuucaagaaccugcgggaguucguguucaagaacaucgauggcuacuucaagaucuacagcaagcacacccccaucaaccuggugcgggaccugccccagggauucagcgcccuggagccucugguggaccugcccaucggcaucaacaucaccagguuccagacccugcuggcccugcaccggagcuaccugacccccggcgacagcagcagcggcuggaccgccggcgccgccgcauacuacgugggcuaccugcagccacggaccuuccugcugaaguacaacgagaacggcaccaucaccgacgccguggacugcgcccuggacccccugagcgagaccaagugcacccuaaagagcuucaccguggagaagggcaucuaccagaccagcaacuuccgggugcagcccacugagagcaucgugcgguuccccaacauuaccaaccugugucccuucggcgagguguucaacgccacccgguucgccagcguguacgccuggaaccggaagcggaucagcaacugcguggccgacuacagcgugcuguacaacagcgccagcuucagcaccuucaagugcuacggcgugagcccuaccaagcugaacgaccugugcuucaccaacguguacgcugacagcuucgugauccggggcgacgaggugcggcagaucgcccccggccagaccggcaagaucgccgacuacaacuacaagcugcccgacgacuucaccggcugcgugaucgccuggaacagcaacaaccuggacagcaaggugggcggcaacuacaacuaccuguuccggcuguuccguaagagcaaccugaagccauuugagcgggacaucagcaccgagaucuaccaggccggcagcacccccugcaacgguguggagggcuucaacugcuacuucccccugcagagcuacggcuuccagcccaccaacggcgugggcuaccagcccuaccgggugguggugcugagcuucgagcugcugcacgcccccgccaccgugugcggcccuaaaaagagcaccaaccuggugaagaacaagugcgugaacuucaauuucaacggccugaccggcaccggcgugcugaccgagagcaacaagaaguuccugcccuuccagcaguucggccgggauaucgccgacaccaccgacgcagugcgggacccccagacccuggagauccuggacaucaccccaugcagcuucggcggcgugagcgucaucacccccggcacaaacaccagcaaccagguggccgugcuguaccagggagugaacugcaccgaggugcccguggccauccacgccgaccagcugacccccaccuggcggguguacagcaccggcagcaacguguuccagacccgggccggcugccugaucggcgccgagcacgugaacaacuccuacgagugcgacauccccaucggcgcuggcaucugcgccagcuaccagacccagaccaacagcccccggcgggcccggagcguggccagccagagcaucaucgccuacaccaugagcuuaggcgccgagaacagcguggccuacagcaacaacagcaucgcgaucccuaccaacuucaccaucagcgugaccaccgagauacugcccgugagcaugaccaagaccagcguggacuguaccauguacaucugcggcgacagcaccgagugcagcaaccugcugcugcaguacggcagcuucugcacccagcugaaccgggcccugaccggcaucgccguggagcaggacaagaacacccaagagguguucgcccaggugaagcagaucuacaagacucccccaaucaaggacuucggcggcuucaacuucagccagauccugcccgaccccagcaagcccagcaagcggagcuucaucgaggaccugcuguucaacaaggugacccuggccgacgccggcuucaucaagcaguacggcgacugccugggggauaucgccgcucgggaccugaucugcgcccagaaguucaacggccugaccgugcugcccccucugcugaccgacgagaugaucgcccaguacaccagcgcccugcuugccggcaccaucaccagcggcuggaccuucggcgccggcgcagcccugcagauccccuucgccaugcagauggccuaccgguucaacggcaucggcgugacccagaacgugcuguacgagaaccagaagcugaucgccaaccaguucaacagcgccaucggcaagauccaggacagccugagcagcaccgccagcgcccugggcaagcugcaggacguggugaaccagaacgcucaggcccugaacacccuggugaagcagcugagcagcaacuuuggcgccaucagcucagugcugaaugacauccugagcaggcuggacaagguggaggccgaggugcagaucgaccggcugaucaccggccggcugcagagccugcagaccuacgugacccagcagcugauccgggccgccgagauccgggccagcgccaaccuggcagccaccaagaugagcgagugcgugcugggccagagcaagcggguggacuucugcggcaagggcuaccaccugaugagcuucccccagagcgccccacacggcgugguguuccuccacgucacauacgugcccgcccaggagaagaacuucaccaccgcccccgccauuugccacgacggcaaggcucacuucccccgggagggaguguucgugagcaacggcacccacugguucgugacccagcggaacuucuacgagccccagaucaucaccaccgacaacaccuucgugagcggcaacugcgacguggugaucggcaucgugaacaacaccguguacgacccccugcagccugagcuggacagcuucaaggaggagcuggacaaguacuucaagaaccacaccagccccgacguggaucugggcgacaucagcggcaucaacgccagcguggugaacauccagaaggagaucgaccggcugaacgagguggccaagaaccugaacgagagccugaucgaccugcaggagcugggcaaguacgagcaguacaucaaguggcccugguacaucuggcugggcuucaucgccggccugaucgccaucgugauggugaccaucaugcugugcugcaugaccagcugcuguagcugccugaagggcugcugcagcugcggcagcugcugcaaguucgacgaggacgacagcgagccagugcugaagggcgugaagcugcacuacaccuga

SEQ ID NO: 23031 - RNA, 3822 nt, Artificial Sequence
  SARS-CoV-2/Wuhan/WIV05/2019__EPI_ISL_402128 spike protein CDS gc (1-1273)(D614G_I692V)
auguucguguuccuggugcugcugccccuggugagcagccagugcgugaaccugaccacccggacccagcugcccccugccuacaccaacagcuucacccggggcguguacuaccccgacaagguguuccggagcagcgugcugcacagcacccaggaccuguuccugcccuucuucagcaacgugaccugguuccacgccauccacgugagcggcaccaacggcaccaagcgguucgacaacccagugcugcccuucaacgacggcguguacuucgccagcaccgagaagucaaacaucauccggggcuggaucuucggcaccacccuggacagcaagacacagagccugcugaucgugaacaacgccaccaacguggugaucaaggugugcgaguuucaguucugcaacgaccccuuccugggcguguacuaccacaagaacaacaagagcuggauggagagcgaguuccgggucuacagcagcgcuaacaauugcaccuucgaguacgugagccagcccuuccugauggaccucgagggcaagcagggcaacuucaagaaccugcgggaguucguguucaagaacaucgauggcuacuucaagaucuacagcaagcacacccccaucaaccuggugcgggaccugccccagggauucagcgcccuggagccucugguggaccugcccaucggcaucaacaucaccagguuccagacccugcuggcccugcaccggagcuaccugacccccggcgacagcagcagcggcuggaccgccggcgccgccgcauacuacgugggcuaccugcagccacggaccuuccugcugaaguacaacgagaacggcaccaucaccgacgccguggacugcgcccuggacccccugagcgagaccaagugcacccuaaagagcuucaccguggagaagggcaucuaccagaccagcaacuuccgggugcagcccacugagagcaucgugcgguuccccaacauuaccaaccugugucccuucggcgagguguucaacgccacccgguucgccagcguguacgccuggaaccggaagcggaucagcaacugcguggccgacuacagcgugcuguacaacagcgccagcuucagcaccuucaagugcuacggcgugagcccuaccaagcugaacgaccugugcuucaccaacguguacgcugacagcuucgugauccggggcgacgaggugcggcagaucgcccccggccagaccggcaagaucgccgacuacaacuacaagcugcccgacgacuucaccggcugcgugaucgccuggaacagcaacaaccuggacagcaaggugggcggcaacuacaacuaccuguaccggcuguuccguaagagcaaccugaagccauucgagcgggacaucagcaccgagaucuaccaggccggcagcacccccugcaacgguguggagggcuuuaacugcuacuucccccugcagagcuacggcuuccagcccaccaacggcgugggcuaccagcccuaccgggugguggugcugagcuucgagcugcugcacgcccccgccaccgugugcggcccuaaaaagagcaccaaccuggugaagaacaagugcgugaacuucaauuucaacggccugaccggcaccggcgugcugaccgagagcaacaagaaguuccugcccuuccagcaguucggccgggauaucgccgacaccaccgacgcagugcgggacccccagacccuggagauccuggacaucaccccaugcagcuucggcggcgugagcgucaucacccccggcacaaacaccagcaaccagguggccgugcuguaccagggagugaacugcaccgaggugcccguggccauccacgccgaccagcugacccccaccuggcggguguacagcaccggcagcaacguguuccagacccgggccggcugccugaucggcgccgagcacgugaacaacuccuacgagugcgacauccccaucggcgcuggcaucugcgccagcuaccagacccagaccaacagcccccggcgggcccggagcguggccagccagagcgugaucgccuacaccaugagcuuaggcgccgagaacagcguggccuacagcaacaacagcaucgcgaucccuaccaacuucaccaucagcgugaccaccgagauccugcccgugagcaugaccaagaccagcguggacuguaccauguacauaugcggcgacagcaccgagugcagcaaccugcugcugcaguacggcagcuucugcacccagcugaaccgggcccugaccggcaucgccguggagcaggacaagaacacccaagagguguucgcccaggugaagcagaucuacaagacucccccaaucaaggacuucggcggcuucaacuucagccagauccugcccgaccccagcaagcccagcaagcggagcuucaucgaggaccugcuguucaacaaggugacccuggccgacgccggcuucaucaagcaguacggcgacugccugggggauaucgccgcucgggaccugaucugcgcccagaaguucaacggccugaccgugcugcccccucugcugaccgacgagaugaucgcccaguacaccagcgcccugcuugccggcaccaucaccagcggcuggaccuucggcgccggcgcagcccugcagauccccuucgccaugcagauggccuaccgguucaacggcaucggcgugacccagaacgugcuguacgagaaccagaagcugaucgccaaccaguucaacagcgccaucggcaagauccaggacagccugagcagcaccgccagcgcccugggcaagcugcaggacguggugaaccagaacgcucaggcccugaacacccuggugaagcagcugagcagcaacuucggcgccaucagcucagugcugaaugacauccugagcaggcuggacaagguggaggccgaggugcagaucgaccggcugaucaccggccggcugcagagccugcagaccuacgugacccagcagcugauccgggccgccgagauccgggccagcgccaaccuggcagccaccaagaugagcgagugcgugcugggccagagcaagcggguggacuuuugcggcaagggcuaccaccugaugagcuucccccagagcgccccacacggcguggucuuccuccacgugacauacgugcccgcccaggagaagaacuucaccaccgcccccgccaucugccacgacggcaaggcucacuucccccgggagggaguguucgugagcaacggcacccacugguucgugacccagcggaacuucuacgagccccagauuaucaccaccgacaacaccuucgugagcggcaacugcgacguggugaucggcaucgugaacaacaccguguacgacccccugcagccugagcuggacagcuucaaggaggagcuggacaaguacuucaagaaccacaccagccccgacguggaucugggcgacaucagcggcaucaacgccagcguggugaacauccagaaggagaucgaccggcugaacgagguggccaagaaccugaacgagagccugaucgaccugcaggagcugggcaaguacgagcaguacaucaaguggcccugguacaucuggcugggcuucaucgccggccugaucgccaucgugauggugaccaucaugcugugcugcaugaccagcugcuguagcugccugaagggcugcugcagcugcggcagcugcugcaaguucgacgaggacgacagcgagccagugcugaagggcgugaagcugcacuacaccuga

SEQ ID NO: 23032 - RNA, 3822 nt, Artificial Sequence
  SARS-CoV-2/Wuhan/WIV05/2019__EPI_ISL_402128 spike protein CDS gc (1-1273)(D614G_M1229I)
auguucguguuccuggugcugcugccccuggugagcagccagugcgugaaccugaccacccggacccagcugcccccugccuacaccaacagcuucacccggggcguguacuaccccgacaagguguuccggagcagcgugcugcacagcacccaggaccuguuccugcccuucuucagcaacgugaccugguuccacgccauccacgugagcggcaccaacggcaccaagcgguucgacaacccagugcugcccuucaacgacggcguguacuucgccagcaccgagaagucaaacaucauccggggcuggaucuucggcaccacccuggacagcaagacacagagccugcugaucgugaacaacgccaccaacguggugaucaaggugugcgaguuucaguucugcaacgaccccuuccugggcguguacuaccacaagaacaacaagagcuggauggagagcgaguuccgggucuacagcagcgcuaacaauugcaccuucgaguacgugagccagcccuuccugauggaccucgagggcaagcagggcaacuucaagaaccugcgggaguucguguucaagaacaucgauggcuacuucaagaucuacagcaagcacacccccaucaaccuggugcgggaccugccccagggauucagcgcccuggagccucugguggaccugcccaucggcaucaacaucaccagguuccagacccugcuggcccugcaccggagcuaccugacccccggcgacagcagcagcggcuggaccgccggcgccgccgcauacuacgugggcuaccugcagccacggaccuuccugcugaaguacaacgagaacggcaccaucaccgacgccguggacugcgcccuggacccccugagcgagaccaagugcacccuaaagagcuucaccguggagaagggcaucuaccagaccagcaacuuccgggugcagcccacugagagcaucgugcgguuccccaacauuaccaaccugugucccuucggcgagguguucaacgccacccgguucgccagcguguacgccuggaaccggaagcggaucagcaacugcguggccgacuacagcgugcuguacaacagcgccagcuucagcaccuucaagugcuacggcgugagcccuaccaagcugaacgaccugugcuucaccaacguguacgcugacagcuucgugauccggggcgacgaggugcggcagaucgcccccggccagaccggcaagaucgccgacuacaacuacaagcugcccgacgacuucaccggcugcgugaucgccuggaacagcaacaaccuggacagcaaggugggcggcaacuacaacuaccuguaccggcuguuccguaagagcaaccugaagccauucgagcgggacaucagcaccgagaucuaccaggccggcagcacccccugcaacgguguggagggcuuuaacugcuacuucccccugcagagcuacggcuuccagcccaccaacggcgugggcuaccagcccuaccgggugguggugcugagcuucgagcugcugcacgcccccgccaccgugugcggcccuaaaaagagcaccaaccuggugaagaacaagugcgugaacuucaauuucaacggccugaccggcaccggcgugcugaccgagagcaacaagaaguuccugcccuuccagcaguucggccgggauaucgccgacaccaccgacgcagugcgggacccccagacccuggagauccuggacaucaccccaugcagcuucggcggcgugagcgucaucacccccggcacaaacaccagcaaccagguggccgugcuguaccagggagugaacugcaccgaggugcccguggccauccacgccgaccagcugacccccaccuggcggguguacagcaccggcagcaacguguuccagacccgggccggcugccugaucggcgccgagcacgugaacaacuccuacgagugcgacauccccaucggcgcuggcaucugcgccagcuaccagacccagaccaacagcccccggcgggcccggagcguggccagccagagcaucaucgccuacaccaugagcuuaggcgccgagaacagcguggccuacagcaacaacagcaucgcgaucccuaccaacuucaccaucagcgugaccaccgagauacugcccgugagcaugaccaagaccagcguggacuguaccauguacaucugcggcgacagcaccgagugcagcaaccugcugcugcaguacggcagcuucugcacccagcugaaccgggcccugaccggcaucgccguggagcaggacaagaacacccaagagguguucgcccaggugaagcagaucuacaagacucccccaaucaaggacuucggcggcuucaacuucagccagauccugcccgaccccagcaagcccagcaagcggagcuucaucgaggaccugcuguucaacaaggugacccuggccgacgccggcuucaucaagcaguacggcgacugccugggggauaucgccgcucgggaccugaucugcgcccagaaguucaacggccugaccgugcugcccccucugcugaccgacgagaugaucgcccaguacaccagcgcccugcuugccggcaccaucaccagcggcuggaccuucggcgccggcgcagcccugcagauccccuucgccaugcagauggccuaccgguucaacggcaucggcgugacccagaacgugcuguacgagaaccagaagcugaucgccaaccaguucaacagcgccaucggcaagauccaggacagccugagcagcaccgccagcgcccugggcaagcugcaggacguggugaaccagaacgcucaggcccugaacacccuggugaagcagcugagcagcaacuucggcgccaucagcucagugcugaaugacauccugagcaggcuggacaagguggaggccgaggugcagaucgaccggcugaucaccggccggcugcagagccugcagaccuacgugacccagcagcugauccgggccgccgagauccgggccagcgccaaccuggcagccaccaagaugagcgagugcgugcugggccagagcaagcggguggacuuuugcggcaagggcuaccaccugaugagcuucccccagagcgccccacacggcgugguguuccuccacgucacauacgugcccgcccaggagaagaacuucaccaccgcccccgccauuugccacgacggcaaggcucacuucccccgggagggaguguucgugagcaacggcacccacugguucgugacccagcggaacuucuacgagccccagaucaucaccaccgacaacaccuucgugagcggcaacugcgacguggugaucggcaucgugaacaacaccguguacgacccccugcagccugagcuggacagcuucaaggaggagcuggacaaguacuucaagaaccacaccagccccgacguggaucugggcgacaucagcggcaucaacgccagcguggugaacauccagaaggagaucgaccggcugaacgagguggccaagaaccugaacgagagccugaucgaccugcaggagcugggcaaguacgagcaguacaucaaguggcccugguacaucuggcugggcuucaucgccggccugaucgccaucgugaucgugaccaucaugcugugcugcaugaccagcugcuguagcugccugaagggcugcugcagcugcggcagcugcugcaaguucgacgaggacgacagcgagccagugcugaagggcgugaagcugcacuacaccuga

SEQ ID NO: 23033 - RNA, 3816 nt, Artificial Sequence
  SARS-CoV-2/Wuhan/WIV05/2019__EPI_ISL_402128 spike protein CDS gc (1-1273)(H69del_V70del_A222V_Y453F_S477N_D614G_I692V)
auguucguguuccuggugcugcugccccuggugagcagccagugcgugaaccugaccacccggacccagcugcccccugccuacaccaacagcuucacccggggcguguacuaccccgacaagguguuccggagcagcgugcugcacagcacccaggaccuguuccugcccuucuucagcaacgugaccugguuccacgccaucagcggcaccaacggcaccaagcgguucgacaacccagugcugcccuucaacgacggcguguacuucgccagcaccgagaagucaaacaucauccggggcuggaucuucggcaccacccuggacagcaagacacagagccugcugaucgugaacaacgccaccaacguggugaucaaggugugcgaguuucaguucugcaacgaccccuuccugggcguguacuaccacaagaacaacaagagcuggauggagagcgaguuccggguguacagcagcgcuaacaauugcaccuucgaguacgucagccagcccuuccugauggaccucgagggcaagcagggcaacuucaagaaccugcgggaguucguguucaagaacaucgauggcuacuucaagaucuacagcaagcacacccccaucaaccuggugcgggaccugccccagggauucagcgugcuggagccucugguggaccugcccaucggcaucaacaucaccagguuccagacccugcuggcccugcaccggagcuaccugacccccggcgacagcagcagcggcuggaccgccggcgccgccgccuacuacgugggcuaccugcagccacggaccuuccugcugaaguacaacgagaacggcaccaucaccgacgcaguggacugcgcccuggacccccugagcgagaccaagugcacccuaaagagcuucaccguggagaagggcaucuaccagaccagcaacuuccgggugcagcccacugagagcaucgugcgguuccccaacauuaccaaccugugucccuucggcgagguguucaacgccacccgguucgccagcguguacgccuggaaccggaagcggaucagcaacugcguggccgacuacagcgugcuguacaacagcgccagcuucagcaccuucaagugcuacggcgugagcccuaccaagcugaacgaccugugcuucaccaacguguacgccgacagcuucgugauccggggcgacgaggugcggcagaucgcucccggccagaccggcaagaucgccgacuacaacuacaagcugcccgacgacuucaccggcugcgugaucgccuggaacagcaacaaccuggacagcaaggugggcggcaacuacaacuaccuguuccggcuguuccguaagagcaaccugaagccauuugagcgggacaucagcaccgagaucuaccaggccggcaacacccccugcaacgguguggagggcuucaacugcuacuucccccugcagagcuacggcuuccagcccaccaacggcgugggcuaccagcccuaccgggugguggugcugagcuucgagcugcugcacgcccccgccaccgugugcggcccuaaaaagagcaccaaccuggugaagaacaagugcgugaauuucaacuucaacggccugaccggcaccggcgugcugaccgagagcaacaagaaguuccugcccuuccagcaguucggccgggauaucgccgacaccaccgacgccgugcgggacccccagacccuggagauccuggacaucaccccaugcagcuucggcggcgugagcgucaucacccccggcacaaacaccagcaaccagguggcagugcuguaccagggagugaacugcaccgaggugcccguggccauccacgccgaccagcugacccccaccuggcggguguacagcaccggcagcaacguguuccagacccgggccggcugccugaucggcgccgagcacgugaacaacagcuacgagugcgacauccccaucggcgccggcaucugcgcuuccuaccagacccagaccaacagcccccggcgggcccggagcguggccagccagagcgugaucgccuacaccaugagcuuaggcgccgagaacagcguggccuacagcaacaacagcaucgccaucccuaccaacuucaccaucagcgugaccaccgagauccugcccgugagcaugaccaagaccagcguggacuguaccauguacauaugcggcgacagcaccgagugcagcaaccugcugcugcaguacggcagcuucugcacccagcugaaccgggcgcugaccggcaucgccguggagcaggacaagaacacccaagagguguucgcccaggugaagcagaucuacaagacucccccaaucaaggacuucggcggcuucaacuucagccagauccugcccgaccccagcaagcccagcaagcggagcuucaucgaggaccugcuguucaacaaggugacccuggccgacgccggcuucaucaagcaguacggcgacugccugggggauaucgccgcccgggaccugaucugcgcucagaaguucaacggccugaccgugcugcccccucugcugaccgacgagaugaucgcccaguacaccagcgcccugcuugccggcaccaucaccagcggcuggaccuucggcgccggcgccgcacugcagauccccuucgccaugcagauggccuaccgguucaacggcaucggcgugacccagaacgugcuguacgagaaccagaagcugaucgccaaccaguucaacagcgccaucggcaagauccaggacagccugagcagcaccgccagcgcccugggcaagcugcaggacguggugaaccagaacgcccaggcucugaacacccuggugaagcagcugagcagcaauuuuggcgccaucagcagcgugcugaacgacauccugucaaggcuggacaagguggaggccgaggugcagaucgaccggcugaucaccggccggcugcagagccugcagaccuacgugacccagcagcugauccgggccgccgagauccgggccagcgccaaccuggccgcaaccaagaugagcgagugcgugcugggccagagcaagcggguggacuucugcggcaagggcuaccaccugaugagcuucccccagagcgccccacacggcguggucuuccuccacgugacauacgugcccgcccaggagaagaacuucaccaccgcccccgccaucugccacgacggcaaggcccacuucccccgggagggaguguucgugagcaacggcacccacugguucgugacccagcggaacuucuacgagccccagauuaucaccaccgacaacaccuucgugagcggcaacugcgacguggugaucggcaucgugaacaacaccguguacgacccccugcagccugagcuggacagcuucaaggaggagcuggacaaguacuucaagaaccacaccagccccgacguggaucugggcgacaucagcggcaucaacgcuagcguggugaacauccagaaggagaucgaccggcugaacgagguggccaagaaccugaacgagagccugaucgaccugcaggagcugggcaaguacgagcaguacaucaaguggcccugguacaucuggcugggcuucaucgccggccugaucgccaucgugauggugaccaucaugcugugcugcaugaccagcugcuguagcugccugaagggcugcugcagcugcggcagcugcugcaaguucgacgaggacgacagcgagccagugcugaagggcgugaagcugcacuacaccuga

SEQ ID NO: 23034 - RNA, 3816 nt, Artificial Sequence
  SARS-CoV-2/Wuhan/WIV05/2019__EPI_ISL_402128 spike protein CDS gc (1-1273)(H69del_V70del_Y453F_D614G_I692V_M1229I)
auguucguguuccuggugcugcugccccuggugagcagccagugcgugaaccugaccacccggacccagcugcccccugccuacaccaacagcuucacccggggcguguacuaccccgacaagguguuccggagcagcgugcugcacagcacccaggaccuguuccugcccuucuucagcaacgugaccugguuccacgccaucagcggcaccaacggcaccaagcgguucgacaacccagugcugcccuucaacgacggcguguacuucgccagcaccgagaagucaaacaucauccggggcuggaucuucggcaccacccuggacagcaagacacagagccugcugaucgugaacaacgccaccaacguggugaucaaggugugcgaguuucaguucugcaacgaccccuuccugggcguguacuaccacaagaacaacaagagcuggauggagagcgaguuccggguguacagcagcgcuaacaauugcaccuucgaguacgucagccagcccuuccugauggaccucgagggcaagcagggcaacuucaagaaccugcgggaguucguguucaagaacaucgauggcuacuucaagaucuacagcaagcacacccccaucaaccuggugcgggaccugccccagggauucagcgcccuggagccucugguggaccugcccaucggcaucaacaucaccagguuccagacccugcuggcccugcaccggagcuaccugacccccggcgacagcagcagcggcuggaccgccggcgccgccgcauacuacgugggcuaccugcagccacggaccuuccugcugaaguacaacgagaacggcaccaucaccgacgccguggacugcgcccuggacccccugagcgagaccaagugcacccuaaagagcuucaccguggagaagggcaucuaccagaccagcaacuuccgggugcagcccacugagagcaucgugcgguuccccaacauuaccaaccugugucccuucggcgagguguucaacgccacccgguucgccagcguguacgccuggaaccggaagcggaucagcaacugcguggccgacuacagcgugcuguacaacagcgccagcuucagcaccuucaagugcuacggcgugagcccuaccaagcugaacgaccugugcuucaccaacguguacgcugacagcuucgugauccggggcgacgaggugcggcagaucgcccccggccagaccggcaagaucgccgacuacaacuacaagcugcccgacgacuucaccggcugcgugaucgccuggaacagcaacaaccuggacagcaaggugggcggcaacuacaacuaccuguuccggcuguuccguaagagcaaccugaagccauuugagcgggacaucagcaccgagaucuaccaggccggcagcacccccugcaacgguguggagggcuucaacugcuacuucccccugcagagcuacggcuuccagcccaccaacggcgugggcuaccagcccuaccgggugguggugcugagcuucgagcugcugcacgcccccgccaccgugugcggcccuaaaaagagcaccaaccuggugaagaacaagugcgugaacuucaauuucaacggccugaccggcaccggcgugcugaccgagagcaacaagaaguuccugcccuuccagcaguucggccgggauaucgccgacaccaccgacgcagugcgggacccccagacccuggagauccuggacaucaccccaugcagcuucggcggcgugagcgugaucacccccggcacaaacaccagcaaccaggucgccgugcuguaccagggagugaacugcaccgaggugcccguggccauccacgccgaccagcugacccccaccuggcggguguacagcaccggcagcaacguguuccagacccgggccggcugccugaucggcgccgagcacgugaacaacuccuacgagugcgacauccccaucggcgcuggcaucugcgccagcuaccagacccagaccaacagcccccggcgggcccggagcguggccagccagagcgugaucgccuacaccaugagcuuaggcgccgagaacagcguggccuacagcaacaacagcaucgcgaucccuaccaacuucaccaucagcgugaccaccgagauccugcccgugagcaugaccaagaccagcguggacuguaccauguacauaugcggcgacagcaccgagugcagcaaccugcugcugcaguacggcagcuucugcacccagcugaaccgggcccugaccggcaucgccguggagcaggacaagaacacccaagagguguucgcccaggugaagcagaucuacaagacucccccaaucaaggacuucggcggcuucaacuucagccagauccugcccgaccccagcaagcccagcaagcggagcuucaucgaggaccugcuguucaacaaggugacccuggccgacgccggcuucaucaagcaguacggcgacugccugggggauaucgccgcucgggaccugaucugcgcccagaaguucaacggccugaccgugcugcccccucugcugaccgacgagaugaucgcccaguacaccagcgcccugcuugccggcaccaucaccagcggcuggaccuucggcgccggcgcagcccugcagauccccuucgccaugcagauggccuaccgguucaacggcaucggcgugacccagaacgugcuguacgagaaccagaagcugaucgccaaccaguucaacagcgccaucggcaagauccaggacagccugagcagcaccgccagcgcccugggcaagcugcaggacguggugaaccagaacgcucaggcccugaacacccuggugaagcagcugagcagcaacuuuggcgccaucagcucagugcugaaugacauccugagcaggcuggacaagguggaggccgaggugcagaucgaccggcugaucaccggccggcugcagagccugcagaccuacgugacccagcagcugauccgggccgccgagauccgggccagcgccaaccuggcagccaccaagaugagcgagugcgugcugggccagagcaagcggguggacuucugcggcaagggcuaccaccugaugagcuucccccagagcgccccacacggcgugguguuccuccacgucacauacgugcccgcccaggagaagaacuucaccaccgcccccgccaucugccacgacggcaaggcucacuucccccgggagggaguguucgugagcaacggcacccacugguucgugacccagcggaacuucuacgagccccagauuaucaccaccgacaacaccuucgugagcggcaacugcgacguggugaucggcaucgugaacaacaccguguacgacccccugcagccugagcuggacagcuucaaggaggagcuggacaaguacuucaagaaccacaccagccccgacguggaucugggcgacaucagcggcaucaacgccagcguggugaacauccagaaggagaucgaccggcugaacgagguggccaagaaccugaacgagagccugaucgaccugcaggagcugggcaaguacgagcaguacaucaaguggcccugguacaucuggcugggcuucaucgccggccugaucgccaucgugaucgugaccaucaugcugugcugcaugaccagcugcuguagcugccugaagggcugcugcagcugcggcagcugcugcaaguucgacgaggacgacagcgagccagugcugaagggcgugaagcugcacuacaccuga

SEQ ID NO: 23035 - RNA, 3813 nt, Artificial Sequence
  SARS-CoV-2/Wuhan/WIV05/2019__EPI_ISL_402128 spike protein CDS gc (1-1273)(H69del_V70del_Y144del_N501Y_A570D_D614G_P681H_T716I_S982 A_D1118H)
auguucguguuccuggugcugcugccccuggugagcagccagugcgugaaccugaccacccggacccagcugcccccugccuacaccaacagcuucacccggggcguguacuaccccgacaagguguuccggagcagcgugcugcacagcacccaggaccuguuccugcccuucuucagcaacgugaccugguuccacgccaucagcggcaccaacggcaccaagcgguucgacaacccagugcugcccuucaacgacggcguguacuucgccagcaccgagaagucaaacaucauccggggcuggaucuucggcaccacccuggacagcaagacacagagccugcugaucgugaacaacgccaccaacguggugaucaaggugugcgaguuucaguucugcaacgaccccuuccugggcguguaccacaagaacaacaagagcuggauggagagcgaguuccggguguacagcagcgcuaacaauugcaccuucgaguacgucagccagcccuuccugauggaccucgagggcaagcagggcaacuucaagaaccugcgggaguucguguucaagaacaucgauggcuacuucaagaucuacagcaagcacacccccaucaaccuggugcgggaccugccccagggauucagcgcccuggagccucugguggaccugcccaucggcaucaacaucaccagguuccagacccugcuggcccugcaccggagcuaccugacccccggcgacagcagcagcggcuggaccgccggcgccgccgcauacuacgugggcuaccugcagccacggaccuuccugcugaaguacaacgagaacggcaccaucaccgacgccguggacugcgcccuggacccccugagcgagaccaagugcacccuaaagagcuucaccguggagaagggcaucuaccagaccagcaacuuccgggugcagcccacugagagcaucgugcgguuccccaacauuaccaaccugugucccuucggcgagguguucaacgccacccgguucgccagcguguacgccuggaaccggaagcggaucagcaacugcguggccgacuacagcgugcuguacaacagcgccagcuucagcaccuucaagugcuacggcgugagcccuaccaagcugaacgaccugugcuucaccaacguguacgcugacagcuucgugauccggggcgacgaggugcggcagaucgcccccggccagaccggcaagaucgccgacuacaacuacaagcugcccgacgacuucaccggcugcgugaucgccuggaacagcaacaaccuggacagcaaggugggcggcaacuacaacuaccuguaccggcuguuccguaagagcaaccugaagccauucgagcgggacaucagcaccgagaucuaccaggccggcagcacccccugcaacgguguggagggcuuuaacugcuacuucccccugcagagcuacggcuuccagcccaccuacggcgugggcuaccagcccuaccgggugguggugcugagcuucgagcugcugcacgcccccgccaccgugugcggcccuaaaaagagcaccaaccuggugaagaacaagugcgugaacuucaacuucaauggccugaccggcaccggcgugcugaccgagagcaacaagaaguuccugcccuuccagcaguucggccgggauaucgacgacaccaccgacgccgugcgggacccccagacccuggagauccuggacaucaccccaugcagcuucggcggcgugagcgugaucacccccggcacaaacaccagcaaccaggucgcagugcuguaccagggagugaacugcaccgaggugcccguggccauccacgccgaccagcugacccccaccuggcggguguacagcaccggcagcaacguguuccagacccgggccggcugccugaucggcgccgagcacgugaacaacuccuacgagugcgacauccccaucggcgccggcaucugcgcuagcuaccagacccagaccaacagccaccggcgggcccggagcguggccagccagagcaucaucgccuacaccaugagcuuaggcgccgagaacagcguggccuacagcaacaacagcaucgccauccccaucaacuucaccauaagcgugaccaccgagauccugccugugagcaugaccaagaccagcguggacuguaccauguacaucugcggcgacagcaccgagugcagcaaccugcugcugcaguacggcagcuucugcacccagcugaaccgggcgcugaccggcaucgccguggagcaggacaagaacacccaagagguguucgcccaggugaagcagaucuacaagaccccacccaucaaggacuucggcggcuucaacuucagccagauccugcccgaccccagcaagcccagcaagcggagcuucaucgaggaccugcuguucaacaaggugacucuggccgacgccggcuucaucaagcaguacggcgauugccugggggacaucgccgcccgggaccugaucugcgcucagaaguucaacggccugaccgugcugccuccccugcugaccgacgagaugaucgcccaguacaccagcgcccugcuugccggcaccaucaccagcggcuggaccuucggcgccggcgccgcacugcagauccccuucgccaugcagauggccuaccgguucaacggcaucggcgugacccagaacgugcuguacgagaaccagaagcugaucgccaaccaguucaacagcgccaucggcaagauccaggacagccugagcagcaccgccagcgcccugggcaagcugcaggacguggugaaccagaacgcccaggcucugaacacccuggugaagcagcugagcagcaacuucggcgccaucagcucagugcugaacgacauccuggccaggcuggacaagguggaggccgaggugcagaucgaccggcugaucaccggccggcugcagagccugcagaccuacgugacccagcagcugauccgggccgccgagauucgggccagcgccaaucuggcagccaccaagaugagcgagugcgugcugggccagagcaagcggguggacuuuugcggcaagggcuaccaccugaugagcuucccccagagcgcuccccacggcgugguguuccuccacgugaccuacgucccagcccaggagaagaacuucacaaccgcccccgccaucugccacgacggcaaggcccacuucccccgggagggaguguucgugagcaacggcacccacugguucgugacccagcggaacuucuacgagccccagaucaucaccacccacaacaccuucgugagcggcaacugcgacguggugaucggcaucgugaacaacaccguguacgacccccugcagcccgagcuggacagcuucaaggaggagcuggacaaguacuucaagaaccacaccagcccugacguggaucugggcgacaucagcggcaucaacgccagcguggugaacauccagaaggagaucgaccggcugaacgagguggccaagaaccugaacgagagccugaucgaccugcaggagcugggcaaguacgagcaguacaucaaguggcccugguacaucuggcugggcuucaucgccggccugaucgccaucgugauggugaccaucaugcugugcugcaugaccagcugcuguagcugccugaagggcugcugcagcugcggcagcugcugcaaguucgacgaggacgacagcgagcccgugcugaagggcgugaagcugcacuacaccuga

SEQ ID NO: 23036 - RNA, 3822 nt, Artificial Sequence
  SARS-CoV-2/Wuhan/WIV05/2019__EPI_ISL_402128 spike protein CDS gc (1-1273)(K417N_E484K_N501Y_D614G)
auguucguguuccuggugcugcugccccuggugagcagccagugcgugaaccugaccacccggacccagcugcccccugccuacaccaacagcuucacccggggcguguacuaccccgacaagguguuccggagcagcgugcugcacagcacccaggaccuguuccugcccuucuucagcaacgugaccugguuccacgccauccacgugagcggcaccaacggcaccaagcgguucgacaacccagugcugcccuucaacgacggcguguacuucgccagcaccgagaagucaaacaucauccggggcuggaucuucggcaccacccuggacagcaagacacagagccugcugaucgugaacaacgccaccaacguggugaucaaggugugcgaguuucaguucugcaacgaccccuuccugggcguguacuaccacaagaacaacaagagcuggauggagagcgaguuccgggucuacagcagcgcuaacaauugcaccuucgaguacgugagccagcccuuccugauggaccucgagggcaagcagggcaacuucaagaaccugcgggaguucguguucaagaacaucgauggcuacuucaagaucuacagcaagcacacccccaucaaccuggugcgggaccugccccagggauucagcgcccuggagccucugguggaccugcccaucggcaucaacaucaccagguuccagacccugcuggcccugcaccggagcuaccugacccccggcgacagcagcagcggcuggaccgccggcgccgccgcauacuacgugggcuaccugcagccacggaccuuccugcugaaguacaacgagaacggcaccaucaccgacgccguggacugcgcccuggacccccugagcgagaccaagugcacccuaaagagcuucaccguggagaagggcaucuaccagaccagcaacuuccgggugcagcccacugagagcaucgugcgguuccccaacauuaccaaccugugucccuucggcgagguguucaacgccacccgguucgccagcguguacgccuggaaccggaagcggaucagcaacugcguggccgacuacagcgugcuguacaacagcgccagcuucagcaccuucaagugcuacggcgugagcccuaccaagcugaacgaccugugcuucaccaacguguacgcugacagcuucgugauccggggcgacgaggugcggcagaucgcccccggccagaccggcaacaucgccgacuacaacuacaagcugcccgacgacuucaccggcugcgugaucgccuggaacagcaacaaccuggacagcaaggugggcggcaacuacaacuaccuguaccggcuguuccguaagagcaaccugaagccauucgagcgggacaucagcaccgagaucuaccaggccggcagcacccccugcaacggugugaagggcuuuaacugcuacuucccccugcagagcuacggcuuccagcccaccuacggcgugggcuaccagcccuaccgggugguggugcugagcuucgagcugcugcacgcccccgccaccgugugcggcccuaaaaagagcaccaaccuggugaagaacaagugcgugaacuucaauuucaacggccugaccggcaccggcgugcugaccgagagcaacaagaaguuccugcccuuccagcaguucggccgggauaucgccgacaccaccgacgcagugcgggacccccagacccuggagauccuggacaucaccccaugcagcuucggcggcgugagcgucaucacccccggcacaaacaccagcaaccagguggccgugcuguaccagggagugaacugcaccgaggugcccguggccauccacgccgaccagcugacccccaccuggcggguguacagcaccggcagcaacguguuccagacccgggccggcugccugaucggcgccgagcacgugaacaacuccuacgagugcgacauccccaucggcgcuggcaucugcgccagcuaccagacccagaccaacagcccccggcgggcccggagcguggccagccagagcaucaucgccuacaccaugagcuuaggcgccgagaacagcguggccuacagcaacaacagcaucgcgaucccuaccaacuucaccaucagcgugaccaccgagauacugcccgugagcaugaccaagaccagcguggacuguaccauguacaucugcggcgacagcaccgagugcagcaaccugcugcugcaguacggcagcuucugcacccagcugaaccgggcccugaccggcaucgccguggagcaggacaagaacacccaagagguguucgcccaggugaagcagaucuacaagacucccccaaucaaggacuucggcggcuucaacuucagccagauccugcccgaccccagcaagcccagcaagcggagcuucaucgaggaccugcuguucaacaaggugacccuggccgacgccggcuucaucaagcaguacggcgacugccugggggauaucgccgcucgggaccugaucugcgcccagaaguucaacggccugaccgugcugcccccucugcugaccgacgagaugaucgcccaguacaccagcgcccugcuugccggcaccaucaccagcggcuggaccuucggcgccggcgcagcccugcagauccccuucgccaugcagauggccuaccgguucaacggcaucggcgugacccagaacgugcuguacgagaaccagaagcugaucgccaaccaguucaacagcgccaucggcaagauccaggacagccugagcagcaccgccagcgcccugggcaagcugcaggacguggugaaccagaacgcucaggcccugaacacccuggugaagcagcugagcagcaacuucggcgccaucagcucagugcugaaugacauccugagcaggcuggacaagguggaggccgaggugcagaucgaccggcugaucaccggccggcugcagagccugcagaccuacgugacccagcagcugauccgggccgccgagauccgggccagcgccaaccuggcagccaccaagaugagcgagugcgugcugggccagagcaagcggguggacuuuugcggcaagggcuaccaccugaugagcuucccccagagcgccccacacggcgugguguuccuccacgucacauacgugcccgcccaggagaagaacuucaccaccgcccccgccauuugccacgacggcaaggcucacuucccccgggagggaguguucgugagcaacggcacccacugguucgugacccagcggaacuucuacgagccccagaucaucaccaccgacaacaccuucgugagcggcaacugcgacguggugaucggcaucgugaacaacaccguguacgacccccugcagccugagcuggacagcuucaaggaggagcuggacaaguacuucaagaaccacaccagccccgacguggaucugggcgacaucagcggcaucaacgccagcguggugaacauccagaaggagaucgaccggcugaacgagguggccaagaaccugaacgagagccugaucgaccugcaggagcugggcaaguacgagcaguacaucaaguggcccugguacaucuggcugggcuucaucgccggccugaucgccaucgugauggugaccaucaugcugugcugcaugaccagcugcuguagcugccugaagggcugcugcagcugcggcagcugcugcaaguucgacgaggacgacagcgagccagugcugaagggcgugaagcugcacuacaccuga

SEQ ID NO: 23037 - RNA, 3813 nt, Artificial Sequence
  SARS-CoV-2/Wuhan/WIV05/2019__EPI_ISL_402128 spike protein CDS gc (1-1273)(L18F_D80A_D215G_L242del_A243del_L244del_R246I_K417N_E484 K_N501Y_D614G_A701V)
auguucguguuccuggugcugcugccccuggugagcagccagugcgugaacuucaccacccggacccagcugcccccugccuacaccaacagcuucacccggggcguguacuaccccgacaagguguuccggagcagcgugcugcacagcacccaggaccuguuccugcccuucuucagcaacgugaccugguuccacgccauccacgugagcggcaccaacggcaccaagcgguucgccaacccagugcugcccuucaacgacggcguguacuucgccagcaccgagaagucaaacaucauccggggcuggaucuuuggcaccacccuggacagcaagacacagagccugcugaucgugaacaacgcuaccaacguggugaucaaggugugcgaguuccaguucugcaacgaccccuuccugggcguguacuaccacaagaacaacaagagcuggauggagagcgaguuccgggucuacagcagcgccaacaauugcaccuucgaguacgugagccagcccuuccugauggaccuggagggcaagcagggcaacuucaagaaccuccgggaguucguguucaagaacaucgacggcuacuucaagaucuacagcaagcacacccccaucaaccuggugcggggacugccccagggcuucagcgcccuggagccucugguggaucugcccaucggcaucaacaucaccagguuccagacccugcacaucagcuaccugacccccggcgacagcagcagcggcuggaccgccggcgccgccgcauacuacgugggcuaccugcagccacggaccuuccugcugaaguacaacgagaacggcaccaucaccgacgccguggacugcgcccuggacccccugagcgagaccaagugcacccuuaagagcuucaccguggagaagggcaucuaccagaccagcaacuuccgggugcagcccacugagagcauugugcgguuccccaacaucaccaaccugugucccuucggcgagguguucaacgccacccgguucgccagcguguacgccuggaaccggaagcggaucagcaacugcguggccgacuacagcgugcuguacaacagcgccagcuucagcaccuucaagugcuacggcgugagcccuaccaagcugaacgaccugugcuucaccaacguguacgcugacagcuucgugauccggggcgacgaggugcggcagaucgcccccggccagaccggcaacaucgccgacuacaacuacaagcugcccgacgacuucaccggcugcgugaucgccuggaacagcaacaaccuggacagcaaggugggcggcaacuacaacuaccuguaccggcuauuccguaagagcaaccugaagccauuugagcgggacaucagcaccgagaucuaccaggccgguagcacccccugcaacggcgugaagggcuucaacugcuacuucccccugcagagcuacggcuuccagcccaccuacggcgugggcuaccagcccuaccgggugguggugcugagcuucgagcugcugcacgcccccgccaccgugugcggcccuaaaaagagcaccaaccuggugaagaacaagugcgugaacuucaauuucaacggccugaccggcaccggcgugcugaccgagagcaacaagaaguuccugcccuuccagcaguucggccgggacaucgccgacaccaccgaugcagugcgggacccccagacccuggagauccuggacaucaccccaugcagcuucggcggcgugagcgucaucacccccggaacaaacaccagcaaccagguggccgugcuguaccagggcgugaacugcaccgaggugcccguggccauccacgccgaccagcugacccccaccuggcggguguacagcaccggcagcaacguguuccagacccgggccggcugccugaucggcgccgagcacgugaacaacuccuacgagugcgacauccccaucggcgcuggcaucugcgccagcuaccagacccagaccaacagcccccggcgggcccggagcguggccagccagagcaucaucgccuacaccaugagccugggcguggagaacagcguggccuacagcaacaacagcaucgccaucccuaccaacuucaccauaagcgugaccaccgagauccugcccgugagcaugaccaagaccagcguggacuguaccauguacaucugcggcgacagcaccgagugcagcaaccuguuacugcaguacggcagcuucugcacccagcugaaccgggcgcugaccggcaucgccguggagcaggacaagaacacccaagagguguucgcccaggugaagcagaucuacaagacucccccaaucaaggacuucggcggcuucaacuucagccagauccugcccgaccccagcaagcccagcaagcggagcuucaucgaggaccugcuguucaacaaggugacccuggccgacgccggcuucaucaagcaguacggggacugccugggcgacaucgccgcccgggaccugaucugcgcucagaaguucaacggccugaccgugcugcccccucugcugaccgaugagaugaucgcccaguacaccagcgcccugcuggccggcaccaucaccagcggcuggaccuucggcgccggcgccgcacugcagauccccuucgccaugcagauggccuaccgguucaacggcaucggcgugacccagaacgugcuguacgagaaccagaagcugaucgccaaccaguucaacagcgccaucggcaagauccaggacagccugagcagcaccgccagcgcccugggcaagcugcaggacguggugaaccagaacgcccaggcucugaacacccuggugaagcagcugagcagcaacuuuggcgccaucagcucagugcugaaugacauccugagccggcuggacaagguggaggccgaggugcagaucgacaggcugaucaccggccggcugcagagccugcagaccuacgugacccagcagcugauccgggccgccgagauucgggccagcgccaaccuggccgcaaccaagaugagcgagugcgugcugggccagagcaagcggguggacuucugcggcaagggcuaccaccugaugagcuucccccagagcgccccacacggcguggucuuccugcacgugacauacgugcccgcccaggagaagaacuucaccaccgcccccgccaucugccacgacggaaaggcccacuucccccgggagggcguguucgugagcaacggcacccacugguucgugacccagcggaacuucuacgagccccagaucaucaccaccgacaacaccuucgugagcggcaacugcgacguggugaucggcaucgugaacaacaccguguacgacccccugcagccugagcuggacagcuucaaggaggagcucgacaaguacuucaagaaccacaccagccccgacguggaccugggcgacaucagcggcaucaacgcuagcguggugaacauccagaaggagaucgaucggcugaacgagguggccaagaaccugaacgagagccugaucgaccugcaggagcugggcaaguacgagcaguacaucaaguggcccugguacaucuggcugggcuucaucgccggccugaucgccaucgugauggugaccaucaugcugugcugcaugaccagcugcuguagcugccugaagggcugcugcagcugcggcagcugcugcaaguucgacgaggacgacagcgagccagugcugaagggcgugaagcugcacuacaccuga

SEQ ID NO: 23038 - RNA, 3822 nt, Artificial Sequence
  SARS-CoV-2/Wuhan/WIV05/2019__EPI_ISL_402128 spike protein CDS gc (1-1273)(E484K_D614G)
auguucguguuccuggugcugcugccccuggugagcagccagugcgugaaccugaccacccggacccagcugcccccugccuacaccaacagcuucacccggggcguguacuaccccgacaagguguuccggagcagcgugcugcacagcacccaggaccuguuccugcccuucuucagcaacgugaccugguuccacgccauccacgugagcggcaccaacggcaccaagcgguucgacaacccagugcugcccuucaacgacggcguguacuucgccagcaccgagaagucaaacaucauccggggcuggaucuucggcaccacccuggacagcaagacacagagccugcugaucgugaacaacgccaccaacguggugaucaaggugugcgaguuucaguucugcaacgaccccuuccugggcguguacuaccacaagaacaacaagagcuggauggagagcgaguuccgggucuacagcagcgcuaacaauugcaccuucgaguacgugagccagcccuuccugauggaccucgagggcaagcagggcaacuucaagaaccugcgggaguucguguucaagaacaucgauggcuacuucaagaucuacagcaagcacacccccaucaaccuggugcgggaccugccccagggauucagcgcccuggagccucugguggaccugcccaucggcaucaacaucaccagguuccagacccugcuggcccugcaccggagcuaccugacccccggcgacagcagcagcggcuggaccgccggcgccgccgcauacuacgugggcuaccugcagccacggaccuuccugcugaaguacaacgagaacggcaccaucaccgacgccguggacugcgcccuggacccccugagcgagaccaagugcacccuaaagagcuucaccguggagaagggcaucuaccagaccagcaacuuccgggugcagcccacugagagcaucgugcgguuccccaacauuaccaaccugugucccuucggcgagguguucaacgccacccgguucgccagcguguacgccuggaaccggaagcggaucagcaacugcguggccgacuacagcgugcuguacaacagcgccagcuucagcaccuucaagugcuacggcgugagcccuaccaagcugaacgaccugugcuucaccaacguguacgcugacagcuucgugauccggggcgacgaggugcggcagaucgcccccggccagaccggcaagaucgccgacuacaacuacaagcugcccgacgacuucaccggcugcgugaucgccuggaacagcaacaaccuggacagcaaggugggcggcaacuacaacuaccuguaccggcuguuccguaagagcaaccugaagccauucgagcgggacaucagcaccgagaucuaccaggccggcagcacccccugcaacggugugaagggcuuuaacugcuacuucccccugcagagcuacggcuuccagcccaccaacggcgugggcuaccagcccuaccgggugguggugcugagcuucgagcugcugcacgcccccgccaccgugugcggcccuaaaaagagcaccaaccuggugaagaacaagugcgugaacuucaauuucaacggccugaccggcaccggcgugcugaccgagagcaacaagaaguuccugcccuuccagcaguucggccgggauaucgccgacaccaccgacgcagugcgggacccccagacccuggagauccuggacaucaccccaugcagcuucggcggcgugagcgucaucacccccggcacaaacaccagcaaccagguggccgugcuguaccagggagugaacugcaccgaggugcccguggccauccacgccgaccagcugacccccaccuggcggguguacagcaccggcagcaacguguuccagacccgggccggcugccugaucggcgccgagcacgugaacaacuccuacgagugcgacauccccaucggcgcuggcaucugcgccagcuaccagacccagaccaacagcccccggcgggcccggagcguggccagccagagcaucaucgccuacaccaugagcuuaggcgccgagaacagcguggccuacagcaacaacagcaucgcgaucccuaccaacuucaccaucagcgugaccaccgagauacugcccgugagcaugaccaagaccagcguggacuguaccauguacaucugcggcgacagcaccgagugcagcaaccugcugcugcaguacggcagcuucugcacccagcugaaccgggcccugaccggcaucgccguggagcaggacaagaacacccaagagguguucgcccaggugaagcagaucuacaagacucccccaaucaaggacuucggcggcuucaacuucagccagauccugcccgaccccagcaagcccagcaagcggagcuucaucgaggaccugcuguucaacaaggugacccuggccgacgccggcuucaucaagcaguacggcgacugccugggggauaucgccgcucgggaccugaucugcgcccagaaguucaacggccugaccgugcugcccccucugcugaccgacgagaugaucgcccaguacaccagcgcccugcuugccggcaccaucaccagcggcuggaccuucggcgccggcgcagcccugcagauccccuucgccaugcagauggccuaccgguucaacggcaucggcgugacccagaacgugcuguacgagaaccagaagcugaucgccaaccaguucaacagcgccaucggcaagauccaggacagccugagcagcaccgccagcgcccugggcaagcugcaggacguggugaaccagaacgcucaggcccugaacacccuggugaagcagcugagcagcaacuucggcgccaucagcucagugcugaaugacauccugagcaggcuggacaagguggaggccgaggugcagaucgaccggcugaucaccggccggcugcagagccugcagaccuacgugacccagcagcugauccgggccgccgagauccgggccagcgccaaccuggcagccaccaagaugagcgagugcgugcugggccagagcaagcggguggacuuuugcggcaagggcuaccaccugaugagcuucccccagagcgccccacacggcgugguguuccuccacgucacauacgugcccgcccaggagaagaacuucaccaccgcccccgccauuugccacgacggcaaggcucacuucccccgggagggaguguucgugagcaacggcacccacugguucgugacccagcggaacuucuacgagccccagaucaucaccaccgacaacaccuucgugagcggcaacugcgacguggugaucggcaucgugaacaacaccguguacgacccccugcagccugagcuggacagcuucaaggaggagcuggacaaguacuucaagaaccacaccagccccgacguggaucugggcgacaucagcggcaucaacgccagcguggugaacauccagaaggagaucgaccggcugaacgagguggccaagaaccugaacgagagccugaucgaccugcaggagcugggcaaguacgagcaguacaucaaguggcccugguacaucuggcugggcuucaucgccggccugaucgccaucgugauggugaccaucaugcugugcugcaugaccagcugcuguagcugccugaagggcugcugcagcugcggcagcugcugcaaguucgacgaggacgacagcgagccagugcugaagggcgugaagcugcacuacaccuga

SEQ ID NO: 23039 - RNA, 3822 nt, Artificial Sequence
  SARS-CoV-2/Wuhan/WIV05/2019__EPI_ISL_402128 spike protein CDS gc (1-1273)(L18F_T20N_P26S_D138Y_R190S_K417T_E484K_N501Y_D614G_H655Y _T1027I)
auguucguguuccuggugcugcugccccuggugagcagccagugcgugaacuucaccaaccggacccagcugcccagcgccuacaccaacagcuucacccggggcguguacuacccugacaagguguuccggagcagcgugcugcacagcacccaggaccuguuccugcccuucuucagcaacgugaccugguuccacgccauccacgugagcggcaccaacggcaccaagcgguucgacaaccccgugcugccauucaacgacggcguguacuucgccagcaccgagaagucaaacaucauccggggcuggaucuuuggcaccacccuggacagcaagacccagagccugcugaucgugaacaacgccacaaacguggugaucaaggugugcgaguuccaguucugcaacuaccccuuccugggcguguacuaccacaagaacaacaagagcuggauggagagcgaguuccgggucuacagcagcgcuaauaacugcaccuucgaguacgugagccagcccuuccugauggaccuggagggcaagcagggcaacuucaagaaccucagcgaguucguguucaagaacaucgacggcuacuucaagaucuacagcaagcacacccccaucaaccuggugcgggaucugccccagggauucagcgcccuggagccccugguggaccugccuaucggcaucaacaucacccgguuccagacccugcuggcccugcacaggagcuaccugacccccggcgacagcagcagcggcuggaccgccggcgccgccgcauacuacgugggcuaccugcagccccggaccuuccugcugaaguacaacgagaacggcaccaucaccgacgccguggacugcgcccuggacccacugagcgagaccaagugcacccuaaagagcuucaccguggagaagggcaucuaccagaccagcaacuuccgggugcagcccaccgagagcaucgugcgguuccccaacauuacuaaccugugucccuucggcgagguguucaacgccacccgguucgccagcguguacgccuggaaccggaagcggaucagcaacugcguggccgacuacagcgugcuguacaacagcgccagcuucagcaccuucaagugcuacggcgugagccccaccaagcugaacgaccugugcuucaccaacguguacgcugacagcuucgugauccggggcgacgaggugcggcagaucgccccuggccagaccggcaccaucgccgacuacaacuacaagcugcccgacgacuucaccggcugcgugaucgccuggaacagcaacaaccuggacagcaaggugggcggcaacuacaacuaccuguaccggcuguuccguaagagcaaccugaagcccuuugagcgggacaucagcaccgagaucuaccaggccggcagcaccccaugcaacggugugaagggcuucaacugcuacuucccccugcagagcuacggcuuccagcccaccuacggcgugggcuaccagcccuaccgggugguggugcugagcuucgagcugcugcacgcccccgccaccgugugcggccccaaaaagagcaccaaccuggugaagaacaagugcgugaacuucaauuucaacggccugaccggcaccggcgugcugaccgagagcaacaagaaguuccugccuuuccagcaguucggccgggacaucgccgauaccaccgacgcagugcgggacccccagacccuggagauccuggacaucacccccugcagcuucggcggcgugagcgucaucaccccaggcacaaacaccagcaaccagguggccgugcuguaccagggagugaacugcaccgaggugcccguggccauccacgccgaccagcugacccccaccuggcggguguacuccaccggcagcaacguguuccagacccgggccggcugccugaucggcgccgaguacgugaacaacagcuacgagugcgacauccccaucggcgcuggcaucugcgccagcuaccagacccagaccaacagcccccggcgggcccggagcguggccagccagagcaucaucgccuacaccaugagccugggcgccgagaacagcguggccuacagcaacaacagcaucgcgauccccaccaacuucaccaucagcgugaccaccgagauauuaccugugagcaugaccaagaccagcguggacuguaccauguacaucugcggcgacagcaccgagugcagcaaccugcugcugcaguacggcagcuucugcacccagcugaaccgggcccugaccggcaucgccguggagcaggacaagaacacccaagagguguucgcccaggugaagcagaucuacaagacuccacccaucaaggacuucggcggcuucaacuucagccagauccugcccgaccccagcaagcccagcaagcggagcuucaucgaggaccugcuguucaacaaggugacccuggccgacgccggcuucaucaagcaguacggcgacugccugggggacaucgccgcucgggaucugaucugcgcccagaaguucaacggccugaccgugcugccuccccugcugaccgacgagaugaucgcccaguacaccagcgcccugcuggccggcaccaucaccagcggcuggaccuucggcgccggcgcagcccuucagauccccuucgccaugcagauggccuaccgguucaacggcaucggcgugacccagaacgugcuguacgagaaccagaagcugaucgccaaccaguucaacagcgccaucggcaagauccaggacagccugagcagcaccgccagcgcccugggcaagcugcaggacguggugaaccagaacgcucaggcccugaacacccuggugaagcagcugagcucaaacuuuggcgccaucagcagcgugcugaaugacauccugagccggcuggacaagguggaggccgaggugcagaucgacaggcugaucaccggccggcugcagagccugcagaccuacgugacccagcagcugauccgggccgccgagauccgggccagcgccaaccuggcagccauuaagaugagcgagugcgugcugggccagagcaagcggguggacuucugcggcaagggcuaccaccugaugagcuucccccagagcgcuccccacggcgugguguuccugcacgucaccuacgugccagcccaggagaagaacuucacaaccgcccccgccaucugccacgacggcaaggcccacuucccccgggagggaguguucgugagcaacggcacccacugguucgugacccagcggaacuucuacgagccccagaucaucaccaccgacaacaccuucgugagcggcaacugcgacguggugaucggcaucgugaacaacaccguguacgacccccuccagcccgagcuggacagcuucaaggaggagcuggacaaguacuucaagaaccacaccagcccugacguggaccugggcgauaucagcggcaucaacgccagcguggugaacauccagaaggagaucgaccggcugaacgagguggccaagaaccugaacgagagccugaucgaccugcaggagcugggcaaguacgagcaguacaucaaguggcccugguacaucuggcugggcuucaucgccggccugaucgccaucgugauggugaccaucaugcugugcugcaugaccagcugcuguagcugccugaagggcugcugcagcugcggcagcugcugcaaguucgacgaggacgacagcgagcccgugcugaagggcgugaagcugcacuacaccuga

SEQ ID NO: 23040 - RNA, 3822 nt, Artificial Sequence
  SARS-CoV-2/Wuhan/WIV05/2019__EPI_ISL_402128 spike protein CDS gc (1-1273)(S13I_W152C_L452R_D614G)
auguucguguuccuggugcugcugccccuggugagcauccagugcgugaaccugaccacccggacccagcugcccccugccuacaccaacagcuucacccggggcguguacuaccccgacaagguguuccggagcagcgugcugcacagcacccaggaccuguuccugcccuucuucagcaacgugaccugguuccacgccauccacgugagcggcaccaacggcaccaagcgguucgacaacccagugcugcccuucaacgacggcguguacuucgccagcaccgagaagucaaacaucauccggggcuggaucuucggcaccacccuggacagcaagacacagagccugcugaucgugaacaacgccaccaacguggugaucaaggugugcgaguuucaguucugcaacgaccccuuccugggcguguacuaccacaagaacaacaagagcugcauggagagcgaguuccgggucuacagcagcgcuaacaauugcaccuucgaguacgugagccagcccuuccugauggaccucgagggcaagcagggcaacuucaagaaccugcgggaguucguguucaagaacaucgauggcuacuucaagaucuacagcaagcacacccccaucaaccuggugcgggaccugccccagggauucagcgcccuggagccucugguggaccugcccaucggcaucaacaucaccagguuccagacccugcuggcccugcaccggagcuaccugacccccggcgacagcagcagcggcuggaccgccggcgccgccgcauacuacgugggcuaccugcagccacggaccuuccugcugaaguacaacgagaacggcaccaucaccgacgccguggacugcgcccuggacccccugagcgagaccaaguguacccuaaagagcuucaccguggagaagggcaucuaccagaccagcaacuuccgggugcagcccacugagagcauugugcgguuccccaacaucaccaaccugugccccuucggcgagguguucaacgccacccgguucgccagcguguacgccuggaaccggaagcggaucagcaacugcguggccgacuacagcgugcuguacaacagcgccagcuucagcaccuucaagugcuacggcgugagcccuaccaagcugaacgaccugugcuucaccaacguguacgcugacagcuucgugauccggggcgacgaggugcggcagaucgcccccggccagaccggcaagaucgccgacuacaacuacaagcugcccgacgacuucaccggcugcgugaucgccuggaacagcaacaaccuggacagcaaggugggcggcaacuacaacuaccgguaccggcuguuccguaagagcaaccugaagccauucgagcgggacaucagcaccgagaucuaccaggccggcagcacccccugcaacgguguggagggcuuuaacugcuacuucccccugcagagcuacggcuuccagcccaccaacggcgugggcuaccagcccuaccgggugguggugcugagcuucgagcugcugcacgcccccgccaccgugugcggcccuaaaaagagcaccaaccuggugaagaacaagugcgugaacuucaauuucaacggccugaccggcaccggcgugcugaccgagagcaacaagaaguuccugcccuuccagcaguucggccgggauaucgccgacaccaccgacgcagugcgggacccccagacccuggagauccuggacaucaccccaugcagcuucggcggcgugagcgucaucacccccggcacaaacaccagcaaccagguggccgugcuguaccagggagugaacugcaccgaggugcccguggccauccacgccgaccagcugacccccaccuggcggguguacagcaccggcagcaacguguuccagacccgggccggcugccugaucggcgccgagcacgugaacaacagcuacgagugcgacauccccaucggcgcuggcaucugugccuccuaccagacccagaccaacagcccccggcgggcccggagcguggccagccagagcaucaucgccuacaccaugagccugggcgccgagaacagcguggccuacagcaacaacagcaucgcgaucccuaccaacuucaccauaagcgugaccaccgagaucuuacccgugagcaugaccaagaccagcguggacugcaccauguacaucugcggcgacagcaccgagugcagcaaccugcugcugcaguacggcagcuucugcacccagcugaaccgggcccugaccggcaucgccguggagcaggacaagaacacccaagagguguucgcccaggugaagcagaucuacaagacucccccaaucaaggacuucggcggcuucaacuucagccagauccugcccgaccccagcaagcccagcaagcggagcuucaucgaggaccugcuguucaacaaggugacccuggccgacgccggcuucaucaagcaguacggcgacugccugggggauaucgccgcucgggaccugaucugcgcccagaaguucaacggccugaccgugcugcccccucugcugaccgacgagaugaucgcccaguacaccagcgcccugcuggccggcaccaucaccagcggcuggaccuucggcgccggcgcagcccuucagauccccuucgccaugcagauggccuacagguucaacggcaucggcgugacccagaacgugcuguacgagaaccagaagcugaucgccaaccaguucaacagcgccaucggcaagauccaggacagccugagcagcaccgccagcgcccugggcaagcugcaggacguggugaaccagaacgcucaggcccugaacacccuggugaagcagcugagcagcaacuucggcgccaucagcagcgugcugaaugacauccugucacggcuggacaagguggaggccgaggugcagaucgaccggcugaucaccggccggcugcagagccugcagaccuacgugacccagcagcugauccgggccgccgagauucgggccagcgccaaccuggcagccaccaagaugagcgagugcgugcugggccagagcaagcggguggacuuuugcggcaagggcuaccaccugaugagcuucccccagagcgccccacacggcgugguguuccugcacgucacauacgugcccgcccaggagaagaacuucaccaccgcccccgccaucugccacgacggcaaggcucacuucccccgggagggaguguucgugagcaacggcacccacugguucgugacccagcggaacuucuacgagccccagaucaucaccaccgacaacaccuucgugagcggcaacugcgacguggugaucggcaucgugaacaacaccguguacgacccccuccagccugagcuggacagcuucaaggaggagcuggacaaguacuucaagaaccacaccagccccgacguggaucugggcgacaucagcggcaucaacgccagcguggugaacauccagaaggagaucgaccggcugaacgagguggccaagaaccugaacgagagccugaucgaccugcaggagcugggcaaguacgagcaguacaucaaguggcccugguacaucuggcugggcuucaucgccggccugaucgccaucgugauggugaccaucaugcugugcugcaugaccagcuguugcagcugccugaagggcugcugcagcugcggcagcugcugcaaguucgacgaggacgacagcgagccagugcugaagggcgugaagcugcacuacaccuga

SEQ ID NO: 23041 - RNA, 3822 nt, Artificial Sequence; identical to SEQ ID NO: 12034
  SARS-CoV-2/Wuhan/WIV05/2019__EPI_ISL_402128 spike protein CDS gc mod (1-1273)

SEQ ID NO: 23042 - RNA, 3822 nt, Artificial Sequence
  SARS-CoV-2/Wuhan/WIV05/2019__EPI_ISL_402128 spike protein CDS gc mod (1-1273)(D614G)
auguucguguuucuggugcugcugccccugguguccagccagugugugaaccugaccaccagaacacagcugccuccagccuacaccaacagcuucaccagaggcguguacuaccccgacaagguguucagauccagcgugcugcacucuacccaggaccuguuccugccuuucuucagcaacgugaccugguuccacgccauccacguguccggcaccaauggcaccaagagauucgacaaccccgugcugcccuucaacgacgggguguacuuugccagcaccgagaaguccaacaucaucagaggcuggaucuucggcaccacacuggacagcaagacccagagccugcugaucgugaacaacgccaccaacguggucaucaaagugugcgaguuccaguucugcaacgaccccuuccugggcgucuacuaccacaagaacaacaagagcuggauggaaagcgaguuccggguguacagcagcgccaacaacugcaccuucgaguacgugucccagccuuuccugauggaccuggaaggcaagcagggcaacuucaagaaccugcgcgaguucguguucaagaacaucgacggcuacuucaaaaucuacagcaagcacaccccuaucaaccucgugcgggaucugccucagggcuucucugcucuggaaccccugguggaucugcccaucggcaucaacaucacccgguuucagacacugcuggcccugcacagaagcuaccugacaccuggcgauagcagcagcggauggacagcuggugccgccgcuuacuaugugggcuaccugcagccuagaaccuuccugcugaaguacaacgagaacggcaccaucaccgacgccguggauugugcucuggauccucugagcgagacaaagugcacccugaaguccuucaccguggaaaagggcaucuaccagaccagcaacuuccgggugcagcccaccgaauccaucgugcgguuccccaauaucaccaaucugugccccuucggcgagguguucaaugccaccagauucgccucuguguacgccuggaaccggaagcggaucagcaauugcguggccgacuacuccgugcuguacaacuccgccagcuucagcaccuucaagugcuacggcguguccccuaccaagcugaacgaccugugcuucacaaacguguacgccgacagcuucgugauccggggagaugaagugcggcagauugccccuggacagacaggcaagaucgccgacuacaacuacaagcugcccgacgacuucaccggcugugugauugccuggaacagcaacaaccuggacuccaaagucggcggcaacuacaauuaccuguaccggcuguuccggaaguccaaucugaagcccuucgagcgggacaucagcaccgaaaucuaucaggccggcagcaccccuugcaacggcguggaaggcuucaacugcuacuucccacugcaguccuacggcuuucagcccacaaauggcgugggcuaucagcccuacagagugguggugcugagcuucgaacugcugcaugcuccugccacagugugcggcccuaagaaaagcaccaaucucgugaagaacaaaugcgugaacuucaacuucaacggccugaccggcaccggcgugcugacagagagcaacaagaaguuccugccauuccagcaguuuggccgggauaucgccgauaccacagacgccguuagagauccccagacacuggaaauccuggacaucaccccaugcagcuucggcggagugucugugaucaccccuggcaccaacaccagcaaucagguggcagugcuguaccagggcgugaacuguaccgaagugcccguggccauucacgccgaucagcugacaccuacauggcggguguacuccaccggcagcaauguguuucagaccagagccggcugucugaucggagccgagcacgugaacaauagcuacgagugcgacauccccaucggcgcuggcaucugugccagcuaccagacacagacaaacagccccagacgggcuagaagcguggccagccagagcaucauugccuacacaaugucucugggcgccgagaacagcguggccuacuccaacaacucuaucgcuauccccaccaacuucaccaucagcgugaccaccgagauccugccuguguccaugaccaagaccagcguggacugcaccauguacaucugcggcgauuccaccgagugcuccaaccugcugcugcaguacggcagcuucugcacccagcugaauagagcccugacagggaucgccguggaacaggacaagaacacccaagagguguucgcccaagugaagcaaaucuacaagaccccuccuaucaaggacuucggcggcuucaauuucagccagauucugcccgauccuagcaagcccagcaagcggagcuucaucgaggaccugcuguucaacaaagugacacuggccgacgccggcuucaucaagcaguauggcgauugucugggcgacauugccgccagggaucugauuugcgcccagaaguuuaacggacugacagugcugccuccucugcugaccgaugagaugaucgcccaguacacaucugcccugcuggccggcacaaucacaagcggcuggacauuuggagcuggcgccgcucugcagauccccuuugcuaugcagauggccuaccgguucaacggcaucggagugacccagaaugugcuguacgagaaccagaagcugaucgccaaccaguucaacagcgccaucggcaagauccaggacagccugagcagcacagcaagcgcccugggaaagcugcaggacguggucaaccagaaugcccaggcacugaacacccuggucaagcagcuguccuccaacuucggcgccaucagcucugugcugaacgauauccugagcagacuggacaaggucgaggccgaggugcagaucgacagacugaucacaggcagacugcagagccuccagacauacgugacccagcagcugaucagagccgccgagauuagagccucugccaaucuggccgccaccaagaugucugagugugugcugggccagagcaagagaguggacuuuugcggcaagggcuaccaccugaugagcuucccucagucugccccucacggcgugguguuucugcacgugacauaugugcccgcucaagagaagaauuucaccaccgcuccagccaucugccacgacggcaaagcccacuuuccuagagaaggcguguucguguccaacggcacccauugguucgugacacagcggaacuucuacgagccccagaucaucaccaccgacaacaccuucgugucuggcaacugcgacguugugaucggcauugugaacaauaccguguacgacccucugcagcccgagcuggacagcuucaaagaggaacuggacaaguacuuuaagaaccacacaagccccgacguggaccugggcgauaucagcggaaucaaugccagcgucgugaacauccagaaagagaucgaccggcugaacgagguggccaagaaucugaacgagagccugaucgaccugcaagaacuggggaaguacgagcaguacaucaaguggcccugguacaucuggcugggcuuuaucgccggacugauugccaucgugauggucacaaucaugcuguguugcaugaccagcugcuguagcugccugaagggcuguuguagcuguggcagcugcugcaaguucgacgaggacgauucugagcccgugcugaagggcgugaaacugcacuacaccuga

SEQ ID NO: 23043 - RNA, 3822 nt, Artificial Sequence
  SARS-CoV-2/Wuhan/WIV05/2019__EPI_ISL_402128 spike protein CDS gc mod (1-1273)(A222V_D614G)
auguucguguuucuggugcugcugccccugguguccagccagugugugaaccugaccaccagaacacagcugccuccagccuacaccaacagcuucaccagaggcguguacuaccccgacaagguguucagauccagcgugcugcacucuacccaggaccuguuccugccuuucuucagcaacgugaccugguuccacgccauccacguguccggcaccaauggcaccaagagauucgacaaccccgugcugcccuucaacgacgggguguacuuugccagcaccgagaaguccaacaucaucagaggcuggaucuucggcaccacacuggacagcaagacccagagccugcugaucgugaacaacgccaccaacguggucaucaaagugugcgaguuccaguucugcaacgaccccuuccugggcgucuacuaccacaagaacaacaagagcuggauggaaagcgaguuccggguguacagcagcgccaacaacugcaccuucgaguacgugucccagccuuuccugauggaccuggaaggcaagcagggcaacuucaagaaccugcgcgaguucguguucaagaacaucgacggcuacuucaaaaucuacagcaagcacaccccuaucaaccucgugcgggaucugccucagggcuucucugugcuggaaccccugguggaucugcccaucggcaucaacaucacccgguuucagacacugcuggcccugcacagaagcuaccugacaccuggcgauagcagcagcggauggacagcuggugccgccgcuuacuaugugggcuaccugcagccuagaaccuuccugcugaaguacaacgagaacggcaccaucaccgacgccguggauugugcucuggauccucugagcgagacaaagugcacccugaaguccuucaccguggaaaagggcaucuaccagaccagcaacuuccgggugcagcccaccgaauccaucgugcgguuccccaauaucaccaaucugugccccuucggcgagguguucaaugccaccagauucgccucuguguacgccuggaaccggaagcggaucagcaauugcguggccgacuacuccgugcuguacaacuccgccagcuucagcaccuucaagugcuacggcguguccccuaccaagcugaacgaccugugcuucacaaacguguacgccgacagcuucgugauccggggagaugaagugcggcagauugccccuggacagacaggcaagaucgccgacuacaacuacaagcugcccgacgacuucaccggcugugugauugccuggaacagcaacaaccuggacuccaaagucggcggcaacuacaauuaccuguaccggcuguuccggaaguccaaucugaagcccuucgagcgggacaucagcaccgaaaucuaucaggccggcagcaccccuugcaacggcguggaaggcuucaacugcuacuucccacugcaguccuacggcuuucagcccacaaauggcgugggcuaucagcccuacagagugguggugcugagcuucgaacugcugcaugcuccugccacagugugcggcccuaagaaaagcaccaaucucgugaagaacaaaugcgugaacuucaacuucaacggccugaccggcaccggcgugcugacagagagcaacaagaaguuccugccauuccagcaguuuggccgggauaucgccgauaccacagacgccguuagagauccccagacacuggaaauccuggacaucaccccaugcagcuucggcggagugucugugaucaccccuggcaccaacaccagcaaucagguggcagugcuguaccagggcgugaacuguaccgaagugcccguggccauucacgccgaucagcugacaccuacauggcggguguacuccaccggcagcaauguguuucagaccagagccggcugucugaucggagccgagcacgugaacaauagcuacgagugcgacauccccaucggcgcuggcaucugugccagcuaccagacacagacaaacagccccagacgggcuagaagcguggccagccagagcaucauugccuacacaaugucucugggcgccgagaacagcguggccuacuccaacaacucuaucgcuauccccaccaacuucaccaucagcgugaccaccgagauccugccuguguccaugaccaagaccagcguggacugcaccauguacaucugcggcgauuccaccgagugcuccaaccugcugcugcaguacggcagcuucugcacccagcugaauagagcccugacagggaucgccguggaacaggacaagaacacccaagagguguucgcccaagugaagcaaaucuacaagaccccuccuaucaaggacuucggcggcuucaauuucagccagauucugcccgauccuagcaagcccagcaagcggagcuucaucgaggaccugcuguucaacaaagugacacuggccgacgccggcuucaucaagcaguauggcgauugucugggcgacauugccgccagggaucugauuugcgcccagaaguuuaacggacugacagugcugccuccucugcugaccgaugagaugaucgcccaguacacaucugcccugcuggccggcacaaucacaagcggcuggacauuuggagcuggcgccgcucugcagauccccuuugcuaugcagauggccuaccgguucaacggcaucggagugacccagaaugugcuguacgagaaccagaagcugaucgccaaccaguucaacagcgccaucggcaagauccaggacagccugagcagcacagcaagcgcccugggaaagcugcaggacguggucaaccagaaugcccaggcacugaacacccuggucaagcagcuguccuccaacuucggcgccaucagcucugugcugaacgauauccugagcagacuggacaaggucgaggccgaggugcagaucgacagacugaucacaggcagacugcagagccuccagacauacgugacccagcagcugaucagagccgccgagauuagagccucugccaaucuggccgccaccaagaugucugagugugugcugggccagagcaagagaguggacuuuugcggcaagggcuaccaccugaugagcuucccucagucugccccucacggcgugguguuucugcacgugacauaugugcccgcucaagagaagaauuucaccaccgcuccagccaucugccacgacggcaaagcccacuuuccuagagaaggcguguucguguccaacggcacccauugguucgugacacagcggaacuucuacgagccccagaucaucaccaccgacaacaccuucgugucuggcaacugcgacguugugaucggcauugugaacaauaccguguacgacccucugcagcccgagcuggacagcuucaaagaggaacuggacaaguacuuuaagaaccacacaagccccgacguggaccugggcgauaucagcggaaucaaugccagcgucgugaacauccagaaagagaucgaccggcugaacgagguggccaagaaucugaacgagagccugaucgaccugcaagaacuggggaaguacgagcaguacaucaaguggcccugguacaucuggcugggcuuuaucgccggacugauugccaucgugauggucacaaucaugcuguguugcaugaccagcugcuguagcugccugaagggcuguuguagcuguggcagcugcugcaaguucgacgaggacgauucugagcccgugcugaagggcgugaaacugcacuacaccuga

SEQ ID NO: 23044 - RNA, 3822 nt, Artificial Sequence
  SARS-CoV-2/Wuhan/WIV05/2019__EPI_ISL_402128 spike protein CDS gc mod (1-1273)(N439K_D614G)
auguucguguuucuggugcugcugccccugguguccagccagugugugaaccugaccaccagaacacagcugccuccagccuacaccaacagcuucaccagaggcguguacuaccccgacaagguguucagauccagcgugcugcacucuacccaggaccuguuccugccuuucuucagcaacgugaccugguuccacgccauccacguguccggcaccaauggcaccaagagauucgacaaccccgugcugcccuucaacgacgggguguacuuugccagcaccgagaaguccaacaucaucagaggcuggaucuucggcaccacacuggacagcaagacccagagccugcugaucgugaacaacgccaccaacguggucaucaaagugugcgaguuccaguucugcaacgaccccuuccugggcgucuacuaccacaagaacaacaagagcuggauggaaagcgaguuccggguguacagcagcgccaacaacugcaccuucgaguacgugucccagccuuuccugauggaccuggaaggcaagcagggcaacuucaagaaccugcgcgaguucguguucaagaacaucgacggcuacuucaaaaucuacagcaagcacaccccuaucaaccucgugcgggaucugccucagggcuucucugcucuggaaccccugguggaucugcccaucggcaucaacaucacccgguuucagacacugcuggcccugcacagaagcuaccugacaccuggcgauagcagcagcggauggacagcuggugccgccgcuuacuaugugggcuaccugcagccuagaaccuuccugcugaaguacaacgagaacggcaccaucaccgacgccguggauugugcucuggauccucugagcgagacaaagugcacccugaaguccuucaccguggaaaagggcaucuaccagaccagcaacuuccgggugcagcccaccgaauccaucgugcgguuccccaauaucaccaaucugugccccuucggcgagguguucaaugccaccagauucgccucuguguacgccuggaaccggaagcggaucagcaauugcguggccgacuacuccgugcuguacaacuccgccagcuucagcaccuucaagugcuacggcguguccccuaccaagcugaacgaccugugcuucacaaacguguacgccgacagcuucgugauccggggagaugaagugcggcagauugccccuggacagacaggcaagaucgccgacuacaacuacaagcugcccgacgacuucaccggcugugugauugccuggaacagcaagaaccuggacuccaaagucggcggcaacuacaauuaccuguaccggcuguuccggaaguccaaucugaagcccuucgagcgggacaucagcaccgaaaucuaucaggccggcagcaccccuugcaacggcguggaaggcuucaacugcuacuucccacugcaguccuacggcuuucagcccacaaauggcgugggcuaucagcccuacagagugguggugcugagcuucgaacugcugcaugcuccugccacagugugcggcccuaagaaaagcaccaaucucgugaagaacaaaugcgugaacuucaacuucaacggccugaccggcaccggcgugcugacagagagcaacaagaaguuccugccauuccagcaguuuggccgggauaucgccgauaccacagacgccguuagagauccccagacacuggaaauccuggacaucaccccaugcagcuucggcggagugucugugaucaccccuggcaccaacaccagcaaucagguggcagugcuguaccagggcgugaacuguaccgaagugcccguggccauucacgccgaucagcugacaccuacauggcggguguacuccaccggcagcaauguguuucagaccagagccggcugucugaucggagccgagcacgugaacaauagcuacgagugcgacauccccaucggcgcuggcaucugugccagcuaccagacacagacaaacagccccagacgggcuagaagcguggccagccagagcaucauugccuacacaaugucucugggcgccgagaacagcguggccuacuccaacaacucuaucgcuauccccaccaacuucaccaucagcgugaccaccgagauccugccuguguccaugaccaagaccagcguggacugcaccauguacaucugcggcgauuccaccgagugcuccaaccugcugcugcaguacggcagcuucugcacccagcugaauagagcccugacagggaucgccguggaacaggacaagaacacccaagagguguucgcccaagugaagcaaaucuacaagaccccuccuaucaaggacuucggcggcuucaauuucagccagauucugcccgauccuagcaagcccagcaagcggagcuucaucgaggaccugcuguucaacaaagugacacuggccgacgccggcuucaucaagcaguauggcgauugucugggcgacauugccgccagggaucugauuugcgcccagaaguuuaacggacugacagugcugccuccucugcugaccgaugagaugaucgcccaguacacaucugcccugcuggccggcacaaucacaagcggcuggacauuuggagcuggcgccgcucugcagauccccuuugcuaugcagauggccuaccgguucaacggcaucggagugacccagaaugugcuguacgagaaccagaagcugaucgccaaccaguucaacagcgccaucggcaagauccaggacagccugagcagcacagcaagcgcccugggaaagcugcaggacguggucaaccagaaugcccaggcacugaacacccuggucaagcagcuguccuccaacuucggcgccaucagcucugugcugaacgauauccugagcagacuggacaaggucgaggccgaggugcagaucgacagacugaucacaggcagacugcagagccuccagacauacgugacccagcagcugaucagagccgccgagauuagagccucugccaaucuggccgccaccaagaugucugagugugugcugggccagagcaagagaguggacuuuugcggcaagggcuaccaccugaugagcuucccucagucugccccucacggcgugguguuucugcacgugacauaugugcccgcucaagagaagaauuucaccaccgcuccagccaucugccacgacggcaaagcccacuuuccuagagaaggcguguucguguccaacggcacccauugguucgugacacagcggaacuucuacgagccccagaucaucaccaccgacaacaccuucgugucuggcaacugcgacguugugaucggcauugugaacaauaccguguacgacccucugcagcccgagcuggacagcuucaaagaggaacuggacaaguacuuuaagaaccacacaagccccgacguggaccugggcgauaucagcggaaucaaugccagcgucgugaacauccagaaagagaucgaccggcugaacgagguggccaagaaucugaacgagagccugaucgaccugcaagaacuggggaaguacgagcaguacaucaaguggcccugguacaucuggcugggcuuuaucgccggacugauugccaucgugauggucacaaucaugcuguguugcaugaccagcugcuguagcugccugaagggcuguuguagcuguggcagcugcugcaaguucgacgaggacgauucugagcccgugcugaagggcgugaaacugcacuacaccuga

SEQ ID NO: 23045 - RNA, 3822 nt, Artificial Sequence
  SARS-CoV-2/Wuhan/WIV05/2019__EPI_ISL_402128 spike protein CDS gc mod (1-1273)(S477N_D614G)
auguucguguuucuggugcugcugccccugguguccagccagugugugaaccugaccaccagaacacagcugccuccagccuacaccaacagcuucaccagaggcguguacuaccccgacaagguguucagauccagcgugcugcacucuacccaggaccuguuccugccuuucuucagcaacgugaccugguuccacgccauccacguguccggcaccaauggcaccaagagauucgacaaccccgugcugcccuucaacgacgggguguacuuugccagcaccgagaaguccaacaucaucagaggcuggaucuucggcaccacacuggacagcaagacccagagccugcugaucgugaacaacgccaccaacguggucaucaaagugugcgaguuccaguucugcaacgaccccuuccugggcgucuacuaccacaagaacaacaagagcuggauggaaagcgaguuccggguguacagcagcgccaacaacugcaccuucgaguacgugucccagccuuuccugauggaccuggaaggcaagcagggcaacuucaagaaccugcgcgaguucguguucaagaacaucgacggcuacuucaaaaucuacagcaagcacaccccuaucaaccucgugcgggaucugccucagggcuucucugcucuggaaccccugguggaucugcccaucggcaucaacaucacccgguuucagacacugcuggcccugcacagaagcuaccugacaccuggcgauagcagcagcggauggacagcuggugccgccgcuuacuaugugggcuaccugcagccuagaaccuuccugcugaaguacaacgagaacggcaccaucaccgacgccguggauugugcucuggauccucugagcgagacaaagugcacccugaaguccuucaccguggaaaagggcaucuaccagaccagcaacuuccgggugcagcccaccgaauccaucgugcgguuccccaauaucaccaaucugugccccuucggcgagguguucaaugccaccagauucgccucuguguacgccuggaaccggaagcggaucagcaauugcguggccgacuacuccgugcuguacaacuccgccagcuucagcaccuucaagugcuacggcguguccccuaccaagcugaacgaccugugcuucacaaacguguacgccgacagcuucgugauccggggagaugaagugcggcagauugccccuggacagacaggcaagaucgccgacuacaacuacaagcugcccgacgacuucaccggcugugugauugccuggaacagcaacaaccuggacuccaaagucggcggcaacuacaauuaccuguaccggcuguuccggaaguccaaucugaagcccuucgagcgggacaucagcaccgaaaucuaucaggccggcaacaccccuugcaacggcguggaaggcuucaacugcuacuucccacugcaguccuacggcuuucagcccacaaauggcgugggcuaucagcccuacagagugguggugcugagcuucgaacugcugcaugcuccugccacagugugcggcccuaagaaaagcaccaaucucgugaagaacaaaugcgugaacuucaacuucaacggccugaccggcaccggcgugcugacagagagcaacaagaaguuccugccauuccagcaguuuggccgggauaucgccgauaccacagacgccguuagagauccccagacacuggaaauccuggacaucaccccaugcagcuucggcggagugucugugaucaccccuggcaccaacaccagcaaucagguggcagugcuguaccagggcgugaacuguaccgaagugcccguggccauucacgccgaucagcugacaccuacauggcggguguacuccaccggcagcaauguguuucagaccagagccggcugucugaucggagccgagcacgugaacaauagcuacgagugcgacauccccaucggcgcuggcaucugugccagcuaccagacacagacaaacagccccagacgggcuagaagcguggccagccagagcaucauugccuacacaaugucucugggcgccgagaacagcguggccuacuccaacaacucuaucgcuauccccaccaacuucaccaucagcgugaccaccgagauccugccuguguccaugaccaagaccagcguggacugcaccauguacaucugcggcgauuccaccgagugcuccaaccugcugcugcaguacggcagcuucugcacccagcugaauagagcccugacagggaucgccguggaacaggacaagaacacccaagagguguucgcccaagugaagcaaaucuacaagaccccuccuaucaaggacuucggcggcuucaauuucagccagauucugcccgauccuagcaagcccagcaagcggagcuucaucgaggaccugcuguucaacaaagugacacuggccgacgccggcuucaucaagcaguauggcgauugucugggcgacauugccgccagggaucugauuugcgcccagaaguuuaacggacugacagugcugccuccucugcugaccgaugagaugaucgcccaguacacaucugcccugcuggccggcacaaucacaagcggcuggacauuuggagcuggcgccgcucugcagauccccuuugcuaugcagauggccuaccgguucaacggcaucggagugacccagaaugugcuguacgagaaccagaagcugaucgccaaccaguucaacagcgccaucggcaagauccaggacagccugagcagcacagcaagcgcccugggaaagcugcaggacguggucaaccagaaugcccaggcacugaacacccuggucaagcagcuguccuccaacuucggcgccaucagcucugugcugaacgauauccugagcagacuggacaaggucgaggccgaggugcagaucgacagacugaucacaggcagacugcagagccuccagacauacgugacccagcagcugaucagagccgccgagauuagagccucugccaaucuggccgccaccaagaugucugagugugugcugggccagagcaagagaguggacuuuugcggcaagggcuaccaccugaugagcuucccucagucugccccucacggcgugguguuucugcacgugacauaugugcccgcucaagagaagaauuucaccaccgcuccagccaucugccacgacggcaaagcccacuuuccuagagaaggcguguucguguccaacggcacccauugguucgugacacagcggaacuucuacgagccccagaucaucaccaccgacaacaccuucgugucuggcaacugcgacguugugaucggcauugugaacaauaccguguacgacccucugcagcccgagcuggacagcuucaaagaggaacuggacaaguacuuuaagaaccacacaagccccgacguggaccugggcgauaucagcggaaucaaugccagcgucgugaacauccagaaagagaucgaccggcugaacgagguggccaagaaucugaacgagagccugaucgaccugcaagaacuggggaaguacgagcaguacaucaaguggcccugguacaucuggcugggcuuuaucgccggacugauugccaucgugauggucacaaucaugcuguguugcaugaccagcugcuguagcugccugaagggcuguuguagcuguggcagcugcugcaaguucgacgaggacgauucugagcccgugcugaagggcgugaaacugcacuacaccuga

SEQ ID NO: 23046 - RNA, 3822 nt, Artificial Sequence
  SARS-CoV-2/Wuhan/WIV05/2019__EPI_ISL_402128 spike protein CDS gc mod (1-1273)(N501Y_D614G)
auguucguguuucuggugcugcugccccugguguccagccagugugugaaccugaccaccagaacacagcugccuccagccuacaccaacagcuucaccagaggcguguacuaccccgacaagguguucagauccagcgugcugcacucuacccaggaccuguuccugccuuucuucagcaacgugaccugguuccacgccauccacguguccggcaccaauggcaccaagagauucgacaaccccgugcugcccuucaacgacgggguguacuuugccagcaccgagaaguccaacaucaucagaggcuggaucuucggcaccacacuggacagcaagacccagagccugcugaucgugaacaacgccaccaacguggucaucaaagugugcgaguuccaguucugcaacgaccccuuccugggcgucuacuaccacaagaacaacaagagcuggauggaaagcgaguuccggguguacagcagcgccaacaacugcaccuucgaguacgugucccagccuuuccugauggaccuggaaggcaagcagggcaacuucaagaaccugcgcgaguucguguucaagaacaucgacggcuacuucaaaaucuacagcaagcacaccccuaucaaccucgugcgggaucugccucagggcuucucugcucuggaaccccugguggaucugcccaucggcaucaacaucacccgguuucagacacugcuggcccugcacagaagcuaccugacaccuggcgauagcagcagcggauggacagcuggugccgccgcuuacuaugugggcuaccugcagccuagaaccuuccugcugaaguacaacgagaacggcaccaucaccgacgccguggauugugcucuggauccucugagcgagacaaagugcacccugaaguccuucaccguggaaaagggcaucuaccagaccagcaacuuccgggugcagcccaccgaauccaucgugcgguuccccaauaucaccaaucugugccccuucggcgagguguucaaugccaccagauucgccucuguguacgccuggaaccggaagcggaucagcaauugcguggccgacuacuccgugcuguacaacuccgccagcuucagcaccuucaagugcuacggcguguccccuaccaagcugaacgaccugugcuucacaaacguguacgccgacagcuucgugauccggggagaugaagugcggcagauugccccuggacagacaggcaagaucgccgacuacaacuacaagcugcccgacgacuucaccggcugugugauugccuggaacagcaacaaccuggacuccaaagucggcggcaacuacaauuaccuguaccggcuguuccggaaguccaaucugaagcccuucgagcgggacaucagcaccgaaaucuaucaggccggcagcaccccuugcaacggcguggaaggcuucaacugcuacuucccacugcaguccuacggcuuucagcccacauacggcgugggcuaucagcccuacagagugguggugcugagcuucgaacugcugcaugcuccugccacagugugcggcccuaagaaaagcaccaaucucgugaagaacaaaugcgugaacuucaacuucaacggccugaccggcaccggcgugcugacagagagcaacaagaaguuccugccauuccagcaguuuggccgggauaucgccgauaccacagacgccguuagagauccccagacacuggaaauccuggacaucaccccaugcagcuucggcggagugucugugaucaccccuggcaccaacaccagcaaucagguggcagugcuguaccagggcgugaacuguaccgaagugcccguggccauucacgccgaucagcugacaccuacauggcggguguacuccaccggcagcaauguguuucagaccagagccggcugucugaucggagccgagcacgugaacaauagcuacgagugcgacauccccaucggcgcuggcaucugugccagcuaccagacacagacaaacagccccagacgggcuagaagcguggccagccagagcaucauugccuacacaaugucucugggcgccgagaacagcguggccuacuccaacaacucuaucgcuauccccaccaacuucaccaucagcgugaccaccgagauccugccuguguccaugaccaagaccagcguggacugcaccauguacaucugcggcgauuccaccgagugcuccaaccugcugcugcaguacggcagcuucugcacccagcugaauagagcccugacagggaucgccguggaacaggacaagaacacccaagagguguucgcccaagugaagcaaaucuacaagaccccuccuaucaaggacuucggcggcuucaauuucagccagauucugcccgauccuagcaagcccagcaagcggagcuucaucgaggaccugcuguucaacaaagugacacuggccgacgccggcuucaucaagcaguauggcgauugucugggcgacauugccgccagggaucugauuugcgcccagaaguuuaacggacugacagugcugccuccucugcugaccgaugagaugaucgcccaguacacaucugcccugcuggccggcacaaucacaagcggcuggacauuuggagcuggcgccgcucugcagauccccuuugcuaugcagauggccuaccgguucaacggcaucggagugacccagaaugugcuguacgagaaccagaagcugaucgccaaccaguucaacagcgccaucggcaagauccaggacagccugagcagcacagcaagcgcccugggaaagcugcaggacguggucaaccagaaugcccaggcacugaacacccuggucaagcagcuguccuccaacuucggcgccaucagcucugugcugaacgauauccugagcagacuggacaaggucgaggccgaggugcagaucgacagacugaucacaggcagacugcagagccuccagacauacgugacccagcagcugaucagagccgccgagauuagagccucugccaaucuggccgccaccaagaugucugagugugugcugggccagagcaagagaguggacuuuugcggcaagggcuaccaccugaugagcuucccucagucugccccucacggcgugguguuucugcacgugacauaugugcccgcucaagagaagaauuucaccaccgcuccagccaucugccacgacggcaaagcccacuuuccuagagaaggcguguucguguccaacggcacccauugguucgugacacagcggaacuucuacgagccccagaucaucaccaccgacaacaccuucgugucuggcaacugcgacguugugaucggcauugugaacaauaccguguacgacccucugcagcccgagcuggacagcuucaaagaggaacuggacaaguacuuuaagaaccacacaagccccgacguggaccugggcgauaucagcggaaucaaugccagcgucgugaacauccagaaagagaucgaccggcugaacgagguggccaagaaucugaacgagagccugaucgaccugcaagaacuggggaaguacgagcaguacaucaaguggcccugguacaucuggcugggcuuuaucgccggacugauugccaucgugauggucacaaucaugcuguguugcaugaccagcugcuguagcugccugaagggcuguuguagcuguggcagcugcugcaaguucgacgaggacgauucugagcccgugcugaagggcgugaaacugcacuacaccuga

SEQ ID NO: 23047 - RNA, 3816 nt, Artificial Sequence
  SARS-CoV-2/Wuhan/WIV05/2019__EPI_ISL_402128 spike protein CDS gc mod (1-1273)(H69del_V70del_D614G)
auguucguguuucuggugcugcugccccugguguccagccagugugugaaccugaccaccagaacacagcugccuccagccuacaccaacagcuucaccagaggcguguacuaccccgacaagguguucagauccagcgugcugcacucuacccaggaccuguuccugccuuucuucagcaacgugaccugguuccacgccaucuccggcaccaauggcaccaagagauucgacaaccccgugcugcccuucaacgacgggguguacuuugccagcaccgagaaguccaacaucaucagaggcuggaucuucggcaccacacuggacagcaagacccagagccugcugaucgugaacaacgccaccaacguggucaucaaagugugcgaguuccaguucugcaacgaccccuuccugggcgucuacuaccacaagaacaacaagagcuggauggaaagcgaguuccggguguacagcagcgccaacaacugcaccuucgaguacgugucccagccuuuccugauggaccuggaaggcaagcagggcaacuucaagaaccugcgcgaguucguguucaagaacaucgacggcuacuucaaaaucuacagcaagcacaccccuaucaaccucgugcgggaucugccucagggcuucucugcucuggaaccccugguggaucugcccaucggcaucaacaucacccgguuucagacacugcuggcccugcacagaagcuaccugacaccuggcgauagcagcagcggauggacagcuggugccgccgcuuacuaugugggcuaccugcagccuagaaccuuccugcugaaguacaacgagaacggcaccaucaccgacgccguggauugugcucuggauccucugagcgagacaaagugcacccugaaguccuucaccguggaaaagggcaucuaccagaccagcaacuuccgggugcagcccaccgaauccaucgugcgguuccccaauaucaccaaucugugccccuucggcgagguguucaaugccaccagauucgccucuguguacgccuggaaccggaagcggaucagcaauugcguggccgacuacuccgugcuguacaacuccgccagcuucagcaccuucaagugcuacggcguguccccuaccaagcugaacgaccugugcuucacaaacguguacgccgacagcuucgugauccggggagaugaagugcggcagauugccccuggacagacaggcaagaucgccgacuacaacuacaagcugcccgacgacuucaccggcugugugauugccuggaacagcaacaaccuggacuccaaagucggcggcaacuacaauuaccuguaccggcuguuccggaaguccaaucugaagcccuucgagcgggacaucagcaccgaaaucuaucaggccggcagcaccccuugcaacggcguggaaggcuucaacugcuacuucccacugcaguccuacggcuuucagcccacaaauggcgugggcuaucagcccuacagagugguggugcugagcuucgaacugcugcaugcuccugccacagugugcggcccuaagaaaagcaccaaucucgugaagaacaaaugcgugaacuucaacuucaacggccugaccggcaccggcgugcugacagagagcaacaagaaguuccugccauuccagcaguuuggccgggauaucgccgauaccacagacgccguuagagauccccagacacuggaaauccuggacaucaccccaugcagcuucggcggagugucugugaucaccccuggcaccaacaccagcaaucagguggcagugcuguaccagggcgugaacuguaccgaagugcccguggccauucacgccgaucagcugacaccuacauggcggguguacuccaccggcagcaauguguuucagaccagagccggcugucugaucggagccgagcacgugaacaauagcuacgagugcgacauccccaucggcgcuggcaucugugccagcuaccagacacagacaaacagccccagacgggcuagaagcguggccagccagagcaucauugccuacacaaugucucugggcgccgagaacagcguggccuacuccaacaacucuaucgcuauccccaccaacuucaccaucagcgugaccaccgagauccugccuguguccaugaccaagaccagcguggacugcaccauguacaucugcggcgauuccaccgagugcuccaaccugcugcugcaguacggcagcuucugcacccagcugaauagagcccugacagggaucgccguggaacaggacaagaacacccaagagguguucgcccaagugaagcaaaucuacaagaccccuccuaucaaggacuucggcggcuucaauuucagccagauucugcccgauccuagcaagcccagcaagcggagcuucaucgaggaccugcuguucaacaaagugacacuggccgacgccggcuucaucaagcaguauggcgauugucugggcgacauugccgccagggaucugauuugcgcccagaaguuuaacggacugacagugcugccuccucugcugaccgaugagaugaucgcccaguacacaucugcccugcuggccggcacaaucacaagcggcuggacauuuggagcuggcgccgcucugcagauccccuuugcuaugcagauggccuaccgguucaacggcaucggagugacccagaaugugcuguacgagaaccagaagcugaucgccaaccaguucaacagcgccaucggcaagauccaggacagccugagcagcacagcaagcgcccugggaaagcugcaggacguggucaaccagaaugcccaggcacugaacacccuggucaagcagcuguccuccaacuucggcgccaucagcucugugcugaacgauauccugagcagacuggacaaggucgaggccgaggugcagaucgacagacugaucacaggcagacugcagagccuccagacauacgugacccagcagcugaucagagccgccgagauuagagccucugccaaucuggccgccaccaagaugucugagugugugcugggccagagcaagagaguggacuuuugcggcaagggcuaccaccugaugagcuucccucagucugccccucacggcgugguguuucugcacgugacauaugugcccgcucaagagaagaauuucaccaccgcuccagccaucugccacgacggcaaagcccacuuuccuagagaaggcguguucguguccaacggcacccauugguucgugacacagcggaacuucuacgagccccagaucaucaccaccgacaacaccuucgugucuggcaacugcgacguugugaucggcauugugaacaauaccguguacgacccucugcagcccgagcuggacagcuucaaagaggaacuggacaaguacuuuaagaaccacacaagccccgacguggaccugggcgauaucagcggaaucaaugccagcgucgugaacauccagaaagagaucgaccggcugaacgagguggccaagaaucugaacgagagccugaucgaccugcaagaacuggggaaguacgagcaguacaucaaguggcccugguacaucuggcugggcuuuaucgccggacugauugccaucgugauggucacaaucaugcuguguugcaugaccagcugcuguagcugccugaagggcuguuguagcuguggcagcugcugcaaguucgacgaggacgauucugagcccgugcugaagggcgugaaacugcacuacaccuga

SEQ ID NO: 23048 - RNA, 3822 nt, Artificial Sequence
  SARS-CoV-2/Wuhan/WIV05/2019__EPI_ISL_402128 spike protein CDS gc mod (1-1273)(Y453F_D614G)
auguucguguuucuggugcugcugccccugguguccagccagugugugaaccugaccaccagaacacagcugccuccagccuacaccaacagcuucaccagaggcguguacuaccccgacaagguguucagauccagcgugcugcacucuacccaggaccuguuccugccuuucuucagcaacgugaccugguuccacgccauccacguguccggcaccaauggcaccaagagauucgacaaccccgugcugcccuucaacgacgggguguacuuugccagcaccgagaaguccaacaucaucagaggcuggaucuucggcaccacacuggacagcaagacccagagccugcugaucgugaacaacgccaccaacguggucaucaaagugugcgaguuccaguucugcaacgaccccuuccugggcgucuacuaccacaagaacaacaagagcuggauggaaagcgaguuccggguguacagcagcgccaacaacugcaccuucgaguacgugucccagccuuuccugauggaccuggaaggcaagcagggcaacuucaagaaccugcgcgaguucguguucaagaacaucgacggcuacuucaaaaucuacagcaagcacaccccuaucaaccucgugcgggaucugccucagggcuucucugcucuggaaccccugguggaucugcccaucggcaucaacaucacccgguuucagacacugcuggcccugcacagaagcuaccugacaccuggcgauagcagcagcggauggacagcuggugccgccgcuuacuaugugggcuaccugcagccuagaaccuuccugcugaaguacaacgagaacggcaccaucaccgacgccguggauugugcucuggauccucugagcgagacaaagugcacccugaaguccuucaccguggaaaagggcaucuaccagaccagcaacuuccgggugcagcccaccgaauccaucgugcgguuccccaauaucaccaaucugugccccuucggcgagguguucaaugccaccagauucgccucuguguacgccuggaaccggaagcggaucagcaauugcguggccgacuacuccgugcuguacaacuccgccagcuucagcaccuucaagugcuacggcguguccccuaccaagcugaacgaccugugcuucacaaacguguacgccgacagcuucgugauccggggagaugaagugcggcagauugccccuggacagacaggcaagaucgccgacuacaacuacaagcugcccgacgacuucaccggcugugugauugccuggaacagcaacaaccuggacuccaaagucggcggcaacuacaauuaccuguuccggcuguuccggaaguccaaucugaagcccuucgagcgggacaucagcaccgaaaucuaucaggccggcagcaccccuugcaacggcguggaaggcuucaacugcuacuucccacugcaguccuacggcuuucagcccacaaauggcgugggcuaucagcccuacagagugguggugcugagcuucgaacugcugcaugcuccugccacagugugcggcccuaagaaaagcaccaaucucgugaagaacaaaugcgugaacuucaacuucaacggccugaccggcaccggcgugcugacagagagcaacaagaaguuccugccauuccagcaguuuggccgggauaucgccgauaccacagacgccguuagagauccccagacacuggaaauccuggacaucaccccaugcagcuucggcggagugucugugaucaccccuggcaccaacaccagcaaucagguggcagugcuguaccagggcgugaacuguaccgaagugcccguggccauucacgccgaucagcugacaccuacauggcggguguacuccaccggcagcaauguguuucagaccagagccggcugucugaucggagccgagcacgugaacaauagcuacgagugcgacauccccaucggcgcuggcaucugugccagcuaccagacacagacaaacagccccagacgggcuagaagcguggccagccagagcaucauugccuacacaaugucucugggcgccgagaacagcguggccuacuccaacaacucuaucgcuauccccaccaacuucaccaucagcgugaccaccgagauccugccuguguccaugaccaagaccagcguggacugcaccauguacaucugcggcgauuccaccgagugcuccaaccugcugcugcaguacggcagcuucugcacccagcugaauagagcccugacagggaucgccguggaacaggacaagaacacccaagagguguucgcccaagugaagcaaaucuacaagaccccuccuaucaaggacuucggcggcuucaauuucagccagauucugcccgauccuagcaagcccagcaagcggagcuucaucgaggaccugcuguucaacaaagugacacuggccgacgccggcuucaucaagcaguauggcgauugucugggcgacauugccgccagggaucugauuugcgcccagaaguuuaacggacugacagugcugccuccucugcugaccgaugagaugaucgcccaguacacaucugcccugcuggccggcacaaucacaagcggcuggacauuuggagcuggcgccgcucugcagauccccuuugcuaugcagauggccuaccgguucaacggcaucggagugacccagaaugugcuguacgagaaccagaagcugaucgccaaccaguucaacagcgccaucggcaagauccaggacagccugagcagcacagcaagcgcccugggaaagcugcaggacguggucaaccagaaugcccaggcacugaacacccuggucaagcagcuguccuccaacuucggcgccaucagcucugugcugaacgauauccugagcagacuggacaaggucgaggccgaggugcagaucgacagacugaucacaggcagacugcagagccuccagacauacgugacccagcagcugaucagagccgccgagauuagagccucugccaaucuggccgccaccaagaugucugagugugugcugggccagagcaagagaguggacuuuugcggcaagggcuaccaccugaugagcuucccucagucugccccucacggcgugguguuucugcacgugacauaugugcccgcucaagagaagaauuucaccaccgcuccagccaucugccacgacggcaaagcccacuuuccuagagaaggcguguucguguccaacggcacccauugguucgugacacagcggaacuucuacgagccccagaucaucaccaccgacaacaccuucgugucuggcaacugcgacguugugaucggcauugugaacaauaccguguacgacccucugcagcccgagcuggacagcuucaaagaggaacuggacaaguacuuuaagaaccacacaagccccgacguggaccugggcgauaucagcggaaucaaugccagcgucgugaacauccagaaagagaucgaccggcugaacgagguggccaagaaucugaacgagagccugaucgaccugcaagaacuggggaaguacgagcaguacaucaaguggcccugguacaucuggcugggcuuuaucgccggacugauugccaucgugauggucacaaucaugcuguguugcaugaccagcugcuguagcugccugaagggcuguuguagcuguggcagcugcugcaaguucgacgaggacgauucugagcccgugcugaagggcgugaaacugcacuacaccuga

SEQ ID NO: 23049 - RNA, 3822 nt, Artificial Sequence
  SARS-CoV-2/Wuhan/WIV05/2019__EPI_ISL_402128 spike protein CDS gc mod (1-1273)(D614G_I692V)
auguucguguuucuggugcugcugccccugguguccagccagugugugaaccugaccaccagaacacagcugccuccagccuacaccaacagcuucaccagaggcguguacuaccccgacaagguguucagauccagcgugcugcacucuacccaggaccuguuccugccuuucuucagcaacgugaccugguuccacgccauccacguguccggcaccaauggcaccaagagauucgacaaccccgugcugcccuucaacgacgggguguacuuugccagcaccgagaaguccaacaucaucagaggcuggaucuucggcaccacacuggacagcaagacccagagccugcugaucgugaacaacgccaccaacguggucaucaaagugugcgaguuccaguucugcaacgaccccuuccugggcgucuacuaccacaagaacaacaagagcuggauggaaagcgaguuccggguguacagcagcgccaacaacugcaccuucgaguacgugucccagccuuuccugauggaccuggaaggcaagcagggcaacuucaagaaccugcgcgaguucguguucaagaacaucgacggcuacuucaaaaucuacagcaagcacaccccuaucaaccucgugcgggaucugccucagggcuucucugcucuggaaccccugguggaucugcccaucggcaucaacaucacccgguuucagacacugcuggcccugcacagaagcuaccugacaccuggcgauagcagcagcggauggacagcuggugccgccgcuuacuaugugggcuaccugcagccuagaaccuuccugcugaaguacaacgagaacggcaccaucaccgacgccguggauugugcucuggauccucugagcgagacaaagugcacccugaaguccuucaccguggaaaagggcaucuaccagaccagcaacuuccgggugcagcccaccgaauccaucgugcgguuccccaauaucaccaaucugugccccuucggcgagguguucaaugccaccagauucgccucuguguacgccuggaaccggaagcggaucagcaauugcguggccgacuacuccgugcuguacaacuccgccagcuucagcaccuucaagugcuacggcguguccccuaccaagcugaacgaccugugcuucacaaacguguacgccgacagcuucgugauccggggagaugaagugcggcagauugccccuggacagacaggcaagaucgccgacuacaacuacaagcugcccgacgacuucaccggcugugugauugccuggaacagcaacaaccuggacuccaaagucggcggcaacuacaauuaccuguaccggcuguuccggaaguccaaucugaagcccuucgagcgggacaucagcaccgaaaucuaucaggccggcagcaccccuugcaacggcguggaaggcuucaacugcuacuucccacugcaguccuacggcuuucagcccacaaauggcgugggcuaucagcccuacagagugguggugcugagcuucgaacugcugcaugcuccugccacagugugcggcccuaagaaaagcaccaaucucgugaagaacaaaugcgugaacuucaacuucaacggccugaccggcaccggcgugcugacagagagcaacaagaaguuccugccauuccagcaguuuggccgggauaucgccgauaccacagacgccguuagagauccccagacacuggaaauccuggacaucaccccaugcagcuucggcggagugucugugaucaccccuggcaccaacaccagcaaucagguggcagugcuguaccagggcgugaacuguaccgaagugcccguggccauucacgccgaucagcugacaccuacauggcggguguacuccaccggcagcaauguguuucagaccagagccggcugucugaucggagccgagcacgugaacaauagcuacgagugcgacauccccaucggcgcuggcaucugugccagcuaccagacacagacaaacagccccagacgggcuagaagcguggccagccagagcgugauugccuacacaaugucucugggcgccgagaacagcguggccuacuccaacaacucuaucgcuauccccaccaacuucaccaucagcgugaccaccgagauccugccuguguccaugaccaagaccagcguggacugcaccauguacaucugcggcgauuccaccgagugcuccaaccugcugcugcaguacggcagcuucugcacccagcugaauagagcccugacagggaucgccguggaacaggacaagaacacccaagagguguucgcccaagugaagcaaaucuacaagaccccuccuaucaaggacuucggcggcuucaauuucagccagauucugcccgauccuagcaagcccagcaagcggagcuucaucgaggaccugcuguucaacaaagugacacuggccgacgccggcuucaucaagcaguauggcgauugucugggcgacauugccgccagggaucugauuugcgcccagaaguuuaacggacugacagugcugccuccucugcugaccgaugagaugaucgcccaguacacaucugcccugcuggccggcacaaucacaagcggcuggacauuuggagcuggcgccgcucugcagauccccuuugcuaugcagauggccuaccgguucaacggcaucggagugacccagaaugugcuguacgagaaccagaagcugaucgccaaccaguucaacagcgccaucggcaagauccaggacagccugagcagcacagcaagcgcccugggaaagcugcaggacguggucaaccagaaugcccaggcacugaacacccuggucaagcagcuguccuccaacuucggcgccaucagcucugugcugaacgauauccugagcagacuggacaaggucgaggccgaggugcagaucgacagacugaucacaggcagacugcagagccuccagacauacgugacccagcagcugaucagagccgccgagauuagagccucugccaaucuggccgccaccaagaugucugagugugugcugggccagagcaagagaguggacuuuugcggcaagggcuaccaccugaugagcuucccucagucugccccucacggcgugguguuucugcacgugacauaugugcccgcucaagagaagaauuucaccaccgcuccagccaucugccacgacggcaaagcccacuuuccuagagaaggcguguucguguccaacggcacccauugguucgugacacagcggaacuucuacgagccccagaucaucaccaccgacaacaccuucgugucuggcaacugcgacguugugaucggcauugugaacaauaccguguacgacccucugcagcccgagcuggacagcuucaaagaggaacuggacaaguacuuuaagaaccacacaagccccgacguggaccugggcgauaucagcggaaucaaugccagcgucgugaacauccagaaagagaucgaccggcugaacgagguggccaagaaucugaacgagagccugaucgaccugcaagaacuggggaaguacgagcaguacaucaaguggcccugguacaucuggcugggcuuuaucgccggacugauugccaucgugauggucacaaucaugcuguguugcaugaccagcugcuguagcugccugaagggcuguuguagcuguggcagcugcugcaaguucgacgaggacgauucugagcccgugcugaagggcgugaaacugcacuacaccuga

SEQ ID NO: 23050 - RNA, 3822 nt, Artificial Sequence
  SARS-CoV-2/Wuhan/WIV05/2019__EPI_ISL_402128 spike protein CDS gc mod (1-1273)(D614G_M1229I)
auguucguguuucuggugcugcugccccugguguccagccagugugugaaccugaccaccagaacacagcugccuccagccuacaccaacagcuucaccagaggcguguacuaccccgacaagguguucagauccagcgugcugcacucuacccaggaccuguuccugccuuucuucagcaacgugaccugguuccacgccauccacguguccggcaccaauggcaccaagagauucgacaaccccgugcugcccuucaacgacgggguguacuuugccagcaccgagaaguccaacaucaucagaggcuggaucuucggcaccacacuggacagcaagacccagagccugcugaucgugaacaacgccaccaacguggucaucaaagugugcgaguuccaguucugcaacgaccccuuccugggcgucuacuaccacaagaacaacaagagcuggauggaaagcgaguuccggguguacagcagcgccaacaacugcaccuucgaguacgugucccagccuuuccugauggaccuggaaggcaagcagggcaacuucaagaaccugcgcgaguucguguucaagaacaucgacggcuacuucaaaaucuacagcaagcacaccccuaucaaccucgugcgggaucugccucagggcuucucugcucuggaaccccugguggaucugcccaucggcaucaacaucacccgguuucagacacugcuggcccugcacagaagcuaccugacaccuggcgauagcagcagcggauggacagcuggugccgccgcuuacuaugugggcuaccugcagccuagaaccuuccugcugaaguacaacgagaacggcaccaucaccgacgccguggauugugcucuggauccucugagcgagacaaagugcacccugaaguccuucaccguggaaaagggcaucuaccagaccagcaacuuccgggugcagcccaccgaauccaucgugcgguuccccaauaucaccaaucugugccccuucggcgagguguucaaugccaccagauucgccucuguguacgccuggaaccggaagcggaucagcaauugcguggccgacuacuccgugcuguacaacuccgccagcuucagcaccuucaagugcuacggcguguccccuaccaagcugaacgaccugugcuucacaaacguguacgccgacagcuucgugauccggggagaugaagugcggcagauugccccuggacagacaggcaagaucgccgacuacaacuacaagcugcccgacgacuucaccggcugugugauugccuggaacagcaacaaccuggacuccaaagucggcggcaacuacaauuaccuguaccggcuguuccggaaguccaaucugaagcccuucgagcgggacaucagcaccgaaaucuaucaggccggcagcaccccuugcaacggcguggaaggcuucaacugcuacuucccacugcaguccuacggcuuucagcccacaaauggcgugggcuaucagcccuacagagugguggugcugagcuucgaacugcugcaugcuccugccacagugugcggcccuaagaaaagcaccaaucucgugaagaacaaaugcgugaacuucaacuucaacggccugaccggcaccggcgugcugacagagagcaacaagaaguuccugccauuccagcaguuuggccgggauaucgccgauaccacagacgccguuagagauccccagacacuggaaauccuggacaucaccccaugcagcuucggcggagugucugugaucaccccuggcaccaacaccagcaaucagguggcagugcuguaccagggcgugaacuguaccgaagugcccguggccauucacgccgaucagcugacaccuacauggcggguguacuccaccggcagcaauguguuucagaccagagccggcugucugaucggagccgagcacgugaacaauagcuacgagugcgacauccccaucggcgcuggcaucugugccagcuaccagacacagacaaacagccccagacgggcuagaagcguggccagccagagcaucauugccuacacaaugucucugggcgccgagaacagcguggccuacuccaacaacucuaucgcuauccccaccaacuucaccaucagcgugaccaccgagauccugccuguguccaugaccaagaccagcguggacugcaccauguacaucugcggcgauuccaccgagugcuccaaccugcugcugcaguacggcagcuucugcacccagcugaauagagcccugacagggaucgccguggaacaggacaagaacacccaagagguguucgcccaagugaagcaaaucuacaagaccccuccuaucaaggacuucggcggcuucaauuucagccagauucugcccgauccuagcaagcccagcaagcggagcuucaucgaggaccugcuguucaacaaagugacacuggccgacgccggcuucaucaagcaguauggcgauugucugggcgacauugccgccagggaucugauuugcgcccagaaguuuaacggacugacagugcugccuccucugcugaccgaugagaugaucgcccaguacacaucugcccugcuggccggcacaaucacaagcggcuggacauuuggagcuggcgccgcucugcagauccccuuugcuaugcagauggccuaccgguucaacggcaucggagugacccagaaugugcuguacgagaaccagaagcugaucgccaaccaguucaacagcgccaucggcaagauccaggacagccugagcagcacagcaagcgcccugggaaagcugcaggacguggucaaccagaaugcccaggcacugaacacccuggucaagcagcuguccuccaacuucggcgccaucagcucugugcugaacgauauccugagcagacuggacaaggucgaggccgaggugcagaucgacagacugaucacaggcagacugcagagccuccagacauacgugacccagcagcugaucagagccgccgagauuagagccucugccaaucuggccgccaccaagaugucugagugugugcugggccagagcaagagaguggacuuuugcggcaagggcuaccaccugaugagcuucccucagucugccccucacggcgugguguuucugcacgugacauaugugcccgcucaagagaagaauuucaccaccgcuccagccaucugccacgacggcaaagcccacuuuccuagagaaggcguguucguguccaacggcacccauugguucgugacacagcggaacuucuacgagccccagaucaucaccaccgacaacaccuucgugucuggcaacugcgacguugugaucggcauugugaacaauaccguguacgacccucugcagcccgagcuggacagcuucaaagaggaacuggacaaguacuuuaagaaccacacaagccccgacguggaccugggcgauaucagcggaaucaaugccagcgucgugaacauccagaaagagaucgaccggcugaacgagguggccaagaaucugaacgagagccugaucgaccugcaagaacuggggaaguacgagcaguacaucaaguggcccugguacaucuggcugggcuuuaucgccggacugauugccaucgugaucgucacaaucaugcuguguugcaugaccagcugcuguagcugccugaagggcuguuguagcuguggcagcugcugcaaguucgacgaggacgauucugagcccgugcugaagggcgugaaacugcacuacaccuga

SEQ ID NO: 23051 - RNA, 3816 nt, Artificial Sequence
  SARS-CoV-2/Wuhan/WIV05/2019__EPI_ISL_402128 spike protein CDS gc mod (1-1273)(H69del_V70del_A222V_Y453F_S477N_D614G_I692V)
auguucguguuucuggugcugcugccccugguguccagccagugugugaaccugaccaccagaacacagcugccuccagccuacaccaacagcuucaccagaggcguguacuaccccgacaagguguucagauccagcgugcugcacucuacccaggaccuguuccugccuuucuucagcaacgugaccugguuccacgccaucuccggcaccaauggcaccaagagauucgacaaccccgugcugcccuucaacgacgggguguacuuugccagcaccgagaaguccaacaucaucagaggcuggaucuucggcaccacacuggacagcaagacccagagccugcugaucgugaacaacgccaccaacguggucaucaaagugugcgaguuccaguucugcaacgaccccuuccugggcgucuacuaccacaagaacaacaagagcuggauggaaagcgaguuccggguguacagcagcgccaacaacugcaccuucgaguacgugucccagccuuuccugauggaccuggaaggcaagcagggcaacuucaagaaccugcgcgaguucguguucaagaacaucgacggcuacuucaaaaucuacagcaagcacaccccuaucaaccucgugcgggaucugccucagggcuucucugugcuggaaccccugguggaucugcccaucggcaucaacaucacccgguuucagacacugcuggcccugcacagaagcuaccugacaccuggcgauagcagcagcggauggacagcuggugccgccgcuuacuaugugggcuaccugcagccuagaaccuuccugcugaaguacaacgagaacggcaccaucaccgacgccguggauugugcucuggauccucugagcgagacaaagugcacccugaaguccuucaccguggaaaagggcaucuaccagaccagcaacuuccgggugcagcccaccgaauccaucgugcgguuccccaauaucaccaaucugugccccuucggcgagguguucaaugccaccagauucgccucuguguacgccuggaaccggaagcggaucagcaauugcguggccgacuacuccgugcuguacaacuccgccagcuucagcaccuucaagugcuacggcguguccccuaccaagcugaacgaccugugcuucacaaacguguacgccgacagcuucgugauccggggagaugaagugcggcagauugccccuggacagacaggcaagaucgccgacuacaacuacaagcugcccgacgacuucaccggcugugugauugccuggaacagcaacaaccuggacuccaaagucggcggcaacuacaauuaccuguuccggcuguuccggaaguccaaucugaagcccuucgagcgggacaucagcaccgaaaucuaucaggccggcaacaccccuugcaacggcguggaaggcuucaacugcuacuucccacugcaguccuacggcuuucagcccacaaauggcgugggcuaucagcccuacagagugguggugcugagcuucgaacugcugcaugcuccugccacagugugcggcccuaagaaaagcaccaaucucgugaagaacaaaugcgugaacuucaacuucaacggccugaccggcaccggcgugcugacagagagcaacaagaaguuccugccauuccagcaguuuggccgggauaucgccgauaccacagacgccguuagagauccccagacacuggaaauccuggacaucaccccaugcagcuucggcggagugucugugaucaccccuggcaccaacaccagcaaucagguggcagugcuguaccagggcgugaacuguaccgaagugcccguggccauucacgccgaucagcugacaccuacauggcggguguacuccaccggcagcaauguguuucagaccagagccggcugucugaucggagccgagcacgugaacaauagcuacgagugcgacauccccaucggcgcuggcaucugugccagcuaccagacacagacaaacagccccagacgggcuagaagcguggccagccagagcgugauugccuacacaaugucucugggcgccgagaacagcguggccuacuccaacaacucuaucgcuauccccaccaacuucaccaucagcgugaccaccgagauccugccuguguccaugaccaagaccagcguggacugcaccauguacaucugcggcgauuccaccgagugcuccaaccugcugcugcaguacggcagcuucugcacccagcugaauagagcccugacagggaucgccguggaacaggacaagaacacccaagagguguucgcccaagugaagcaaaucuacaagaccccuccuaucaaggacuucggcggcuucaauuucagccagauucugcccgauccuagcaagcccagcaagcggagcuucaucgaggaccugcuguucaacaaagugacacuggccgacgccggcuucaucaagcaguauggcgauugucugggcgacauugccgccagggaucugauuugcgcccagaaguuuaacggacugacagugcugccuccucugcugaccgaugagaugaucgcccaguacacaucugcccugcuggccggcacaaucacaagcggcuggacauuuggagcuggcgccgcucugcagauccccuuugcuaugcagauggccuaccgguucaacggcaucggagugacccagaaugugcuguacgagaaccagaagcugaucgccaaccaguucaacagcgccaucggcaagauccaggacagccugagcagcacagcaagcgcccugggaaagcugcaggacguggucaaccagaaugcccaggcacugaacacccuggucaagcagcuguccuccaacuucggcgccaucagcucugugcugaacgauauccugagcagacuggacaaggucgaggccgaggugcagaucgacagacugaucacaggcagacugcagagccuccagacauacgugacccagcagcugaucagagccgccgagauuagagccucugccaaucuggccgccaccaagaugucugagugugugcugggccagagcaagagaguggacuuuugcggcaagggcuaccaccugaugagcuucccucagucugccccucacggcgugguguuucugcacgugacauaugugcccgcucaagagaagaauuucaccaccgcuccagccaucugccacgacggcaaagcccacuuuccuagagaaggcguguucguguccaacggcacccauugguucgugacacagcggaacuucuacgagccccagaucaucaccaccgacaacaccuucgugucuggcaacugcgacguugugaucggcauugugaacaauaccguguacgacccucugcagcccgagcuggacagcuucaaagaggaacuggacaaguacuuuaagaaccacacaagccccgacguggaccugggcgauaucagcggaaucaaugccagcgucgugaacauccagaaagagaucgaccggcugaacgagguggccaagaaucugaacgagagccugaucgaccugcaagaacuggggaaguacgagcaguacaucaaguggcccugguacaucuggcugggcuuuaucgccggacugauugccaucgugauggucacaaucaugcuguguugcaugaccagcugcuguagcugccugaagggcuguuguagcuguggcagcugcugcaaguucgacgaggacgauucugagcccgugcugaagggcgugaaacugcacuacaccuga

SEQ ID NO: 23052 - RNA, 3816 nt, Artificial Sequence
  SARS-CoV-2/Wuhan/WIV05/2019__EPI_ISL_402128 spike protein CDS gc mod (1-1273)(H69del_V70del_Y453F_D614G_I692V_M1229I)
auguucguguuucuggugcugcugccccugguguccagccagugugugaaccugaccaccagaacacagcugccuccagccuacaccaacagcuucaccagaggcguguacuaccccgacaagguguucagauccagcgugcugcacucuacccaggaccuguuccugccuuucuucagcaacgugaccugguuccacgccaucuccggcaccaauggcaccaagagauucgacaaccccgugcugcccuucaacgacgggguguacuuugccagcaccgagaaguccaacaucaucagaggcuggaucuucggcaccacacuggacagcaagacccagagccugcugaucgugaacaacgccaccaacguggucaucaaagugugcgaguuccaguucugcaacgaccccuuccugggcgucuacuaccacaagaacaacaagagcuggauggaaagcgaguuccggguguacagcagcgccaacaacugcaccuucgaguacgugucccagccuuuccugauggaccuggaaggcaagcagggcaacuucaagaaccugcgcgaguucguguucaagaacaucgacggcuacuucaaaaucuacagcaagcacaccccuaucaaccucgugcgggaucugccucagggcuucucugcucuggaaccccugguggaucugcccaucggcaucaacaucacccgguuucagacacugcuggcccugcacagaagcuaccugacaccuggcgauagcagcagcggauggacagcuggugccgccgcuuacuaugugggcuaccugcagccuagaaccuuccugcugaaguacaacgagaacggcaccaucaccgacgccguggauugugcucuggauccucugagcgagacaaagugcacccugaaguccuucaccguggaaaagggcaucuaccagaccagcaacuuccgggugcagcccaccgaauccaucgugcgguuccccaauaucaccaaucugugccccuucggcgagguguucaaugccaccagauucgccucuguguacgccuggaaccggaagcggaucagcaauugcguggccgacuacuccgugcuguacaacuccgccagcuucagcaccuucaagugcuacggcguguccccuaccaagcugaacgaccugugcuucacaaacguguacgccgacagcuucgugauccggggagaugaagugcggcagauugccccuggacagacaggcaagaucgccgacuacaacuacaagcugcccgacgacuucaccggcugugugauugccuggaacagcaacaaccuggacuccaaagucggcggcaacuacaauuaccuguuccggcuguuccggaaguccaaucugaagcccuucgagcgggacaucagcaccgaaaucuaucaggccggcagcaccccuugcaacggcguggaaggcuucaacugcuacuucccacugcaguccuacggcuuucagcccacaaauggcgugggcuaucagcccuacagagugguggugcugagcuucgaacugcugcaugcuccugccacagugugcggcccuaagaaaagcaccaaucucgugaagaacaaaugcgugaacuucaacuucaacggccugaccggcaccggcgugcugacagagagcaacaagaaguuccugccauuccagcaguuuggccgggauaucgccgauaccacagacgccguuagagauccccagacacuggaaauccuggacaucaccccaugcagcuucggcggagugucugugaucaccccuggcaccaacaccagcaaucagguggcagugcuguaccagggcgugaacuguaccgaagugcccguggccauucacgccgaucagcugacaccuacauggcggguguacuccaccggcagcaauguguuucagaccagagccggcugucugaucggagccgagcacgugaacaauagcuacgagugcgacauccccaucggcgcuggcaucugugccagcuaccagacacagacaaacagccccagacgggcuagaagcguggccagccagagcgugauugccuacacaaugucucugggcgccgagaacagcguggccuacuccaacaacucuaucgcuauccccaccaacuucaccaucagcgugaccaccgagauccugccuguguccaugaccaagaccagcguggacugcaccauguacaucugcggcgauuccaccgagugcuccaaccugcugcugcaguacggcagcuucugcacccagcugaauagagcccugacagggaucgccguggaacaggacaagaacacccaagagguguucgcccaagugaagcaaaucuacaagaccccuccuaucaaggacuucggcggcuucaauuucagccagauucugcccgauccuagcaagcccagcaagcggagcuucaucgaggaccugcuguucaacaaagugacacuggccgacgccggcuucaucaagcaguauggcgauugucugggcgacauugccgccagggaucugauuugcgcccagaaguuuaacggacugacagugcugccuccucugcugaccgaugagaugaucgcccaguacacaucugcccugcuggccggcacaaucacaagcggcuggacauuuggagcuggcgccgcucugcagauccccuuugcuaugcagauggccuaccgguucaacggcaucggagugacccagaaugugcuguacgagaaccagaagcugaucgccaaccaguucaacagcgccaucggcaagauccaggacagccugagcagcacagcaagcgcccugggaaagcugcaggacguggucaaccagaaugcccaggcacugaacacccuggucaagcagcuguccuccaacuucggcgccaucagcucugugcugaacgauauccugagcagacuggacaaggucgaggccgaggugcagaucgacagacugaucacaggcagacugcagagccuccagacauacgugacccagcagcugaucagagccgccgagauuagagccucugccaaucuggccgccaccaagaugucugagugugugcugggccagagcaagagaguggacuuuugcggcaagggcuaccaccugaugagcuucccucagucugccccucacggcgugguguuucugcacgugacauaugugcccgcucaagagaagaauuucaccaccgcuccagccaucugccacgacggcaaagcccacuuuccuagagaaggcguguucguguccaacggcacccauugguucgugacacagcggaacuucuacgagccccagaucaucaccaccgacaacaccuucgugucuggcaacugcgacguugugaucggcauugugaacaauaccguguacgacccucugcagcccgagcuggacagcuucaaagaggaacuggacaaguacuuuaagaaccacacaagccccgacguggaccugggcgauaucagcggaaucaaugccagcgucgugaacauccagaaagagaucgaccggcugaacgagguggccaagaaucugaacgagagccugaucgaccugcaagaacuggggaaguacgagcaguacaucaaguggcccugguacaucuggcugggcuuuaucgccggacugauugccaucgugaucgucacaaucaugcuguguugcaugaccagcugcuguagcugccugaagggcuguuguagcuguggcagcugcugcaaguucgacgaggacgauucugagcccgugcugaagggcgugaaacugcacuacaccuga

SEQ ID NO: 23053 - RNA, 3813 nt, Artificial Sequence
  SARS-CoV-2/Wuhan/WIV05/2019__EPI_ISL_402128 spike protein CDS gc mod (1-1273)(H69del_V70del_Y144del_N501Y_A570D_D614G_P681H_T716I_S982 A_D1118H)
auguucguguuucuggugcugcugccccugguguccagccagugugugaaccugaccaccagaacacagcugccuccagccuacaccaacagcuucaccagaggcguguacuaccccgacaagguguucagauccagcgugcugcacucuacccaggaccuguuccugccuuucuucagcaacgugaccugguuccacgccaucuccggcaccaauggcaccaagagauucgacaaccccgugcugcccuucaacgacgggguguacuuugccagcaccgagaaguccaacaucaucagaggcuggaucuucggcaccacacuggacagcaagacccagagccugcugaucgugaacaacgccaccaacguggucaucaaagugugcgaguuccaguucugcaacgaccccuuccugggcgucuaccacaagaacaacaagagcuggauggaaagcgaguuccggguguacagcagcgccaacaacugcaccuucgaguacgugucccagccuuuccugauggaccuggaaggcaagcagggcaacuucaagaaccugcgcgaguucguguucaagaacaucgacggcuacuucaaaaucuacagcaagcacaccccuaucaaccucgugcgggaucugccucagggcuucucugcucuggaaccccugguggaucugcccaucggcaucaacaucacccgguuucagacacugcuggcccugcacagaagcuaccugacaccuggcgauagcagcagcggauggacagcuggugccgccgcuuacuaugugggcuaccugcagccuagaaccuuccugcugaaguacaacgagaacggcaccaucaccgacgccguggauugugcucuggauccucugagcgagacaaagugcacccugaaguccuucaccguggaaaagggcaucuaccagaccagcaacuuccgggugcagcccaccgaauccaucgugcgguuccccaauaucaccaaucugugccccuucggcgagguguucaaugccaccagauucgccucuguguacgccuggaaccggaagcggaucagcaauugcguggccgacuacuccgugcuguacaacuccgccagcuucagcaccuucaagugcuacggcguguccccuaccaagcugaacgaccugugcuucacaaacguguacgccgacagcuucgugauccggggagaugaagugcggcagauugccccuggacagacaggcaagaucgccgacuacaacuacaagcugcccgacgacuucaccggcugugugauugccuggaacagcaacaaccuggacuccaaagucggcggcaacuacaauuaccuguaccggcuguuccggaaguccaaucugaagcccuucgagcgggacaucagcaccgaaaucuaucaggccggcagcaccccuugcaacggcguggaaggcuucaacugcuacuucccacugcaguccuacggcuuucagcccacauacggcgugggcuaucagcccuacagagugguggugcugagcuucgaacugcugcaugcuccugccacagugugcggcccuaagaaaagcaccaaucucgugaagaacaaaugcgugaacuucaacuucaacggccugaccggcaccggcgugcugacagagagcaacaagaaguuccugccauuccagcaguuuggccgggauaucgacgauaccacagacgccguuagagauccccagacacuggaaauccuggacaucaccccaugcagcuucggcggagugucugugaucaccccuggcaccaacaccagcaaucagguggcagugcuguaccagggcgugaacuguaccgaagugcccguggccauucacgccgaucagcugacaccuacauggcggguguacuccaccggcagcaauguguuucagaccagagccggcugucugaucggagccgagcacgugaacaauagcuacgagugcgacauccccaucggcgcuggcaucugugccagcuaccagacacagacaaacagccacagacgggcuagaagcguggccagccagagcaucauugccuacacaaugucucugggcgccgagaacagcguggccuacuccaacaacucuaucgcuauccccaucaacuucaccaucagcgugaccaccgagauccugccuguguccaugaccaagaccagcguggacugcaccauguacaucugcggcgauuccaccgagugcuccaaccugcugcugcaguacggcagcuucugcacccagcugaauagagcccugacagggaucgccguggaacaggacaagaacacccaagagguguucgcccaagugaagcaaaucuacaagaccccuccuaucaaggacuucggcggcuucaauuucagccagauucugcccgauccuagcaagcccagcaagcggagcuucaucgaggaccugcuguucaacaaagugacacuggccgacgccggcuucaucaagcaguauggcgauugucugggcgacauugccgccagggaucugauuugcgcccagaaguuuaacggacugacagugcugccuccucugcugaccgaugagaugaucgcccaguacacaucugcccugcuggccggcacaaucacaagcggcuggacauuuggagcuggcgccgcucugcagauccccuuugcuaugcagauggccuaccgguucaacggcaucggagugacccagaaugugcuguacgagaaccagaagcugaucgccaaccaguucaacagcgccaucggcaagauccaggacagccugagcagcacagcaagcgcccugggaaagcugcaggacguggucaaccagaaugcccaggcacugaacacccuggucaagcagcuguccuccaacuucggcgccaucagcucugugcugaacgauauccuggccagacuggacaaggucgaggccgaggugcagaucgacagacugaucacaggcagacugcagagccuccagacauacgugacccagcagcugaucagagccgccgagauuagagccucugccaaucuggccgccaccaagaugucugagugugugcugggccagagcaagagaguggacuuuugcggcaagggcuaccaccugaugagcuucccucagucugccccucacggcgugguguuucugcacgugacauaugugcccgcucaagagaagaauuucaccaccgcuccagccaucugccacgacggcaaagcccacuuuccuagagaaggcguguucguguccaacggcacccauugguucgugacacagcggaacuucuacgagccccagaucaucaccacccacaacaccuucgugucuggcaacugcgacguugugaucggcauugugaacaauaccguguacgacccucugcagcccgagcuggacagcuucaaagaggaacuggacaaguacuuuaagaaccacacaagccccgacguggaccugggcgauaucagcggaaucaaugccagcgucgugaacauccagaaagagaucgaccggcugaacgagguggccaagaaucugaacgagagccugaucgaccugcaagaacuggggaaguacgagcaguacaucaaguggcccugguacaucuggcugggcuuuaucgccggacugauugccaucgugauggucacaaucaugcuguguugcaugaccagcugcuguagcugccugaagggcuguuguagcuguggcagcugcugcaaguucgacgaggacgauucugagcccgugcugaagggcgugaaacugcacuacaccuga

SEQ ID NO: 23054 - RNA, 3822 nt, Artificial Sequence
  SARS-CoV-2/Wuhan/WIV05/2019__EPI_ISL_402128 spike protein CDS gc mod (1-1273)(K417N_E484K_N501Y_D614G)
auguucguguuucuggugcugcugccccugguguccagccagugugugaaccugaccaccagaacacagcugccuccagccuacaccaacagcuucaccagaggcguguacuaccccgacaagguguucagauccagcgugcugcacucuacccaggaccuguuccugccuuucuucagcaacgugaccugguuccacgccauccacguguccggcaccaauggcaccaagagauucgacaaccccgugcugcccuucaacgacgggguguacuuugccagcaccgagaaguccaacaucaucagaggcuggaucuucggcaccacacuggacagcaagacccagagccugcugaucgugaacaacgccaccaacguggucaucaaagugugcgaguuccaguucugcaacgaccccuuccugggcgucuacuaccacaagaacaacaagagcuggauggaaagcgaguuccggguguacagcagcgccaacaacugcaccuucgaguacgugucccagccuuuccugauggaccuggaaggcaagcagggcaacuucaagaaccugcgcgaguucguguucaagaacaucgacggcuacuucaaaaucuacagcaagcacaccccuaucaaccucgugcgggaucugccucagggcuucucugcucuggaaccccugguggaucugcccaucggcaucaacaucacccgguuucagacacugcuggcccugcacagaagcuaccugacaccuggcgauagcagcagcggauggacagcuggugccgccgcuuacuaugugggcuaccugcagccuagaaccuuccugcugaaguacaacgagaacggcaccaucaccgacgccguggauugugcucuggauccucugagcgagacaaagugcacccugaaguccuucaccguggaaaagggcaucuaccagaccagcaacuuccgggugcagcccaccgaauccaucgugcgguuccccaauaucaccaaucugugccccuucggcgagguguucaaugccaccagauucgccucuguguacgccuggaaccggaagcggaucagcaauugcguggccgacuacuccgugcuguacaacuccgccagcuucagcaccuucaagugcuacggcguguccccuaccaagcugaacgaccugugcuucacaaacguguacgccgacagcuucgugauccggggagaugaagugcggcagauugccccuggacagacaggcaacaucgccgacuacaacuacaagcugcccgacgacuucaccggcugugugauugccuggaacagcaacaaccuggacuccaaagucggcggcaacuacaauuaccuguaccggcuguuccggaaguccaaucugaagcccuucgagcgggacaucagcaccgaaaucuaucaggccggcagcaccccuugcaacggcgugaagggcuucaacugcuacuucccacugcaguccuacggcuuucagcccacauacggcgugggcuaucagcccuacagagugguggugcugagcuucgaacugcugcaugcuccugccacagugugcggcccuaagaaaagcaccaaucucgugaagaacaaaugcgugaacuucaacuucaacggccugaccggcaccggcgugcugacagagagcaacaagaaguuccugccauuccagcaguuuggccgggauaucgccgauaccacagacgccguuagagauccccagacacuggaaauccuggacaucaccccaugcagcuucggcggagugucugugaucaccccuggcaccaacaccagcaaucagguggcagugcuguaccagggcgugaacuguaccgaagugcccguggccauucacgccgaucagcugacaccuacauggcggguguacuccaccggcagcaauguguuucagaccagagccggcugucugaucggagccgagcacgugaacaauagcuacgagugcgacauccccaucggcgcuggcaucugugccagcuaccagacacagacaaacagccccagacgggcuagaagcguggccagccagagcaucauugccuacacaaugucucugggcgccgagaacagcguggccuacuccaacaacucuaucgcuauccccaccaacuucaccaucagcgugaccaccgagauccugccuguguccaugaccaagaccagcguggacugcaccauguacaucugcggcgauuccaccgagugcuccaaccugcugcugcaguacggcagcuucugcacccagcugaauagagcccugacagggaucgccguggaacaggacaagaacacccaagagguguucgcccaagugaagcaaaucuacaagaccccuccuaucaaggacuucggcggcuucaauuucagccagauucugcccgauccuagcaagcccagcaagcggagcuucaucgaggaccugcuguucaacaaagugacacuggccgacgccggcuucaucaagcaguauggcgauugucugggcgacauugccgccagggaucugauuugcgcccagaaguuuaacggacugacagugcugccuccucugcugaccgaugagaugaucgcccaguacacaucugcccugcuggccggcacaaucacaagcggcuggacauuuggagcuggcgccgcucugcagauccccuuugcuaugcagauggccuaccgguucaacggcaucggagugacccagaaugugcuguacgagaaccagaagcugaucgccaaccaguucaacagcgccaucggcaagauccaggacagccugagcagcacagcaagcgcccugggaaagcugcaggacguggucaaccagaaugcccaggcacugaacacccuggucaagcagcuguccuccaacuucggcgccaucagcucugugcugaacgauauccugagcagacuggacaaggucgaggccgaggugcagaucgacagacugaucacaggcagacugcagagccuccagacauacgugacccagcagcugaucagagccgccgagauuagagccucugccaaucuggccgccaccaagaugucugagugugugcugggccagagcaagagaguggacuuuugcggcaagggcuaccaccugaugagcuucccucagucugccccucacggcgugguguuucugcacgugacauaugugcccgcucaagagaagaauuucaccaccgcuccagccaucugccacgacggcaaagcccacuuuccuagagaaggcguguucguguccaacggcacccauugguucgugacacagcggaacuucuacgagccccagaucaucaccaccgacaacaccuucgugucuggcaacugcgacguugugaucggcauugugaacaauaccguguacgacccucugcagcccgagcuggacagcuucaaagaggaacuggacaaguacuuuaagaaccacacaagccccgacguggaccugggcgauaucagcggaaucaaugccagcgucgugaacauccagaaagagaucgaccggcugaacgagguggccaagaaucugaacgagagccugaucgaccugcaagaacuggggaaguacgagcaguacaucaaguggcccugguacaucuggcugggcuuuaucgccggacugauugccaucgugauggucacaaucaugcuguguugcaugaccagcugcuguagcugccugaagggcuguuguagcuguggcagcugcugcaaguucgacgaggacgauucugagcccgugcugaagggcgugaaacugcacuacaccuga

SEQ ID NO: 23055 - RNA, 3813 nt, Artificial Sequence
  SARS-CoV-2/Wuhan/WIV05/2019__EPI_ISL_402128 spike protein CDS gc mod (1-1273)(L18F_D80A_D215G_L242del_A243del_L244del_R246I_K417N_E484 K_N501Y_D614G_A701V)
auguucguguuucuggugcugcugccccugguguccagccagugugugaacuucaccaccagaacacagcugccuccagccuacaccaacagcuucaccagaggcguguacuaccccgacaagguguucagauccagcgugcugcacucuacccaggaccuguuccugccuuucuucagcaacgugaccugguuccacgccauccacguguccggcaccaauggcaccaagagauucgccaaccccgugcugcccuucaacgacgggguguacuuugccagcaccgagaaguccaacaucaucagaggcuggaucuucggcaccacacuggacagcaagacccagagccugcugaucgugaacaacgccaccaacguggucaucaaagugugcgaguuccaguucugcaacgaccccuuccugggcgucuacuaccacaagaacaacaagagcuggauggaaagcgaguuccggguguacagcagcgccaacaacugcaccuucgaguacgugucccagccuuuccugauggaccuggaaggcaagcagggcaacuucaagaaccugcgcgaguucguguucaagaacaucgacggcuacuucaaaaucuacagcaagcacaccccuaucaaccucgugcggggccugccucagggcuucucugcucuggaaccccugguggaucugcccaucggcaucaacaucacccgguuucagacacugcacaucagcuaccugacaccuggcgauagcagcagcggauggacagcuggugccgccgcuuacuaugugggcuaccugcagccuagaaccuuccugcugaaguacaacgagaacggcaccaucaccgacgccguggauugugcucuggauccucugagcgagacaaagugcacccugaaguccuucaccguggaaaagggcaucuaccagaccagcaacuuccgggugcagcccaccgaauccaucgugcgguuccccaauaucaccaaucugugccccuucggcgagguguucaaugccaccagauucgccucuguguacgccuggaaccggaagcggaucagcaauugcguggccgacuacuccgugcuguacaacuccgccagcuucagcaccuucaagugcuacggcguguccccuaccaagcugaacgaccugugcuucacaaacguguacgccgacagcuucgugauccggggagaugaagugcggcagauugccccuggacagacaggcaacaucgccgacuacaacuacaagcugcccgacgacuucaccggcugugugauugccuggaacagcaacaaccuggacuccaaagucggcggcaacuacaauuaccuguaccggcuguuccggaaguccaaucugaagcccuucgagcgggacaucagcaccgaaaucuaucaggccggcagcaccccuugcaacggcgugaagggcuucaacugcuacuucccacugcaguccuacggcuuucagcccacauacggcgugggcuaucagcccuacagagugguggugcugagcuucgaacugcugcaugcuccugccacagugugcggcccuaagaaaagcaccaaucucgugaagaacaaaugcgugaacuucaacuucaacggccugaccggcaccggcgugcugacagagagcaacaagaaguuccugccauuccagcaguuuggccgggauaucgccgauaccacagacgccguuagagauccccagacacuggaaauccuggacaucaccccaugcagcuucggcggagugucugugaucaccccuggcaccaacaccagcaaucagguggcagugcuguaccagggcgugaacuguaccgaagugcccguggccauucacgccgaucagcugacaccuacauggcggguguacuccaccggcagcaauguguuucagaccagagccggcugucugaucggagccgagcacgugaacaauagcuacgagugcgacauccccaucggcgcuggcaucugugccagcuaccagacacagacaaacagccccagacgggcuagaagcguggccagccagagcaucauugccuacacaaugucucugggcguggagaacagcguggccuacuccaacaacucuaucgcuauccccaccaacuucaccaucagcgugaccaccgagauccugccuguguccaugaccaagaccagcguggacugcaccauguacaucugcggcgauuccaccgagugcuccaaccugcugcugcaguacggcagcuucugcacccagcugaauagagcccugacagggaucgccguggaacaggacaagaacacccaagagguguucgcccaagugaagcaaaucuacaagaccccuccuaucaaggacuucggcggcuucaauuucagccagauucugcccgauccuagcaagcccagcaagcggagcuucaucgaggaccugcuguucaacaaagugacacuggccgacgccggcuucaucaagcaguauggcgauugucugggcgacauugccgccagggaucugauuugcgcccagaaguuuaacggacugacagugcugccuccucugcugaccgaugagaugaucgcccaguacacaucugcccugcuggccggcacaaucacaagcggcuggacauuuggagcuggcgccgcucugcagauccccuuugcuaugcagauggccuaccgguucaacggcaucggagugacccagaaugugcuguacgagaaccagaagcugaucgccaaccaguucaacagcgccaucggcaagauccaggacagccugagcagcacagcaagcgcccugggaaagcugcaggacguggucaaccagaaugcccaggcacugaacacccuggucaagcagcuguccuccaacuucggcgccaucagcucugugcugaacgauauccugagcagacuggacaaggucgaggccgaggugcagaucgacagacugaucacaggcagacugcagagccuccagacauacgugacccagcagcugaucagagccgccgagauuagagccucugccaaucuggccgccaccaagaugucugagugugugcugggccagagcaagagaguggacuuuugcggcaagggcuaccaccugaugagcuucccucagucugccccucacggcgugguguuucugcacgugacauaugugcccgcucaagagaagaauuucaccaccgcuccagccaucugccacgacggcaaagcccacuuuccuagagaaggcguguucguguccaacggcacccauugguucgugacacagcggaacuucuacgagccccagaucaucaccaccgacaacaccuucgugucuggcaacugcgacguugugaucggcauugugaacaauaccguguacgacccucugcagcccgagcuggacagcuucaaagaggaacuggacaaguacuuuaagaaccacacaagccccgacguggaccugggcgauaucagcggaaucaaugccagcgucgugaacauccagaaagagaucgaccggcugaacgagguggccaagaaucugaacgagagccugaucgaccugcaagaacuggggaaguacgagcaguacaucaaguggcccugguacaucuggcugggcuuuaucgccggacugauugccaucgugauggucacaaucaugcuguguugcaugaccagcugcuguagcugccugaagggcuguuguagcuguggcagcugcugcaaguucgacgaggacgauucugagcccgugcugaagggcgugaaacugcacuacaccuga

SEQ ID NO: 23056 - RNA, 3822 nt, Artificial Sequence
  SARS-CoV-2/Wuhan/WIV05/2019__EPI_ISL_402128 spike protein CDS gc mod (1-1273)(E484K_D614G)
auguucguguuucuggugcugcugccccugguguccagccagugugugaaccugaccaccagaacacagcugccuccagccuacaccaacagcuucaccagaggcguguacuaccccgacaagguguucagauccagcgugcugcacucuacccaggaccuguuccugccuuucuucagcaacgugaccugguuccacgccauccacguguccggcaccaauggcaccaagagauucgacaaccccgugcugcccuucaacgacgggguguacuuugccagcaccgagaaguccaacaucaucagaggcuggaucuucggcaccacacuggacagcaagacccagagccugcugaucgugaacaacgccaccaacguggucaucaaagugugcgaguuccaguucugcaacgaccccuuccugggcgucuacuaccacaagaacaacaagagcuggauggaaagcgaguuccggguguacagcagcgccaacaacugcaccuucgaguacgugucccagccuuuccugauggaccuggaaggcaagcagggcaacuucaagaaccugcgcgaguucguguucaagaacaucgacggcuacuucaaaaucuacagcaagcacaccccuaucaaccucgugcgggaucugccucagggcuucucugcucuggaaccccugguggaucugcccaucggcaucaacaucacccgguuucagacacugcuggcccugcacagaagcuaccugacaccuggcgauagcagcagcggauggacagcuggugccgccgcuuacuaugugggcuaccugcagccuagaaccuuccugcugaaguacaacgagaacggcaccaucaccgacgccguggauugugcucuggauccucugagcgagacaaagugcacccugaaguccuucaccguggaaaagggcaucuaccagaccagcaacuuccgggugcagcccaccgaauccaucgugcgguuccccaauaucaccaaucugugccccuucggcgagguguucaaugccaccagauucgccucuguguacgccuggaaccggaagcggaucagcaauugcguggccgacuacuccgugcuguacaacuccgccagcuucagcaccuucaagugcuacggcguguccccuaccaagcugaacgaccugugcuucacaaacguguacgccgacagcuucgugauccggggagaugaagugcggcagauugccccuggacagacaggcaagaucgccgacuacaacuacaagcugcccgacgacuucaccggcugugugauugccuggaacagcaacaaccuggacuccaaagucggcggcaacuacaauuaccuguaccggcuguuccggaaguccaaucugaagcccuucgagcgggacaucagcaccgaaaucuaucaggccggcagcaccccuugcaacggcgugaagggcuucaacugcuacuucccacugcaguccuacggcuuucagcccacaaauggcgugggcuaucagcccuacagagugguggugcugagcuucgaacugcugcaugcuccugccacagugugcggcccuaagaaaagcaccaaucucgugaagaacaaaugcgugaacuucaacuucaacggccugaccggcaccggcgugcugacagagagcaacaagaaguuccugccauuccagcaguuuggccgggauaucgccgauaccacagacgccguuagagauccccagacacuggaaauccuggacaucaccccaugcagcuucggcggagugucugugaucaccccuggcaccaacaccagcaaucagguggcagugcuguaccagggcgugaacuguaccgaagugcccguggccauucacgccgaucagcugacaccuacauggcggguguacuccaccggcagcaauguguuucagaccagagccggcugucugaucggagccgagcacgugaacaauagcuacgagugcgacauccccaucggcgcuggcaucugugccagcuaccagacacagacaaacagccccagacgggcuagaagcguggccagccagagcaucauugccuacacaaugucucugggcgccgagaacagcguggccuacuccaacaacucuaucgcuauccccaccaacuucaccaucagcgugaccaccgagauccugccuguguccaugaccaagaccagcguggacugcaccauguacaucugcggcgauuccaccgagugcuccaaccugcugcugcaguacggcagcuucugcacccagcugaauagagcccugacagggaucgccguggaacaggacaagaacacccaagagguguucgcccaagugaagcaaaucuacaagaccccuccuaucaaggacuucggcggcuucaauuucagccagauucugcccgauccuagcaagcccagcaagcggagcuucaucgaggaccugcuguucaacaaagugacacuggccgacgccggcuucaucaagcaguauggcgauugucugggcgacauugccgccagggaucugauuugcgcccagaaguuuaacggacugacagugcugccuccucugcugaccgaugagaugaucgcccaguacacaucugcccugcuggccggcacaaucacaagcggcuggacauuuggagcuggcgccgcucugcagauccccuuugcuaugcagauggccuaccgguucaacggcaucggagugacccagaaugugcuguacgagaaccagaagcugaucgccaaccaguucaacagcgccaucggcaagauccaggacagccugagcagcacagcaagcgcccugggaaagcugcaggacguggucaaccagaaugcccaggcacugaacacccuggucaagcagcuguccuccaacuucggcgccaucagcucugugcugaacgauauccugagcagacuggacaaggucgaggccgaggugcagaucgacagacugaucacaggcagacugcagagccuccagacauacgugacccagcagcugaucagagccgccgagauuagagccucugccaaucuggccgccaccaagaugucugagugugugcugggccagagcaagagaguggacuuuugcggcaagggcuaccaccugaugagcuucccucagucugccccucacggcgugguguuucugcacgugacauaugugcccgcucaagagaagaauuucaccaccgcuccagccaucugccacgacggcaaagcccacuuuccuagagaaggcguguucguguccaacggcacccauugguucgugacacagcggaacuucuacgagccccagaucaucaccaccgacaacaccuucgugucuggcaacugcgacguugugaucggcauugugaacaauaccguguacgacccucugcagcccgagcuggacagcuucaaagaggaacuggacaaguacuuuaagaaccacacaagccccgacguggaccugggcgauaucagcggaaucaaugccagcgucgugaacauccagaaagagaucgaccggcugaacgagguggccaagaaucugaacgagagccugaucgaccugcaagaacuggggaaguacgagcaguacaucaaguggcccugguacaucuggcugggcuuuaucgccggacugauugccaucgugauggucacaaucaugcuguguugcaugaccagcugcuguagcugccugaagggcuguuguagcuguggcagcugcugcaaguucgacgaggacgauucugagcccgugcugaagggcgugaaacugcacuacaccuga

SEQ ID NO: 23057 - RNA, 3822 nt, Artificial Sequence
  SARS-CoV-2/Wuhan/WIV05/2019__EPI_ISL_402128 spike protein CDS gc mod (1-1273)(L18F_T20N_P26S_D138Y_R190S_K417T_E484K_N501Y_D614G_H655Y _T1027I)
auguucguguuucuggugcugcugccccugguguccagccagugugugaacuucaccaacagaacacagcugccuagcgccuacaccaacagcuucaccagaggcguguacuaccccgacaagguguucagauccagcgugcugcacucuacccaggaccuguuccugccuuucuucagcaacgugaccugguuccacgccauccacguguccggcaccaauggcaccaagagauucgacaaccccgugcugcccuucaacgacgggguguacuuugccagcaccgagaaguccaacaucaucagaggcuggaucuucggcaccacacuggacagcaagacccagagccugcugaucgugaacaacgccaccaacguggucaucaaagugugcgaguuccaguucugcaacuaccccuuccugggcgucuacuaccacaagaacaacaagagcuggauggaaagcgaguuccggguguacagcagcgccaacaacugcaccuucgaguacgugucccagccuuuccugauggaccuggaaggcaagcagggcaacuucaagaaccugagcgaguucguguucaagaacaucgacggcuacuucaaaaucuacagcaagcacaccccuaucaaccucgugcgggaucugccucagggcuucucugcucuggaaccccugguggaucugcccaucggcaucaacaucacccgguuucagacacugcuggcccugcacagaagcuaccugacaccuggcgauagcagcagcggauggacagcuggugccgccgcuuacuaugugggcuaccugcagccuagaaccuuccugcugaaguacaacgagaacggcaccaucaccgacgccguggauugugcucuggauccucugagcgagacaaagugcacccugaaguccuucaccguggaaaagggcaucuaccagaccagcaacuuccgggugcagcccaccgaauccaucgugcgguuccccaauaucaccaaucugugccccuucggcgagguguucaaugccaccagauucgccucuguguacgccuggaaccggaagcggaucagcaauugcguggccgacuacuccgugcuguacaacuccgccagcuucagcaccuucaagugcuacggcguguccccuaccaagcugaacgaccugugcuucacaaacguguacgccgacagcuucgugauccggggagaugaagugcggcagauugccccuggacagacaggcaccaucgccgacuacaacuacaagcugcccgacgacuucaccggcugugugauugccuggaacagcaacaaccuggacuccaaagucggcggcaacuacaauuaccuguaccggcuguuccggaaguccaaucugaagcccuucgagcgggacaucagcaccgaaaucuaucaggccggcagcaccccuugcaacggcgugaagggcuucaacugcuacuucccacugcaguccuacggcuuucagcccacauacggcgugggcuaucagcccuacagagugguggugcugagcuucgaacugcugcaugcuccugccacagugugcggcccuaagaaaagcaccaaucucgugaagaacaaaugcgugaacuucaacuucaacggccugaccggcaccggcgugcugacagagagcaacaagaaguuccugccauuccagcaguuuggccgggauaucgccgauaccacagacgccguuagagauccccagacacuggaaauccuggacaucaccccaugcagcuucggcggagugucugugaucaccccuggcaccaacaccagcaaucagguggcagugcuguaccagggcgugaacuguaccgaagugcccguggccauucacgccgaucagcugacaccuacauggcggguguacuccaccggcagcaauguguuucagaccagagccggcugucugaucggagccgaguacgugaacaauagcuacgagugcgacauccccaucggcgcuggcaucugugccagcuaccagacacagacaaacagccccagacgggcuagaagcguggccagccagagcaucauugccuacacaaugucucugggcgccgagaacagcguggccuacuccaacaacucuaucgcuauccccaccaacuucaccaucagcgugaccaccgagauccugccuguguccaugaccaagaccagcguggacugcaccauguacaucugcggcgauuccaccgagugcuccaaccugcugcugcaguacggcagcuucugcacccagcugaauagagcccugacagggaucgccguggaacaggacaagaacacccaagagguguucgcccaagugaagcaaaucuacaagaccccuccuaucaaggacuucggcggcuucaauuucagccagauucugcccgauccuagcaagcccagcaagcggagcuucaucgaggaccugcuguucaacaaagugacacuggccgacgccggcuucaucaagcaguauggcgauugucugggcgacauugccgccagggaucugauuugcgcccagaaguuuaacggacugacagugcugccuccucugcugaccgaugagaugaucgcccaguacacaucugcccugcuggccggcacaaucacaagcggcuggacauuuggagcuggcgccgcucugcagauccccuuugcuaugcagauggccuaccgguucaacggcaucggagugacccagaaugugcuguacgagaaccagaagcugaucgccaaccaguucaacagcgccaucggcaagauccaggacagccugagcagcacagcaagcgcccugggaaagcugcaggacguggucaaccagaaugcccaggcacugaacacccuggucaagcagcuguccuccaacuucggcgccaucagcucugugcugaacgauauccugagcagacuggacaaggucgaggccgaggugcagaucgacagacugaucacaggcagacugcagagccuccagacauacgugacccagcagcugaucagagccgccgagauuagagccucugccaaucuggccgccaucaagaugucugagugugugcugggccagagcaagagaguggacuuuugcggcaagggcuaccaccugaugagcuucccucagucugccccucacggcgugguguuucugcacgugacauaugugcccgcucaagagaagaauuucaccaccgcuccagccaucugccacgacggcaaagcccacuuuccuagagaaggcguguucguguccaacggcacccauugguucgugacacagcggaacuucuacgagccccagaucaucaccaccgacaacaccuucgugucuggcaacugcgacguugugaucggcauugugaacaauaccguguacgacccucugcagcccgagcuggacagcuucaaagaggaacuggacaaguacuuuaagaaccacacaagccccgacguggaccugggcgauaucagcggaaucaaugccagcgucgugaacauccagaaagagaucgaccggcugaacgagguggccaagaaucugaacgagagccugaucgaccugcaagaacuggggaaguacgagcaguacaucaaguggcccugguacaucuggcugggcuuuaucgccggacugauugccaucgugauggucacaaucaugcuguguugcaugaccagcugcuguagcugccugaagggcuguuguagcuguggcagcugcugcaaguucgacgaggacgauucugagcccgugcugaagggcgugaaacugcacuacaccuga

SEQ ID NO: 23058 - RNA, 3822 nt, Artificial Sequence
  SARS-CoV-2/Wuhan/WIV05/2019__EPI_ISL_402128 spike protein CDS gc mod (1-1273)(S13I_W152C_L452R_D614G)
auguucguguuucuggugcugcugccccugguguccauccagugugugaaccugaccaccagaacacagcugccuccagccuacaccaacagcuucaccagaggcguguacuaccccgacaagguguucagauccagcgugcugcacucuacccaggaccuguuccugccuuucuucagcaacgugaccugguuccacgccauccacguguccggcaccaauggcaccaagagauucgacaaccccgugcugcccuucaacgacgggguguacuuugccagcaccgagaaguccaacaucaucagaggcuggaucuucggcaccacacuggacagcaagacccagagccugcugaucgugaacaacgccaccaacguggucaucaaagugugcgaguuccaguucugcaacgaccccuuccugggcgucuacuaccacaagaacaacaagagcugcauggaaagcgaguuccggguguacagcagcgccaacaacugcaccuucgaguacgugucccagccuuuccugauggaccuggaaggcaagcagggcaacuucaagaaccugcgcgaguucguguucaagaacaucgacggcuacuucaaaaucuacagcaagcacaccccuaucaaccucgugcgggaucugccucagggcuucucugcucuggaaccccugguggaucugcccaucggcaucaacaucacccgguuucagacacugcuggcccugcacagaagcuaccugacaccuggcgauagcagcagcggauggacagcuggugccgccgcuuacuaugugggcuaccugcagccuagaaccuuccugcugaaguacaacgagaacggcaccaucaccgacgccguggauugugcucuggauccucugagcgagacaaagugcacccugaaguccuucaccguggaaaagggcaucuaccagaccagcaacuuccgggugcagcccaccgaauccaucgugcgguuccccaauaucaccaaucugugccccuucggcgagguguucaaugccaccagauucgccucuguguacgccuggaaccggaagcggaucagcaauugcguggccgacuacuccgugcuguacaacuccgccagcuucagcaccuucaagugcuacggcguguccccuaccaagcugaacgaccugugcuucacaaacguguacgccgacagcuucgugauccggggagaugaagugcggcagauugccccuggacagacaggcaagaucgccgacuacaacuacaagcugcccgacgacuucaccggcugugugauugccuggaacagcaacaaccuggacuccaaagucggcggcaacuacaauuaccgcuaccggcuguuccggaaguccaaucugaagcccuucgagcgggacaucagcaccgaaaucuaucaggccggcagcaccccuugcaacggcguggaaggcuucaacugcuacuucccacugcaguccuacggcuuucagcccacaaauggcgugggcuaucagcccuacagagugguggugcugagcuucgaacugcugcaugcuccugccacagugugcggcccuaagaaaagcaccaaucucgugaagaacaaaugcgugaacuucaacuucaacggccugaccggcaccggcgugcugacagagagcaacaagaaguuccugccauuccagcaguuuggccgggauaucgccgauaccacagacgccguuagagauccccagacacuggaaauccuggacaucaccccaugcagcuucggcggagugucugugaucaccccuggcaccaacaccagcaaucagguggcagugcuguaccagggcgugaacuguaccgaagugcccguggccauucacgccgaucagcugacaccuacauggcggguguacuccaccggcagcaauguguuucagaccagagccggcugucugaucggagccgagcacgugaacaauagcuacgagugcgacauccccaucggcgcuggcaucugugccagcuaccagacacagacaaacagccccagacgggcuagaagcguggccagccagagcaucauugccuacacaaugucucugggcgccgagaacagcguggccuacuccaacaacucuaucgcuauccccaccaacuucaccaucagcgugaccaccgagauccugccuguguccaugaccaagaccagcguggacugcaccauguacaucugcggcgauuccaccgagugcuccaaccugcugcugcaguacggcagcuucugcacccagcugaauagagcccugacagggaucgccguggaacaggacaagaacacccaagagguguucgcccaagugaagcaaaucuacaagaccccuccuaucaaggacuucggcggcuucaauuucagccagauucugcccgauccuagcaagcccagcaagcggagcuucaucgaggaccugcuguucaacaaagugacacuggccgacgccggcuucaucaagcaguauggcgauugucugggcgacauugccgccagggaucugauuugcgcccagaaguuuaacggacugacagugcugccuccucugcugaccgaugagaugaucgcccaguacacaucugcccugcuggccggcacaaucacaagcggcuggacauuuggagcuggcgccgcucugcagauccccuuugcuaugcagauggccuaccgguucaacggcaucggagugacccagaaugugcuguacgagaaccagaagcugaucgccaaccaguucaacagcgccaucggcaagauccaggacagccugagcagcacagcaagcgcccugggaaagcugcaggacguggucaaccagaaugcccaggcacugaacacccuggucaagcagcuguccuccaacuucggcgccaucagcucugugcugaacgauauccugagcagacuggacaaggucgaggccgaggugcagaucgacagacugaucacaggcagacugcagagccuccagacauacgugacccagcagcugaucagagccgccgagauuagagccucugccaaucuggccgccaccaagaugucugagugugugcugggccagagcaagagaguggacuuuugcggcaagggcuaccaccugaugagcuucccucagucugccccucacggcgugguguuucugcacgugacauaugugcccgcucaagagaagaauuucaccaccgcuccagccaucugccacgacggcaaagcccacuuuccuagagaaggcguguucguguccaacggcacccauugguucgugacacagcggaacuucuacgagccccagaucaucaccaccgacaacaccuucgugucuggcaacugcgacguugugaucggcauugugaacaauaccguguacgacccucugcagcccgagcuggacagcuucaaagaggaacuggacaaguacuuuaagaaccacacaagccccgacguggaccugggcgauaucagcggaaucaaugccagcgucgugaacauccagaaagagaucgaccggcugaacgagguggccaagaaucugaacgagagccugaucgaccugcaagaacuggggaaguacgagcaguacaucaaguggcccugguacaucuggcugggcuuuaucgccggacugauugccaucgugauggucacaaucaugcuguguugcaugaccagcugcuguagcugccugaagggcuguuguagcuguggcagcugcugcaaguucgacgaggacgauucugagcccgugcugaagggcgugaaacugcacuacaccuga

SEQ ID NO: 23059 - RNA, 3822 nt, Artificial Sequence
  SARS-CoV-2/Wuhan/WIV05/2019__EPI_ISL_402128 spike protein CDS gc mod (1-1273)
auguucguguuccuggugcugcugccucugguguccagccagugugugaaccugaccaccagaacacagcugccuccagccuacaccaacagcuuuaccagaggcguguacuaccccgacaagguguucagauccagcgugcugcacucuacccaggaccuguuccugccuuucuucagcaacgugaccugguuccacgccauccacguguccggcaccaauggcaccaagagauucgacaaccccgugcugcccuucaacgacgggguguacuuugccagcaccgagaaguccaacaucaucagaggcuggaucuucggcaccacacuggacagcaagacccagagccugcugaucgugaacaacgccaccaacguggucaucaaagugugcgaguuccaguucugcaacgaccccuuccugggcgucuacuaccacaagaacaacaagagcuggauggaaagcgaguuccggguguacagcagcgccaacaacugcaccuucgaguacgugucccagccuuuccugauggaccuggaaggcaagcagggcaacuucaagaaccugcgcgaguucguguuuaagaacaucgacggcuacuucaagaucuacagcaagcacaccccuaucaaccucgugcgggaucugccucagggcuucucugcucuggaaccccugguggaucugcccaucggcaucaacaucacccgguuucagacacugcuggcccugcacagaagcuaccugacaccuggcgauagcagcagcggauggacagcuggugccgccgcuuacuaugugggcuaccugcagccuagaaccuuccugcugaaguacaacgagaacggcaccaucaccgacgccguggauugugcucuggauccucugagcgagacaaagugcacccugaaguccuucaccguggaaaagggcaucuaccagaccagcaacuuccgggugcagcccaccgaauccaucgugcgguuccccaauaucaccaaucugugccccuucggcgagguguucaaugccaccagauucgccucuguguacgccuggaaccggaagcggaucagcaauugcguggccgacuacuccgugcuguacaacuccgccagcuucagcaccuucaagugcuacggcguguccccuaccaagcugaacgaccugugcuucacaaacguguacgccgacagcuucgugauccggggagaugaagugcggcagauugccccuggacagacaggcaagaucgccgacuacaacuacaagcugcccgacgacuucaccggcugugugauugccuggaacagcaacaaccuggacuccaaagucggcggcaacuacaauuaccuguaccggcuguuccggaaguccaaucugaagcccuucgagcgggacaucuccaccgagaucuaucaggccggcagcaccccuuguaacggcguggaaggcuucaacugcuacuucccacugcaguccuacggcuuucagcccacaaauggcgugggcuaucagcccuacagagugguggugcugagcuucgaacugcugcaugccccugccacagugugcggcccuaagaaaagcaccaaucucgugaagaacaaaugcgugaacuucaacuucaacggccugaccggcaccggcgugcugacagagagcaacaagaaguuccugccauuccagcaguuuggccgggauaucgccgauaccacagacgccguuagagauccccagacacuggaaauccuggacaucaccccuugcagcuucggcggagugucugugaucaccccuggcaccaacaccagcaaucagguggcagugcuguaccaggacgugaacuguaccgaagugcccguggccauucacgccgaucagcugacaccuacauggcggguguacuccaccggcagcaauguguuucagaccagagccggcugucugaucggagccgagcacgugaacaauagcuacgagugcgacauccccaucggcgcuggaaucugcgccagcuaccagacacagacaaacagcccucggagagccagaagcguggccagccagagcaucauugccuacacaaugucucugggcgccgagaacagcguggccuacuccaacaacucuaucgcuauccccaccaacuucaccaucagcgugaccacagagauccugccuguguccaugaccaagaccagcguggacugcaccauguacaucugcggcgauuccaccgagugcuccaaccugcugcugcaguacggcagcuucugcacccagcugaauagagcccugacagggaucgccguggaacaggacaagaacacccaagagguguucgcccaagugaagcagaucuacaagaccccuccuaucaaggacuucggcggcuucaauuucagccagauucugcccgauccuagcaagcccagcaagcggagcuucaucgaggaccugcuguucaacaaagugacacuggccgacgccggcuucaucaagcaguauggcgauugucugggcgacauugccgccagggaucugauuugcgcccagaaguuuaacggacugacagugcugccuccucugcugaccgaugagaugaucgcccaguacacaucugcccugcuggccggcacaaucacaagcggcuggacauuuggagcaggcgccgcucugcagauccccuuugcuaugcagauggccuaccgguucaacggcaucggagugacccagaaugugcuguacgagaaccagaagcugaucgccaaccaguucaacagcgccaucggcaagauccaggacagccugagcagcacagcaagcgcccugggaaagcugcaggacguggucaaccagaaugcccaggcacugaacacccuggucaagcagcuguccuccaacuucggcgccaucagcucugugcugaacgauauccugagcagacuggacaaggucgaggccgaggugcagaucgacagacugaucacaggcagacugcagagccuccagacauacgugacccagcagcugaucagagccgccgagauuagagccucugccaaucuggccgccaccaagaugucugagugugugcugggccagagcaagagaguggacuuuugcggcaagggcuaccaccugaugagcuucccucagucugccccucacggcgugguguuucugcacgugacauaugugcccgcucaagagaagaauuucaccaccgcuccagccaucugccacgacggcaaagcccacuuuccuagagaaggcguguucguguccaacggcacccauugguucgugacacagcggaacuucuacgagccccagaucaucaccaccgacaacaccuucgugucuggcaacugcgacgucgugaucggcauugugaacaauaccguguacgacccucugcagcccgagcuggacagcuucaaagaggaacuggacaaguacuuuaagaaccacacaagccccgacguggaccugggcgauaucagcggaaucaaugccagcgucgugaacauccagaaagagaucgaccggcugaacgagguggccaagaaucugaacgagagccugaucgaccugcaagaacuggggaaguacgagcaguacaucaaguggcccugguacaucuggcugggcuuuaucgccggacugauugccaucgugauggucacaaucaugcuguguugcaugaccagcugcuguagcugccugaagggcuguuguagcuguggcagcugcugcaaguucgacgaggacgauucugagcccgugcugaagggcgugaaacugcacuacacauga

SEQ ID NO: 23060 - RNA, 3822 nt, Artificial Sequence
  SARS-CoV-2/Wuhan/WIV05/2019__EPI_ISL_402128 spike protein CDS gc mod (1-1273)(D614G)
auguucguguuccuggugcugcugccucugguguccagccagugugugaaccugaccaccagaacacagcugccuccagccuacaccaacagcuuuaccagaggcguguacuaccccgacaagguguucagauccagcgugcugcacucuacccaggaccuguuccugccuuucuucagcaacgugaccugguuccacgccauccacguguccggcaccaauggcaccaagagauucgacaaccccgugcugcccuucaacgacgggguguacuuugccagcaccgagaaguccaacaucaucagaggcuggaucuucggcaccacacuggacagcaagacccagagccugcugaucgugaacaacgccaccaacguggucaucaaagugugcgaguuccaguucugcaacgaccccuuccugggcgucuacuaccacaagaacaacaagagcuggauggaaagcgaguuccggguguacagcagcgccaacaacugcaccuucgaguacgugucccagccuuuccugauggaccuggaaggcaagcagggcaacuucaagaaccugcgcgaguucguguuuaagaacaucgacggcuacuucaagaucuacagcaagcacaccccuaucaaccucgugcgggaucugccucagggcuucucugcucuggaaccccugguggaucugcccaucggcaucaacaucacccgguuucagacacugcuggcccugcacagaagcuaccugacaccuggcgauagcagcagcggauggacagcuggugccgccgcuuacuaugugggcuaccugcagccuagaaccuuccugcugaaguacaacgagaacggcaccaucaccgacgccguggauugugcucuggauccucugagcgagacaaagugcacccugaaguccuucaccguggaaaagggcaucuaccagaccagcaacuuccgggugcagcccaccgaauccaucgugcgguuccccaauaucaccaaucugugccccuucggcgagguguucaaugccaccagauucgccucuguguacgccuggaaccggaagcggaucagcaauugcguggccgacuacuccgugcuguacaacuccgccagcuucagcaccuucaagugcuacggcguguccccuaccaagcugaacgaccugugcuucacaaacguguacgccgacagcuucgugauccggggagaugaagugcggcagauugccccuggacagacaggcaagaucgccgacuacaacuacaagcugcccgacgacuucaccggcugugugauugccuggaacagcaacaaccuggacuccaaagucggcggcaacuacaauuaccuguaccggcuguuccggaaguccaaucugaagcccuucgagcgggacaucuccaccgagaucuaucaggccggcagcaccccuuguaacggcguggaaggcuucaacugcuacuucccacugcaguccuacggcuuucagcccacaaauggcgugggcuaucagcccuacagagugguggugcugagcuucgaacugcugcaugccccugccacagugugcggcccuaagaaaagcaccaaucucgugaagaacaaaugcgugaacuucaacuucaacggccugaccggcaccggcgugcugacagagagcaacaagaaguuccugccauuccagcaguuuggccgggauaucgccgauaccacagacgccguuagagauccccagacacuggaaauccuggacaucaccccuugcagcuucggcggagugucugugaucaccccuggcaccaacaccagcaaucagguggcagugcuguaccagggcgugaacuguaccgaagugcccguggccauucacgccgaucagcugacaccuacauggcggguguacuccaccggcagcaauguguuucagaccagagccggcugucugaucggagccgagcacgugaacaauagcuacgagugcgacauccccaucggcgcuggaaucugcgccagcuaccagacacagacaaacagcccucggagagccagaagcguggccagccagagcaucauugccuacacaaugucucugggcgccgagaacagcguggccuacuccaacaacucuaucgcuauccccaccaacuucaccaucagcgugaccacagagauccugccuguguccaugaccaagaccagcguggacugcaccauguacaucugcggcgauuccaccgagugcuccaaccugcugcugcaguacggcagcuucugcacccagcugaauagagcccugacagggaucgccguggaacaggacaagaacacccaagagguguucgcccaagugaagcagaucuacaagaccccuccuaucaaggacuucggcggcuucaauuucagccagauucugcccgauccuagcaagcccagcaagcggagcuucaucgaggaccugcuguucaacaaagugacacuggccgacgccggcuucaucaagcaguauggcgauugucugggcgacauugccgccagggaucugauuugcgcccagaaguuuaacggacugacagugcugccuccucugcugaccgaugagaugaucgcccaguacacaucugcccugcuggccggcacaaucacaagcggcuggacauuuggagcaggcgccgcucugcagauccccuuugcuaugcagauggccuaccgguucaacggcaucggagugacccagaaugugcuguacgagaaccagaagcugaucgccaaccaguucaacagcgccaucggcaagauccaggacagccugagcagcacagcaagcgcccugggaaagcugcaggacguggucaaccagaaugcccaggcacugaacacccuggucaagcagcuguccuccaacuucggcgccaucagcucugugcugaacgauauccugagcagacuggacaaggucgaggccgaggugcagaucgacagacugaucacaggcagacugcagagccuccagacauacgugacccagcagcugaucagagccgccgagauuagagccucugccaaucuggccgccaccaagaugucugagugugugcugggccagagcaagagaguggacuuuugcggcaagggcuaccaccugaugagcuucccucagucugccccucacggcgugguguuucugcacgugacauaugugcccgcucaagagaagaauuucaccaccgcuccagccaucugccacgacggcaaagcccacuuuccuagagaaggcguguucguguccaacggcacccauugguucgugacacagcggaacuucuacgagccccagaucaucaccaccgacaacaccuucgugucuggcaacugcgacgucgugaucggcauugugaacaauaccguguacgacccucugcagcccgagcuggacagcuucaaagaggaacuggacaaguacuuuaagaaccacacaagccccgacguggaccugggcgauaucagcggaaucaaugccagcgucgugaacauccagaaagagaucgaccggcugaacgagguggccaagaaucugaacgagagccugaucgaccugcaagaacuggggaaguacgagcaguacaucaaguggcccugguacaucuggcugggcuuuaucgccggacugauugccaucgugauggucacaaucaugcuguguugcaugaccagcugcuguagcugccugaagggcuguuguagcuguggcagcugcugcaaguucgacgaggacgauucugagcccgugcugaagggcgugaaacugcacuacacauga

SEQ ID NO: 23061 - RNA, 3822 nt, Artificial Sequence
  SARS-CoV-2/Wuhan/WIV05/2019__EPI_ISL_402128 spike protein CDS gc mod (1-1273)(A222V_D614G)
auguucguguuccuggugcugcugccucugguguccagccagugugugaaccugaccaccagaacacagcugccuccagccuacaccaacagcuuuaccagaggcguguacuaccccgacaagguguucagauccagcgugcugcacucuacccaggaccuguuccugccuuucuucagcaacgugaccugguuccacgccauccacguguccggcaccaauggcaccaagagauucgacaaccccgugcugcccuucaacgacgggguguacuuugccagcaccgagaaguccaacaucaucagaggcuggaucuucggcaccacacuggacagcaagacccagagccugcugaucgugaacaacgccaccaacguggucaucaaagugugcgaguuccaguucugcaacgaccccuuccugggcgucuacuaccacaagaacaacaagagcuggauggaaagcgaguuccggguguacagcagcgccaacaacugcaccuucgaguacgugucccagccuuuccugauggaccuggaaggcaagcagggcaacuucaagaaccugcgcgaguucguguuuaagaacaucgacggcuacuucaagaucuacagcaagcacaccccuaucaaccucgugcgggaucugccucagggcuucucugugcuggaaccccugguggaucugcccaucggcaucaacaucacccgguuucagacacugcuggcccugcacagaagcuaccugacaccuggcgauagcagcagcggauggacagcuggugccgccgcuuacuaugugggcuaccugcagccuagaaccuuccugcugaaguacaacgagaacggcaccaucaccgacgccguggauugugcucuggauccucugagcgagacaaagugcacccugaaguccuucaccguggaaaagggcaucuaccagaccagcaacuuccgggugcagcccaccgaauccaucgugcgguuccccaauaucaccaaucugugccccuucggcgagguguucaaugccaccagauucgccucuguguacgccuggaaccggaagcggaucagcaauugcguggccgacuacuccgugcuguacaacuccgccagcuucagcaccuucaagugcuacggcguguccccuaccaagcugaacgaccugugcuucacaaacguguacgccgacagcuucgugauccggggagaugaagugcggcagauugccccuggacagacaggcaagaucgccgacuacaacuacaagcugcccgacgacuucaccggcugugugauugccuggaacagcaacaaccuggacuccaaagucggcggcaacuacaauuaccuguaccggcuguuccggaaguccaaucugaagcccuucgagcgggacaucuccaccgagaucuaucaggccggcagcaccccuuguaacggcguggaaggcuucaacugcuacuucccacugcaguccuacggcuuucagcccacaaauggcgugggcuaucagcccuacagagugguggugcugagcuucgaacugcugcaugccccugccacagugugcggcccuaagaaaagcaccaaucucgugaagaacaaaugcgugaacuucaacuucaacggccugaccggcaccggcgugcugacagagagcaacaagaaguuccugccauuccagcaguuuggccgggauaucgccgauaccacagacgccguuagagauccccagacacuggaaauccuggacaucaccccuugcagcuucggcggagugucugugaucaccccuggcaccaacaccagcaaucagguggcagugcuguaccagggcgugaacuguaccgaagugcccguggccauucacgccgaucagcugacaccuacauggcggguguacuccaccggcagcaauguguuucagaccagagccggcugucugaucggagccgagcacgugaacaauagcuacgagugcgacauccccaucggcgcuggaaucugcgccagcuaccagacacagacaaacagcccucggagagccagaagcguggccagccagagcaucauugccuacacaaugucucugggcgccgagaacagcguggccuacuccaacaacucuaucgcuauccccaccaacuucaccaucagcgugaccacagagauccugccuguguccaugaccaagaccagcguggacugcaccauguacaucugcggcgauuccaccgagugcuccaaccugcugcugcaguacggcagcuucugcacccagcugaauagagcccugacagggaucgccguggaacaggacaagaacacccaagagguguucgcccaagugaagcagaucuacaagaccccuccuaucaaggacuucggcggcuucaauuucagccagauucugcccgauccuagcaagcccagcaagcggagcuucaucgaggaccugcuguucaacaaagugacacuggccgacgccggcuucaucaagcaguauggcgauugucugggcgacauugccgccagggaucugauuugcgcccagaaguuuaacggacugacagugcugccuccucugcugaccgaugagaugaucgcccaguacacaucugcccugcuggccggcacaaucacaagcggcuggacauuuggagcaggcgccgcucugcagauccccuuugcuaugcagauggccuaccgguucaacggcaucggagugacccagaaugugcuguacgagaaccagaagcugaucgccaaccaguucaacagcgccaucggcaagauccaggacagccugagcagcacagcaagcgcccugggaaagcugcaggacguggucaaccagaaugcccaggcacugaacacccuggucaagcagcuguccuccaacuucggcgccaucagcucugugcugaacgauauccugagcagacuggacaaggucgaggccgaggugcagaucgacagacugaucacaggcagacugcagagccuccagacauacgugacccagcagcugaucagagccgccgagauuagagccucugccaaucuggccgccaccaagaugucugagugugugcugggccagagcaagagaguggacuuuugcggcaagggcuaccaccugaugagcuucccucagucugccccucacggcgugguguuucugcacgugacauaugugcccgcucaagagaagaauuucaccaccgcuccagccaucugccacgacggcaaagcccacuuuccuagagaaggcguguucguguccaacggcacccauugguucgugacacagcggaacuucuacgagccccagaucaucaccaccgacaacaccuucgugucuggcaacugcgacgucgugaucggcauugugaacaauaccguguacgacccucugcagcccgagcuggacagcuucaaagaggaacuggacaaguacuuuaagaaccacacaagccccgacguggaccugggcgauaucagcggaaucaaugccagcgucgugaacauccagaaagagaucgaccggcugaacgagguggccaagaaucugaacgagagccugaucgaccugcaagaacuggggaaguacgagcaguacaucaaguggcccugguacaucuggcugggcuuuaucgccggacugauugccaucgugauggucacaaucaugcuguguugcaugaccagcugcuguagcugccugaagggcuguuguagcuguggcagcugcugcaaguucgacgaggacgauucugagcccgugcugaagggcgugaaacugcacuacacauga

SEQ ID NO: 23062 - RNA, 3822 nt, Artificial Sequence
  SARS-CoV-2/Wuhan/WIV05/2019__EPI_ISL_402128 spike protein CDS gc mod (1-1273)(N439K_D614G)
auguucguguuccuggugcugcugccucugguguccagccagugugugaaccugaccaccagaacacagcugccuccagccuacaccaacagcuuuaccagaggcguguacuaccccgacaagguguucagauccagcgugcugcacucuacccaggaccuguuccugccuuucuucagcaacgugaccugguuccacgccauccacguguccggcaccaauggcaccaagagauucgacaaccccgugcugcccuucaacgacgggguguacuuugccagcaccgagaaguccaacaucaucagaggcuggaucuucggcaccacacuggacagcaagacccagagccugcugaucgugaacaacgccaccaacguggucaucaaagugugcgaguuccaguucugcaacgaccccuuccugggcgucuacuaccacaagaacaacaagagcuggauggaaagcgaguuccggguguacagcagcgccaacaacugcaccuucgaguacgugucccagccuuuccugauggaccuggaaggcaagcagggcaacuucaagaaccugcgcgaguucguguuuaagaacaucgacggcuacuucaagaucuacagcaagcacaccccuaucaaccucgugcgggaucugccucagggcuucucugcucuggaaccccugguggaucugcccaucggcaucaacaucacccgguuucagacacugcuggcccugcacagaagcuaccugacaccuggcgauagcagcagcggauggacagcuggugccgccgcuuacuaugugggcuaccugcagccuagaaccuuccugcugaaguacaacgagaacggcaccaucaccgacgccguggauugugcucuggauccucugagcgagacaaagugcacccugaaguccuucaccguggaaaagggcaucuaccagaccagcaacuuccgggugcagcccaccgaauccaucgugcgguuccccaauaucaccaaucugugccccuucggcgagguguucaaugccaccagauucgccucuguguacgccuggaaccggaagcggaucagcaauugcguggccgacuacuccgugcuguacaacuccgccagcuucagcaccuucaagugcuacggcguguccccuaccaagcugaacgaccugugcuucacaaacguguacgccgacagcuucgugauccggggagaugaagugcggcagauugccccuggacagacaggcaagaucgccgacuacaacuacaagcugcccgacgacuucaccggcugugugauugccuggaacagcaagaaccuggacuccaaagucggcggcaacuacaauuaccuguaccggcuguuccggaaguccaaucugaagcccuucgagcgggacaucuccaccgagaucuaucaggccggcagcaccccuuguaacggcguggaaggcuucaacugcuacuucccacugcaguccuacggcuuucagcccacaaauggcgugggcuaucagcccuacagagugguggugcugagcuucgaacugcugcaugccccugccacagugugcggcccuaagaaaagcaccaaucucgugaagaacaaaugcgugaacuucaacuucaacggccugaccggcaccggcgugcugacagagagcaacaagaaguuccugccauuccagcaguuuggccgggauaucgccgauaccacagacgccguuagagauccccagacacuggaaauccuggacaucaccccuugcagcuucggcggagugucugugaucaccccuggcaccaacaccagcaaucagguggcagugcuguaccagggcgugaacuguaccgaagugcccguggccauucacgccgaucagcugacaccuacauggcggguguacuccaccggcagcaauguguuucagaccagagccggcugucugaucggagccgagcacgugaacaauagcuacgagugcgacauccccaucggcgcuggaaucugcgccagcuaccagacacagacaaacagcccucggagagccagaagcguggccagccagagcaucauugccuacacaaugucucugggcgccgagaacagcguggccuacuccaacaacucuaucgcuauccccaccaacuucaccaucagcgugaccacagagauccugccuguguccaugaccaagaccagcguggacugcaccauguacaucugcggcgauuccaccgagugcuccaaccugcugcugcaguacggcagcuucugcacccagcugaauagagcccugacagggaucgccguggaacaggacaagaacacccaagagguguucgcccaagugaagcagaucuacaagaccccuccuaucaaggacuucggcggcuucaauuucagccagauucugcccgauccuagcaagcccagcaagcggagcuucaucgaggaccugcuguucaacaaagugacacuggccgacgccggcuucaucaagcaguauggcgauugucugggcgacauugccgccagggaucugauuugcgcccagaaguuuaacggacugacagugcugccuccucugcugaccgaugagaugaucgcccaguacacaucugcccugcuggccggcacaaucacaagcggcuggacauuuggagcaggcgccgcucugcagauccccuuugcuaugcagauggccuaccgguucaacggcaucggagugacccagaaugugcuguacgagaaccagaagcugaucgccaaccaguucaacagcgccaucggcaagauccaggacagccugagcagcacagcaagcgcccugggaaagcugcaggacguggucaaccagaaugcccaggcacugaacacccuggucaagcagcuguccuccaacuucggcgccaucagcucugugcugaacgauauccugagcagacuggacaaggucgaggccgaggugcagaucgacagacugaucacaggcagacugcagagccuccagacauacgugacccagcagcugaucagagccgccgagauuagagccucugccaaucuggccgccaccaagaugucugagugugugcugggccagagcaagagaguggacuuuugcggcaagggcuaccaccugaugagcuucccucagucugccccucacggcgugguguuucugcacgugacauaugugcccgcucaagagaagaauuucaccaccgcuccagccaucugccacgacggcaaagcccacuuuccuagagaaggcguguucguguccaacggcacccauugguucgugacacagcggaacuucuacgagccccagaucaucaccaccgacaacaccuucgugucuggcaacugcgacgucgugaucggcauugugaacaauaccguguacgacccucugcagcccgagcuggacagcuucaaagaggaacuggacaaguacuuuaagaaccacacaagccccgacguggaccugggcgauaucagcggaaucaaugccagcgucgugaacauccagaaagagaucgaccggcugaacgagguggccaagaaucugaacgagagccugaucgaccugcaagaacuggggaaguacgagcaguacaucaaguggcccugguacaucuggcugggcuuuaucgccggacugauugccaucgugauggucacaaucaugcuguguugcaugaccagcugcuguagcugccugaagggcuguuguagcuguggcagcugcugcaaguucgacgaggacgauucugagcccgugcugaagggcgugaaacugcacuacacauga

SEQ ID NO: 23063 - RNA, 3822 nt, Artificial Sequence
  SARS-CoV-2/Wuhan/WIV05/2019__EPI_ISL_402128 spike protein CDS gc mod (1-1273)(S477N_D614G)
auguucguguuccuggugcugcugccucugguguccagccagugugugaaccugaccaccagaacacagcugccuccagccuacaccaacagcuuuaccagaggcguguacuaccccgacaagguguucagauccagcgugcugcacucuacccaggaccuguuccugccuuucuucagcaacgugaccugguuccacgccauccacguguccggcaccaauggcaccaagagauucgacaaccccgugcugcccuucaacgacgggguguacuuugccagcaccgagaaguccaacaucaucagaggcuggaucuucggcaccacacuggacagcaagacccagagccugcugaucgugaacaacgccaccaacguggucaucaaagugugcgaguuccaguucugcaacgaccccuuccugggcgucuacuaccacaagaacaacaagagcuggauggaaagcgaguuccggguguacagcagcgccaacaacugcaccuucgaguacgugucccagccuuuccugauggaccuggaaggcaagcagggcaacuucaagaaccugcgcgaguucguguuuaagaacaucgacggcuacuucaagaucuacagcaagcacaccccuaucaaccucgugcgggaucugccucagggcuucucugcucuggaaccccugguggaucugcccaucggcaucaacaucacccgguuucagacacugcuggcccugcacagaagcuaccugacaccuggcgauagcagcagcggauggacagcuggugccgccgcuuacuaugugggcuaccugcagccuagaaccuuccugcugaaguacaacgagaacggcaccaucaccgacgccguggauugugcucuggauccucugagcgagacaaagugcacccugaaguccuucaccguggaaaagggcaucuaccagaccagcaacuuccgggugcagcccaccgaauccaucgugcgguuccccaauaucaccaaucugugccccuucggcgagguguucaaugccaccagauucgccucuguguacgccuggaaccggaagcggaucagcaauugcguggccgacuacuccgugcuguacaacuccgccagcuucagcaccuucaagugcuacggcguguccccuaccaagcugaacgaccugugcuucacaaacguguacgccgacagcuucgugauccggggagaugaagugcggcagauugccccuggacagacaggcaagaucgccgacuacaacuacaagcugcccgacgacuucaccggcugugugauugccuggaacagcaacaaccuggacuccaaagucggcggcaacuacaauuaccuguaccggcuguuccggaaguccaaucugaagcccuucgagcgggacaucuccaccgagaucuaucaggccggcaacaccccuuguaacggcguggaaggcuucaacugcuacuucccacugcaguccuacggcuuucagcccacaaauggcgugggcuaucagcccuacagagugguggugcugagcuucgaacugcugcaugccccugccacagugugcggcccuaagaaaagcaccaaucucgugaagaacaaaugcgugaacuucaacuucaacggccugaccggcaccggcgugcugacagagagcaacaagaaguuccugccauuccagcaguuuggccgggauaucgccgauaccacagacgccguuagagauccccagacacuggaaauccuggacaucaccccuugcagcuucggcggagugucugugaucaccccuggcaccaacaccagcaaucagguggcagugcuguaccagggcgugaacuguaccgaagugcccguggccauucacgccgaucagcugacaccuacauggcggguguacuccaccggcagcaauguguuucagaccagagccggcugucugaucggagccgagcacgugaacaauagcuacgagugcgacauccccaucggcgcuggaaucugcgccagcuaccagacacagacaaacagcccucggagagccagaagcguggccagccagagcaucauugccuacacaaugucucugggcgccgagaacagcguggccuacuccaacaacucuaucgcuauccccaccaacuucaccaucagcgugaccacagagauccugccuguguccaugaccaagaccagcguggacugcaccauguacaucugcggcgauuccaccgagugcuccaaccugcugcugcaguacggcagcuucugcacccagcugaauagagcccugacagggaucgccguggaacaggacaagaacacccaagagguguucgcccaagugaagcagaucuacaagaccccuccuaucaaggacuucggcggcuucaauuucagccagauucugcccgauccuagcaagcccagcaagcggagcuucaucgaggaccugcuguucaacaaagugacacuggccgacgccggcuucaucaagcaguauggcgauugucugggcgacauugccgccagggaucugauuugcgcccagaaguuuaacggacugacagugcugccuccucugcugaccgaugagaugaucgcccaguacacaucugcccugcuggccggcacaaucacaagcggcuggacauuuggagcaggcgccgcucugcagauccccuuugcuaugcagauggccuaccgguucaacggcaucggagugacccagaaugugcuguacgagaaccagaagcugaucgccaaccaguucaacagcgccaucggcaagauccaggacagccugagcagcacagcaagcgcccugggaaagcugcaggacguggucaaccagaaugcccaggcacugaacacccuggucaagcagcuguccuccaacuucggcgccaucagcucugugcugaacgauauccugagcagacuggacaaggucgaggccgaggugcagaucgacagacugaucacaggcagacugcagagccuccagacauacgugacccagcagcugaucagagccgccgagauuagagccucugccaaucuggccgccaccaagaugucugagugugugcugggccagagcaagagaguggacuuuugcggcaagggcuaccaccugaugagcuucccucagucugccccucacggcgugguguuucugcacgugacauaugugcccgcucaagagaagaauuucaccaccgcuccagccaucugccacgacggcaaagcccacuuuccuagagaaggcguguucguguccaacggcacccauugguucgugacacagcggaacuucuacgagccccagaucaucaccaccgacaacaccuucgugucuggcaacugcgacgucgugaucggcauugugaacaauaccguguacgacccucugcagcccgagcuggacagcuucaaagaggaacuggacaaguacuuuaagaaccacacaagccccgacguggaccugggcgauaucagcggaaucaaugccagcgucgugaacauccagaaagagaucgaccggcugaacgagguggccaagaaucugaacgagagccugaucgaccugcaagaacuggggaaguacgagcaguacaucaaguggcccugguacaucuggcugggcuuuaucgccggacugauugccaucgugauggucacaaucaugcuguguugcaugaccagcugcuguagcugccugaagggcuguuguagcuguggcagcugcugcaaguucgacgaggacgauucugagcccgugcugaagggcgugaaacugcacuacacauga

SEQ ID NO: 23064 - RNA, 3822 nt, Artificial Sequence
  SARS-CoV-2/Wuhan/WIV05/2019__EPI_ISL_402128 spike protein CDS gc mod (1-1273)(N501Y_D614G)
auguucguguuccuggugcugcugccucugguguccagccagugugugaaccugaccaccagaacacagcugccuccagccuacaccaacagcuuuaccagaggcguguacuaccccgacaagguguucagauccagcgugcugcacucuacccaggaccuguuccugccuuucuucagcaacgugaccugguuccacgccauccacguguccggcaccaauggcaccaagagauucgacaaccccgugcugcccuucaacgacgggguguacuuugccagcaccgagaaguccaacaucaucagaggcuggaucuucggcaccacacuggacagcaagacccagagccugcugaucgugaacaacgccaccaacguggucaucaaagugugcgaguuccaguucugcaacgaccccuuccugggcgucuacuaccacaagaacaacaagagcuggauggaaagcgaguuccggguguacagcagcgccaacaacugcaccuucgaguacgugucccagccuuuccugauggaccuggaaggcaagcagggcaacuucaagaaccugcgcgaguucguguuuaagaacaucgacggcuacuucaagaucuacagcaagcacaccccuaucaaccucgugcgggaucugccucagggcuucucugcucuggaaccccugguggaucugcccaucggcaucaacaucacccgguuucagacacugcuggcccugcacagaagcuaccugacaccuggcgauagcagcagcggauggacagcuggugccgccgcuuacuaugugggcuaccugcagccuagaaccuuccugcugaaguacaacgagaacggcaccaucaccgacgccguggauugugcucuggauccucugagcgagacaaagugcacccugaaguccuucaccguggaaaagggcaucuaccagaccagcaacuuccgggugcagcccaccgaauccaucgugcgguuccccaauaucaccaaucugugccccuucggcgagguguucaaugccaccagauucgccucuguguacgccuggaaccggaagcggaucagcaauugcguggccgacuacuccgugcuguacaacuccgccagcuucagcaccuucaagugcuacggcguguccccuaccaagcugaacgaccugugcuucacaaacguguacgccgacagcuucgugauccggggagaugaagugcggcagauugccccuggacagacaggcaagaucgccgacuacaacuacaagcugcccgacgacuucaccggcugugugauugccuggaacagcaacaaccuggacuccaaagucggcggcaacuacaauuaccuguaccggcuguuccggaaguccaaucugaagcccuucgagcgggacaucuccaccgagaucuaucaggccggcagcaccccuuguaacggcguggaaggcuucaacugcuacuucccacugcaguccuacggcuuucagcccacauacggcgugggcuaucagcccuacagagugguggugcugagcuucgaacugcugcaugccccugccacagugugcggcccuaagaaaagcaccaaucucgugaagaacaaaugcgugaacuucaacuucaacggccugaccggcaccggcgugcugacagagagcaacaagaaguuccugccauuccagcaguuuggccgggauaucgccgauaccacagacgccguuagagauccccagacacuggaaauccuggacaucaccccuugcagcuucggcggagugucugugaucaccccuggcaccaacaccagcaaucagguggcagugcuguaccagggcgugaacuguaccgaagugcccguggccauucacgccgaucagcugacaccuacauggcggguguacuccaccggcagcaauguguuucagaccagagccggcugucugaucggagccgagcacgugaacaauagcuacgagugcgacauccccaucggcgcuggaaucugcgccagcuaccagacacagacaaacagcccucggagagccagaagcguggccagccagagcaucauugccuacacaaugucucugggcgccgagaacagcguggccuacuccaacaacucuaucgcuauccccaccaacuucaccaucagcgugaccacagagauccugccuguguccaugaccaagaccagcguggacugcaccauguacaucugcggcgauuccaccgagugcuccaaccugcugcugcaguacggcagcuucugcacccagcugaauagagcccugacagggaucgccguggaacaggacaagaacacccaagagguguucgcccaagugaagcagaucuacaagaccccuccuaucaaggacuucggcggcuucaauuucagccagauucugcccgauccuagcaagcccagcaagcggagcuucaucgaggaccugcuguucaacaaagugacacuggccgacgccggcuucaucaagcaguauggcgauugucugggcgacauugccgccagggaucugauuugcgcccagaaguuuaacggacugacagugcugccuccucugcugaccgaugagaugaucgcccaguacacaucugcccugcuggccggcacaaucacaagcggcuggacauuuggagcaggcgccgcucugcagauccccuuugcuaugcagauggccuaccgguucaacggcaucggagugacccagaaugugcuguacgagaaccagaagcugaucgccaaccaguucaacagcgccaucggcaagauccaggacagccugagcagcacagcaagcgcccugggaaagcugcaggacguggucaaccagaaugcccaggcacugaacacccuggucaagcagcuguccuccaacuucggcgccaucagcucugugcugaacgauauccugagcagacuggacaaggucgaggccgaggugcagaucgacagacugaucacaggcagacugcagagccuccagacauacgugacccagcagcugaucagagccgccgagauuagagccucugccaaucuggccgccaccaagaugucugagugugugcugggccagagcaagagaguggacuuuugcggcaagggcuaccaccugaugagcuucccucagucugccccucacggcgugguguuucugcacgugacauaugugcccgcucaagagaagaauuucaccaccgcuccagccaucugccacgacggcaaagcccacuuuccuagagaaggcguguucguguccaacggcacccauugguucgugacacagcggaacuucuacgagccccagaucaucaccaccgacaacaccuucgugucuggcaacugcgacgucgugaucggcauugugaacaauaccguguacgacccucugcagcccgagcuggacagcuucaaagaggaacuggacaaguacuuuaagaaccacacaagccccgacguggaccugggcgauaucagcggaaucaaugccagcgucgugaacauccagaaagagaucgaccggcugaacgagguggccaagaaucugaacgagagccugaucgaccugcaagaacuggggaaguacgagcaguacaucaaguggcccugguacaucuggcugggcuuuaucgccggacugauugccaucgugauggucacaaucaugcuguguugcaugaccagcugcuguagcugccugaagggcuguuguagcuguggcagcugcugcaaguucgacgaggacgauucugagcccgugcugaagggcgugaaacugcacuacacauga

SEQ ID NO: 23065 - RNA, 3816 nt, Artificial Sequence
  SARS-CoV-2/Wuhan/WIV05/2019__EPI_ISL_402128 spike protein CDS gc mod (1-1273)(H69del_V70del_D614G)
auguucguguuccuggugcugcugccucugguguccagccagugugugaaccugaccaccagaacacagcugccuccagccuacaccaacagcuuuaccagaggcguguacuaccccgacaagguguucagauccagcgugcugcacucuacccaggaccuguuccugccuuucuucagcaacgugaccugguuccacgccaucuccggcaccaauggcaccaagagauucgacaaccccgugcugcccuucaacgacgggguguacuuugccagcaccgagaaguccaacaucaucagaggcuggaucuucggcaccacacuggacagcaagacccagagccugcugaucgugaacaacgccaccaacguggucaucaaagugugcgaguuccaguucugcaacgaccccuuccugggcgucuacuaccacaagaacaacaagagcuggauggaaagcgaguuccggguguacagcagcgccaacaacugcaccuucgaguacgugucccagccuuuccugauggaccuggaaggcaagcagggcaacuucaagaaccugcgcgaguucguguuuaagaacaucgacggcuacuucaagaucuacagcaagcacaccccuaucaaccucgugcgggaucugccucagggcuucucugcucuggaaccccugguggaucugcccaucggcaucaacaucacccgguuucagacacugcuggcccugcacagaagcuaccugacaccuggcgauagcagcagcggauggacagcuggugccgccgcuuacuaugugggcuaccugcagccuagaaccuuccugcugaaguacaacgagaacggcaccaucaccgacgccguggauugugcucuggauccucugagcgagacaaagugcacccugaaguccuucaccguggaaaagggcaucuaccagaccagcaacuuccgggugcagcccaccgaauccaucgugcgguuccccaauaucaccaaucugugccccuucggcgagguguucaaugccaccagauucgccucuguguacgccuggaaccggaagcggaucagcaauugcguggccgacuacuccgugcuguacaacuccgccagcuucagcaccuucaagugcuacggcguguccccuaccaagcugaacgaccugugcuucacaaacguguacgccgacagcuucgugauccggggagaugaagugcggcagauugccccuggacagacaggcaagaucgccgacuacaacuacaagcugcccgacgacuucaccggcugugugauugccuggaacagcaacaaccuggacuccaaagucggcggcaacuacaauuaccuguaccggcuguuccggaaguccaaucugaagcccuucgagcgggacaucuccaccgagaucuaucaggccggcagcaccccuuguaacggcguggaaggcuucaacugcuacuucccacugcaguccuacggcuuucagcccacaaauggcgugggcuaucagcccuacagagugguggugcugagcuucgaacugcugcaugccccugccacagugugcggcccuaagaaaagcaccaaucucgugaagaacaaaugcgugaacuucaacuucaacggccugaccggcaccggcgugcugacagagagcaacaagaaguuccugccauuccagcaguuuggccgggauaucgccgauaccacagacgccguuagagauccccagacacuggaaauccuggacaucaccccuugcagcuucggcggagugucugugaucaccccuggcaccaacaccagcaaucagguggcagugcuguaccagggcgugaacuguaccgaagugcccguggccauucacgccgaucagcugacaccuacauggcggguguacuccaccggcagcaauguguuucagaccagagccggcugucugaucggagccgagcacgugaacaauagcuacgagugcgacauccccaucggcgcuggaaucugcgccagcuaccagacacagacaaacagcccucggagagccagaagcguggccagccagagcaucauugccuacacaaugucucugggcgccgagaacagcguggccuacuccaacaacucuaucgcuauccccaccaacuucaccaucagcgugaccacagagauccugccuguguccaugaccaagaccagcguggacugcaccauguacaucugcggcgauuccaccgagugcuccaaccugcugcugcaguacggcagcuucugcacccagcugaauagagcccugacagggaucgccguggaacaggacaagaacacccaagagguguucgcccaagugaagcagaucuacaagaccccuccuaucaaggacuucggcggcuucaauuucagccagauucugcccgauccuagcaagcccagcaagcggagcuucaucgaggaccugcuguucaacaaagugacacuggccgacgccggcuucaucaagcaguauggcgauugucugggcgacauugccgccagggaucugauuugcgcccagaaguuuaacggacugacagugcugccuccucugcugaccgaugagaugaucgcccaguacacaucugcccugcuggccggcacaaucacaagcggcuggacauuuggagcaggcgccgcucugcagauccccuuugcuaugcagauggccuaccgguucaacggcaucggagugacccagaaugugcuguacgagaaccagaagcugaucgccaaccaguucaacagcgccaucggcaagauccaggacagccugagcagcacagcaagcgcccugggaaagcugcaggacguggucaaccagaaugcccaggcacugaacacccuggucaagcagcuguccuccaacuucggcgccaucagcucugugcugaacgauauccugagcagacuggacaaggucgaggccgaggugcagaucgacagacugaucacaggcagacugcagagccuccagacauacgugacccagcagcugaucagagccgccgagauuagagccucugccaaucuggccgccaccaagaugucugagugugugcugggccagagcaagagaguggacuuuugcggcaagggcuaccaccugaugagcuucccucagucugccccucacggcgugguguuucugcacgugacauaugugcccgcucaagagaagaauuucaccaccgcuccagccaucugccacgacggcaaagcccacuuuccuagagaaggcguguucguguccaacggcacccauugguucgugacacagcggaacuucuacgagccccagaucaucaccaccgacaacaccuucgugucuggcaacugcgacgucgugaucggcauugugaacaauaccguguacgacccucugcagcccgagcuggacagcuucaaagaggaacuggacaaguacuuuaagaaccacacaagccccgacguggaccugggcgauaucagcggaaucaaugccagcgucgugaacauccagaaagagaucgaccggcugaacgagguggccaagaaucugaacgagagccugaucgaccugcaagaacuggggaaguacgagcaguacaucaaguggcccugguacaucuggcugggcuuuaucgccggacugauugccaucgugauggucacaaucaugcuguguugcaugaccagcugcuguagcugccugaagggcuguuguagcuguggcagcugcugcaaguucgacgaggacgauucugagcccgugcugaagggcgugaaacugcacuacacauga

SEQ ID NO: 23066 - RNA, 3822 nt, Artificial Sequence
  SARS-CoV-2/Wuhan/WIV05/2019__EPI_ISL_402128 spike protein CDS gc mod (1-1273)(Y453F_D614G)
auguucguguuccuggugcugcugccucugguguccagccagugugugaaccugaccaccagaacacagcugccuccagccuacaccaacagcuuuaccagaggcguguacuaccccgacaagguguucagauccagcgugcugcacucuacccaggaccuguuccugccuuucuucagcaacgugaccugguuccacgccauccacguguccggcaccaauggcaccaagagauucgacaaccccgugcugcccuucaacgacgggguguacuuugccagcaccgagaaguccaacaucaucagaggcuggaucuucggcaccacacuggacagcaagacccagagccugcugaucgugaacaacgccaccaacguggucaucaaagugugcgaguuccaguucugcaacgaccccuuccugggcgucuacuaccacaagaacaacaagagcuggauggaaagcgaguuccggguguacagcagcgccaacaacugcaccuucgaguacgugucccagccuuuccugauggaccuggaaggcaagcagggcaacuucaagaaccugcgcgaguucguguuuaagaacaucgacggcuacuucaagaucuacagcaagcacaccccuaucaaccucgugcgggaucugccucagggcuucucugcucuggaaccccugguggaucugcccaucggcaucaacaucacccgguuucagacacugcuggcccugcacagaagcuaccugacaccuggcgauagcagcagcggauggacagcuggugccgccgcuuacuaugugggcuaccugcagccuagaaccuuccugcugaaguacaacgagaacggcaccaucaccgacgccguggauugugcucuggauccucugagcgagacaaagugcacccugaaguccuucaccguggaaaagggcaucuaccagaccagcaacuuccgggugcagcccaccgaauccaucgugcgguuccccaauaucaccaaucugugccccuucggcgagguguucaaugccaccagauucgccucuguguacgccuggaaccggaagcggaucagcaauugcguggccgacuacuccgugcuguacaacuccgccagcuucagcaccuucaagugcuacggcguguccccuaccaagcugaacgaccugugcuucacaaacguguacgccgacagcuucgugauccggggagaugaagugcggcagauugccccuggacagacaggcaagaucgccgacuacaacuacaagcugcccgacgacuucaccggcugugugauugccuggaacagcaacaaccuggacuccaaagucggcggcaacuacaauuaccuguuccggcuguuccggaaguccaaucugaagcccuucgagcgggacaucuccaccgagaucuaucaggccggcagcaccccuuguaacggcguggaaggcuucaacugcuacuucccacugcaguccuacggcuuucagcccacaaauggcgugggcuaucagcccuacagagugguggugcugagcuucgaacugcugcaugccccugccacagugugcggcccuaagaaaagcaccaaucucgugaagaacaaaugcgugaacuucaacuucaacggccugaccggcaccggcgugcugacagagagcaacaagaaguuccugccauuccagcaguuuggccgggauaucgccgauaccacagacgccguuagagauccccagacacuggaaauccuggacaucaccccuugcagcuucggcggagugucugugaucaccccuggcaccaacaccagcaaucagguggcagugcuguaccagggcgugaacuguaccgaagugcccguggccauucacgccgaucagcugacaccuacauggcggguguacuccaccggcagcaauguguuucagaccagagccggcugucugaucggagccgagcacgugaacaauagcuacgagugcgacauccccaucggcgcuggaaucugcgccagcuaccagacacagacaaacagcccucggagagccagaagcguggccagccagagcaucauugccuacacaaugucucugggcgccgagaacagcguggccuacuccaacaacucuaucgcuauccccaccaacuucaccaucagcgugaccacagagauccugccuguguccaugaccaagaccagcguggacugcaccauguacaucugcggcgauuccaccgagugcuccaaccugcugcugcaguacggcagcuucugcacccagcugaauagagcccugacagggaucgccguggaacaggacaagaacacccaagagguguucgcccaagugaagcagaucuacaagaccccuccuaucaaggacuucggcggcuucaauuucagccagauucugcccgauccuagcaagcccagcaagcggagcuucaucgaggaccugcuguucaacaaagugacacuggccgacgccggcuucaucaagcaguauggcgauugucugggcgacauugccgccagggaucugauuugcgcccagaaguuuaacggacugacagugcugccuccucugcugaccgaugagaugaucgcccaguacacaucugcccugcuggccggcacaaucacaagcggcuggacauuuggagcaggcgccgcucugcagauccccuuugcuaugcagauggccuaccgguucaacggcaucggagugacccagaaugugcuguacgagaaccagaagcugaucgccaaccaguucaacagcgccaucggcaagauccaggacagccugagcagcacagcaagcgcccugggaaagcugcaggacguggucaaccagaaugcccaggcacugaacacccuggucaagcagcuguccuccaacuucggcgccaucagcucugugcugaacgauauccugagcagacuggacaaggucgaggccgaggugcagaucgacagacugaucacaggcagacugcagagccuccagacauacgugacccagcagcugaucagagccgccgagauuagagccucugccaaucuggccgccaccaagaugucugagugugugcugggccagagcaagagaguggacuuuugcggcaagggcuaccaccugaugagcuucccucagucugccccucacggcgugguguuucugcacgugacauaugugcccgcucaagagaagaauuucaccaccgcuccagccaucugccacgacggcaaagcccacuuuccuagagaaggcguguucguguccaacggcacccauugguucgugacacagcggaacuucuacgagccccagaucaucaccaccgacaacaccuucgugucuggcaacugcgacgucgugaucggcauugugaacaauaccguguacgacccucugcagcccgagcuggacagcuucaaagaggaacuggacaaguacuuuaagaaccacacaagccccgacguggaccugggcgauaucagcggaaucaaugccagcgucgugaacauccagaaagagaucgaccggcugaacgagguggccaagaaucugaacgagagccugaucgaccugcaagaacuggggaaguacgagcaguacaucaaguggcccugguacaucuggcugggcuuuaucgccggacugauugccaucgugauggucacaaucaugcuguguugcaugaccagcugcuguagcugccugaagggcuguuguagcuguggcagcugcugcaaguucgacgaggacgauucugagcccgugcugaagggcgugaaacugcacuacacauga

SEQ ID NO: 23067 - RNA, 3822 nt, Artificial Sequence
  SARS-CoV-2/Wuhan/WIV05/2019__EPI_ISL_402128 spike protein CDS gc mod (1-1273)(D614G_I692V)
auguucguguuccuggugcugcugccucugguguccagccagugugugaaccugaccaccagaacacagcugccuccagccuacaccaacagcuuuaccagaggcguguacuaccccgacaagguguucagauccagcgugcugcacucuacccaggaccuguuccugccuuucuucagcaacgugaccugguuccacgccauccacguguccggcaccaauggcaccaagagauucgacaaccccgugcugcccuucaacgacgggguguacuuugccagcaccgagaaguccaacaucaucagaggcuggaucuucggcaccacacuggacagcaagacccagagccugcugaucgugaacaacgccaccaacguggucaucaaagugugcgaguuccaguucugcaacgaccccuuccugggcgucuacuaccacaagaacaacaagagcuggauggaaagcgaguuccggguguacagcagcgccaacaacugcaccuucgaguacgugucccagccuuuccugauggaccuggaaggcaagcagggcaacuucaagaaccugcgcgaguucguguuuaagaacaucgacggcuacuucaagaucuacagcaagcacaccccuaucaaccucgugcgggaucugccucagggcuucucugcucuggaaccccugguggaucugcccaucggcaucaacaucacccgguuucagacacugcuggcccugcacagaagcuaccugacaccuggcgauagcagcagcggauggacagcuggugccgccgcuuacuaugugggcuaccugcagccuagaaccuuccugcugaaguacaacgagaacggcaccaucaccgacgccguggauugugcucuggauccucugagcgagacaaagugcacccugaaguccuucaccguggaaaagggcaucuaccagaccagcaacuuccgggugcagcccaccgaauccaucgugcgguuccccaauaucaccaaucugugccccuucggcgagguguucaaugccaccagauucgccucuguguacgccuggaaccggaagcggaucagcaauugcguggccgacuacuccgugcuguacaacuccgccagcuucagcaccuucaagugcuacggcguguccccuaccaagcugaacgaccugugcuucacaaacguguacgccgacagcuucgugauccggggagaugaagugcggcagauugccccuggacagacaggcaagaucgccgacuacaacuacaagcugcccgacgacuucaccggcugugugauugccuggaacagcaacaaccuggacuccaaagucggcggcaacuacaauuaccuguaccggcuguuccggaaguccaaucugaagcccuucgagcgggacaucuccaccgagaucuaucaggccggcagcaccccuuguaacggcguggaaggcuucaacugcuacuucccacugcaguccuacggcuuucagcccacaaauggcgugggcuaucagcccuacagagugguggugcugagcuucgaacugcugcaugccccugccacagugugcggcccuaagaaaagcaccaaucucgugaagaacaaaugcgugaacuucaacuucaacggccugaccggcaccggcgugcugacagagagcaacaagaaguuccugccauuccagcaguuuggccgggauaucgccgauaccacagacgccguuagagauccccagacacuggaaauccuggacaucaccccuugcagcuucggcggagugucugugaucaccccuggcaccaacaccagcaaucagguggcagugcuguaccagggcgugaacuguaccgaagugcccguggccauucacgccgaucagcugacaccuacauggcggguguacuccaccggcagcaauguguuucagaccagagccggcugucugaucggagccgagcacgugaacaauagcuacgagugcgacauccccaucggcgcuggaaucugcgccagcuaccagacacagacaaacagcccucggagagccagaagcguggccagccagagcgugauugccuacacaaugucucugggcgccgagaacagcguggccuacuccaacaacucuaucgcuauccccaccaacuucaccaucagcgugaccacagagauccugccuguguccaugaccaagaccagcguggacugcaccauguacaucugcggcgauuccaccgagugcuccaaccugcugcugcaguacggcagcuucugcacccagcugaauagagcccugacagggaucgccguggaacaggacaagaacacccaagagguguucgcccaagugaagcagaucuacaagaccccuccuaucaaggacuucggcggcuucaauuucagccagauucugcccgauccuagcaagcccagcaagcggagcuucaucgaggaccugcuguucaacaaagugacacuggccgacgccggcuucaucaagcaguauggcgauugucugggcgacauugccgccagggaucugauuugcgcccagaaguuuaacggacugacagugcugccuccucugcugaccgaugagaugaucgcccaguacacaucugcccugcuggccggcacaaucacaagcggcuggacauuuggagcaggcgccgcucugcagauccccuuugcuaugcagauggccuaccgguucaacggcaucggagugacccagaaugugcuguacgagaaccagaagcugaucgccaaccaguucaacagcgccaucggcaagauccaggacagccugagcagcacagcaagcgcccugggaaagcugcaggacguggucaaccagaaugcccaggcacugaacacccuggucaagcagcuguccuccaacuucggcgccaucagcucugugcugaacgauauccugagcagacuggacaaggucgaggccgaggugcagaucgacagacugaucacaggcagacugcagagccuccagacauacgugacccagcagcugaucagagccgccgagauuagagccucugccaaucuggccgccaccaagaugucugagugugugcugggccagagcaagagaguggacuuuugcggcaagggcuaccaccugaugagcuucccucagucugccccucacggcgugguguuucugcacgugacauaugugcccgcucaagagaagaauuucaccaccgcuccagccaucugccacgacggcaaagcccacuuuccuagagaaggcguguucguguccaacggcacccauugguucgugacacagcggaacuucuacgagccccagaucaucaccaccgacaacaccuucgugucuggcaacugcgacgucgugaucggcauugugaacaauaccguguacgacccucugcagcccgagcuggacagcuucaaagaggaacuggacaaguacuuuaagaaccacacaagccccgacguggaccugggcgauaucagcggaaucaaugccagcgucgugaacauccagaaagagaucgaccggcugaacgagguggccaagaaucugaacgagagccugaucgaccugcaagaacuggggaaguacgagcaguacaucaaguggcccugguacaucuggcugggcuuuaucgccggacugauugccaucgugauggucacaaucaugcuguguugcaugaccagcugcuguagcugccugaagggcuguuguagcuguggcagcugcugcaaguucgacgaggacgauucugagcccgugcugaagggcgugaaacugcacuacacauga

SEQ ID NO: 23068 - RNA, 3822 nt, Artificial Sequence
  SARS-CoV-2/Wuhan/WIV05/2019__EPI_ISL_402128 spike protein CDS gc mod (1-1273)(D614G_M1229I)
auguucguguuccuggugcugcugccucugguguccagccagugugugaaccugaccaccagaacacagcugccuccagccuacaccaacagcuuuaccagaggcguguacuaccccgacaagguguucagauccagcgugcugcacucuacccaggaccuguuccugccuuucuucagcaacgugaccugguuccacgccauccacguguccggcaccaauggcaccaagagauucgacaaccccgugcugcccuucaacgacgggguguacuuugccagcaccgagaaguccaacaucaucagaggcuggaucuucggcaccacacuggacagcaagacccagagccugcugaucgugaacaacgccaccaacguggucaucaaagugugcgaguuccaguucugcaacgaccccuuccugggcgucuacuaccacaagaacaacaagagcuggauggaaagcgaguuccggguguacagcagcgccaacaacugcaccuucgaguacgugucccagccuuuccugauggaccuggaaggcaagcagggcaacuucaagaaccugcgcgaguucguguuuaagaacaucgacggcuacuucaagaucuacagcaagcacaccccuaucaaccucgugcgggaucugccucagggcuucucugcucuggaaccccugguggaucugcccaucggcaucaacaucacccgguuucagacacugcuggcccugcacagaagcuaccugacaccuggcgauagcagcagcggauggacagcuggugccgccgcuuacuaugugggcuaccugcagccuagaaccuuccugcugaaguacaacgagaacggcaccaucaccgacgccguggauugugcucuggauccucugagcgagacaaagugcacccugaaguccuucaccguggaaaagggcaucuaccagaccagcaacuuccgggugcagcccaccgaauccaucgugcgguuccccaauaucaccaaucugugccccuucggcgagguguucaaugccaccagauucgccucuguguacgccuggaaccggaagcggaucagcaauugcguggccgacuacuccgugcuguacaacuccgccagcuucagcaccuucaagugcuacggcguguccccuaccaagcugaacgaccugugcuucacaaacguguacgccgacagcuucgugauccggggagaugaagugcggcagauugccccuggacagacaggcaagaucgccgacuacaacuacaagcugcccgacgacuucaccggcugugugauugccuggaacagcaacaaccuggacuccaaagucggcggcaacuacaauuaccuguaccggcuguuccggaaguccaaucugaagcccuucgagcgggacaucuccaccgagaucuaucaggccggcagcaccccuuguaacggcguggaaggcuucaacugcuacuucccacugcaguccuacggcuuucagcccacaaauggcgugggcuaucagcccuacagagugguggugcugagcuucgaacugcugcaugccccugccacagugugcggcccuaagaaaagcaccaaucucgugaagaacaaaugcgugaacuucaacuucaacggccugaccggcaccggcgugcugacagagagcaacaagaaguuccugccauuccagcaguuuggccgggauaucgccgauaccacagacgccguuagagauccccagacacuggaaauccuggacaucaccccuugcagcuucggcggagugucugugaucaccccuggcaccaacaccagcaaucagguggcagugcuguaccagggcgugaacuguaccgaagugcccguggccauucacgccgaucagcugacaccuacauggcggguguacuccaccggcagcaauguguuucagaccagagccggcugucugaucggagccgagcacgugaacaauagcuacgagugcgacauccccaucggcgcuggaaucugcgccagcuaccagacacagacaaacagcccucggagagccagaagcguggccagccagagcaucauugccuacacaaugucucugggcgccgagaacagcguggccuacuccaacaacucuaucgcuauccccaccaacuucaccaucagcgugaccacagagauccugccuguguccaugaccaagaccagcguggacugcaccauguacaucugcggcgauuccaccgagugcuccaaccugcugcugcaguacggcagcuucugcacccagcugaauagagcccugacagggaucgccguggaacaggacaagaacacccaagagguguucgcccaagugaagcagaucuacaagaccccuccuaucaaggacuucggcggcuucaauuucagccagauucugcccgauccuagcaagcccagcaagcggagcuucaucgaggaccugcuguucaacaaagugacacuggccgacgccggcuucaucaagcaguauggcgauugucugggcgacauugccgccagggaucugauuugcgcccagaaguuuaacggacugacagugcugccuccucugcugaccgaugagaugaucgcccaguacacaucugcccugcuggccggcacaaucacaagcggcuggacauuuggagcaggcgccgcucugcagauccccuuugcuaugcagauggccuaccgguucaacggcaucggagugacccagaaugugcuguacgagaaccagaagcugaucgccaaccaguucaacagcgccaucggcaagauccaggacagccugagcagcacagcaagcgcccugggaaagcugcaggacguggucaaccagaaugcccaggcacugaacacccuggucaagcagcuguccuccaacuucggcgccaucagcucugugcugaacgauauccugagcagacuggacaaggucgaggccgaggugcagaucgacagacugaucacaggcagacugcagagccuccagacauacgugacccagcagcugaucagagccgccgagauuagagccucugccaaucuggccgccaccaagaugucugagugugugcugggccagagcaagagaguggacuuuugcggcaagggcuaccaccugaugagcuucccucagucugccccucacggcgugguguuucugcacgugacauaugugcccgcucaagagaagaauuucaccaccgcuccagccaucugccacgacggcaaagcccacuuuccuagagaaggcguguucguguccaacggcacccauugguucgugacacagcggaacuucuacgagccccagaucaucaccaccgacaacaccuucgugucuggcaacugcgacgucgugaucggcauugugaacaauaccguguacgacccucugcagcccgagcuggacagcuucaaagaggaacuggacaaguacuuuaagaaccacacaagccccgacguggaccugggcgauaucagcggaaucaaugccagcgucgugaacauccagaaagagaucgaccggcugaacgagguggccaagaaucugaacgagagccugaucgaccugcaagaacuggggaaguacgagcaguacaucaaguggcccugguacaucuggcugggcuuuaucgccggacugauugccaucgugaucgucacaaucaugcuguguugcaugaccagcugcuguagcugccugaagggcuguuguagcuguggcagcugcugcaaguucgacgaggacgauucugagcccgugcugaagggcgugaaacugcacuacacauga

SEQ ID NO: 23069 - RNA, 3816 nt, Artificial Sequence
  SARS-CoV-2/Wuhan/WIV05/2019__EPI_ISL_402128 spike protein CDS gc mod (1-1273)(H69del_V70del_A222V_Y453F_S477N_D614G_I692V)
auguucguguuccuggugcugcugccucugguguccagccagugugugaaccugaccaccagaacacagcugccuccagccuacaccaacagcuuuaccagaggcguguacuaccccgacaagguguucagauccagcgugcugcacucuacccaggaccuguuccugccuuucuucagcaacgugaccugguuccacgccaucuccggcaccaauggcaccaagagauucgacaaccccgugcugcccuucaacgacgggguguacuuugccagcaccgagaaguccaacaucaucagaggcuggaucuucggcaccacacuggacagcaagacccagagccugcugaucgugaacaacgccaccaacguggucaucaaagugugcgaguuccaguucugcaacgaccccuuccugggcgucuacuaccacaagaacaacaagagcuggauggaaagcgaguuccggguguacagcagcgccaacaacugcaccuucgaguacgugucccagccuuuccugauggaccuggaaggcaagcagggcaacuucaagaaccugcgcgaguucguguuuaagaacaucgacggcuacuucaagaucuacagcaagcacaccccuaucaaccucgugcgggaucugccucagggcuucucugugcuggaaccccugguggaucugcccaucggcaucaacaucacccgguuucagacacugcuggcccugcacagaagcuaccugacaccuggcgauagcagcagcggauggacagcuggugccgccgcuuacuaugugggcuaccugcagccuagaaccuuccugcugaaguacaacgagaacggcaccaucaccgacgccguggauugugcucuggauccucugagcgagacaaagugcacccugaaguccuucaccguggaaaagggcaucuaccagaccagcaacuuccgggugcagcccaccgaauccaucgugcgguuccccaauaucaccaaucugugccccuucggcgagguguucaaugccaccagauucgccucuguguacgccuggaaccggaagcggaucagcaauugcguggccgacuacuccgugcuguacaacuccgccagcuucagcaccuucaagugcuacggcguguccccuaccaagcugaacgaccugugcuucacaaacguguacgccgacagcuucgugauccggggagaugaagugcggcagauugccccuggacagacaggcaagaucgccgacuacaacuacaagcugcccgacgacuucaccggcugugugauugccuggaacagcaacaaccuggacuccaaagucggcggcaacuacaauuaccuguuccggcuguuccggaaguccaaucugaagcccuucgagcgggacaucuccaccgagaucuaucaggccggcaacaccccuuguaacggcguggaaggcuucaacugcuacuucccacugcaguccuacggcuuucagcccacaaauggcgugggcuaucagcccuacagagugguggugcugagcuucgaacugcugcaugccccugccacagugugcggcccuaagaaaagcaccaaucucgugaagaacaaaugcgugaacuucaacuucaacggccugaccggcaccggcgugcugacagagagcaacaagaaguuccugccauuccagcaguuuggccgggauaucgccgauaccacagacgccguuagagauccccagacacuggaaauccuggacaucaccccuugcagcuucggcggagugucugugaucaccccuggcaccaacaccagcaaucagguggcagugcuguaccagggcgugaacuguaccgaagugcccguggccauucacgccgaucagcugacaccuacauggcggguguacuccaccggcagcaauguguuucagaccagagccggcugucugaucggagccgagcacgugaacaauagcuacgagugcgacauccccaucggcgcuggaaucugcgccagcuaccagacacagacaaacagcccucggagagccagaagcguggccagccagagcgugauugccuacacaaugucucugggcgccgagaacagcguggccuacuccaacaacucuaucgcuauccccaccaacuucaccaucagcgugaccacagagauccugccuguguccaugaccaagaccagcguggacugcaccauguacaucugcggcgauuccaccgagugcuccaaccugcugcugcaguacggcagcuucugcacccagcugaauagagcccugacagggaucgccguggaacaggacaagaacacccaagagguguucgcccaagugaagcagaucuacaagaccccuccuaucaaggacuucggcggcuucaauuucagccagauucugcccgauccuagcaagcccagcaagcggagcuucaucgaggaccugcuguucaacaaagugacacuggccgacgccggcuucaucaagcaguauggcgauugucugggcgacauugccgccagggaucugauuugcgcccagaaguuuaacggacugacagugcugccuccucugcugaccgaugagaugaucgcccaguacacaucugcccugcuggccggcacaaucacaagcggcuggacauuuggagcaggcgccgcucugcagauccccuuugcuaugcagauggccuaccgguucaacggcaucggagugacccagaaugugcuguacgagaaccagaagcugaucgccaaccaguucaacagcgccaucggcaagauccaggacagccugagcagcacagcaagcgcccugggaaagcugcaggacguggucaaccagaaugcccaggcacugaacacccuggucaagcagcuguccuccaacuucggcgccaucagcucugugcugaacgauauccugagcagacuggacaaggucgaggccgaggugcagaucgacagacugaucacaggcagacugcagagccuccagacauacgugacccagcagcugaucagagccgccgagauuagagccucugccaaucuggccgccaccaagaugucugagugugugcugggccagagcaagagaguggacuuuugcggcaagggcuaccaccugaugagcuucccucagucugccccucacggcgugguguuucugcacgugacauaugugcccgcucaagagaagaauuucaccaccgcuccagccaucugccacgacggcaaagcccacuuuccuagagaaggcguguucguguccaacggcacccauugguucgugacacagcggaacuucuacgagccccagaucaucaccaccgacaacaccuucgugucuggcaacugcgacgucgugaucggcauugugaacaauaccguguacgacccucugcagcccgagcuggacagcuucaaagaggaacuggacaaguacuuuaagaaccacacaagccccgacguggaccugggcgauaucagcggaaucaaugccagcgucgugaacauccagaaagagaucgaccggcugaacgagguggccaagaaucugaacgagagccugaucgaccugcaagaacuggggaaguacgagcaguacaucaaguggcccugguacaucuggcugggcuuuaucgccggacugauugccaucgugauggucacaaucaugcuguguugcaugaccagcugcuguagcugccugaagggcuguuguagcuguggcagcugcugcaaguucgacgaggacgauucugagcccgugcugaagggcgugaaacugcacuacacauga

SEQ ID NO: 23070 - RNA, 3816 nt, Artificial Sequence
  SARS-CoV-2/Wuhan/WIV05/2019__EPI_ISL_402128 spike protein CDS gc mod (1-1273)(H69del_V70del_Y453F_D614G_I692V_M1229I)
auguucguguuccuggugcugcugccucugguguccagccagugugugaaccugaccaccagaacacagcugccuccagccuacaccaacagcuuuaccagaggcguguacuaccccgacaagguguucagauccagcgugcugcacucuacccaggaccuguuccugccuuucuucagcaacgugaccugguuccacgccaucuccggcaccaauggcaccaagagauucgacaaccccgugcugcccuucaacgacgggguguacuuugccagcaccgagaaguccaacaucaucagaggcuggaucuucggcaccacacuggacagcaagacccagagccugcugaucgugaacaacgccaccaacguggucaucaaagugugcgaguuccaguucugcaacgaccccuuccugggcgucuacuaccacaagaacaacaagagcuggauggaaagcgaguuccggguguacagcagcgccaacaacugcaccuucgaguacgugucccagccuuuccugauggaccuggaaggcaagcagggcaacuucaagaaccugcgcgaguucguguuuaagaacaucgacggcuacuucaagaucuacagcaagcacaccccuaucaaccucgugcgggaucugccucagggcuucucugcucuggaaccccugguggaucugcccaucggcaucaacaucacccgguuucagacacugcuggcccugcacagaagcuaccugacaccuggcgauagcagcagcggauggacagcuggugccgccgcuuacuaugugggcuaccugcagccuagaaccuuccugcugaaguacaacgagaacggcaccaucaccgacgccguggauugugcucuggauccucugagcgagacaaagugcacccugaaguccuucaccguggaaaagggcaucuaccagaccagcaacuuccgggugcagcccaccgaauccaucgugcgguuccccaauaucaccaaucugugccccuucggcgagguguucaaugccaccagauucgccucuguguacgccuggaaccggaagcggaucagcaauugcguggccgacuacuccgugcuguacaacuccgccagcuucagcaccuucaagugcuacggcguguccccuaccaagcugaacgaccugugcuucacaaacguguacgccgacagcuucgugauccggggagaugaagugcggcagauugccccuggacagacaggcaagaucgccgacuacaacuacaagcugcccgacgacuucaccggcugugugauugccuggaacagcaacaaccuggacuccaaagucggcggcaacuacaauuaccuguuccggcuguuccggaaguccaaucugaagcccuucgagcgggacaucuccaccgagaucuaucaggccggcagcaccccuuguaacggcguggaaggcuucaacugcuacuucccacugcaguccuacggcuuucagcccacaaauggcgugggcuaucagcccuacagagugguggugcugagcuucgaacugcugcaugccccugccacagugugcggcccuaagaaaagcaccaaucucgugaagaacaaaugcgugaacuucaacuucaacggccugaccggcaccggcgugcugacagagagcaacaagaaguuccugccauuccagcaguuuggccgggauaucgccgauaccacagacgccguuagagauccccagacacuggaaauccuggacaucaccccuugcagcuucggcggagugucugugaucaccccuggcaccaacaccagcaaucagguggcagugcuguaccagggcgugaacuguaccgaagugcccguggccauucacgccgaucagcugacaccuacauggcggguguacuccaccggcagcaauguguuucagaccagagccggcugucugaucggagccgagcacgugaacaauagcuacgagugcgacauccccaucggcgcuggaaucugcgccagcuaccagacacagacaaacagcccucggagagccagaagcguggccagccagagcgugauugccuacacaaugucucugggcgccgagaacagcguggccuacuccaacaacucuaucgcuauccccaccaacuucaccaucagcgugaccacagagauccugccuguguccaugaccaagaccagcguggacugcaccauguacaucugcggcgauuccaccgagugcuccaaccugcugcugcaguacggcagcuucugcacccagcugaauagagcccugacagggaucgccguggaacaggacaagaacacccaagagguguucgcccaagugaagcagaucuacaagaccccuccuaucaaggacuucggcggcuucaauuucagccagauucugcccgauccuagcaagcccagcaagcggagcuucaucgaggaccugcuguucaacaaagugacacuggccgacgccggcuucaucaagcaguauggcgauugucugggcgacauugccgccagggaucugauuugcgcccagaaguuuaacggacugacagugcugccuccucugcugaccgaugagaugaucgcccaguacacaucugcccugcuggccggcacaaucacaagcggcuggacauuuggagcaggcgccgcucugcagauccccuuugcuaugcagauggccuaccgguucaacggcaucggagugacccagaaugugcuguacgagaaccagaagcugaucgccaaccaguucaacagcgccaucggcaagauccaggacagccugagcagcacagcaagcgcccugggaaagcugcaggacguggucaaccagaaugcccaggcacugaacacccuggucaagcagcuguccuccaacuucggcgccaucagcucugugcugaacgauauccugagcagacuggacaaggucgaggccgaggugcagaucgacagacugaucacaggcagacugcagagccuccagacauacgugacccagcagcugaucagagccgccgagauuagagccucugccaaucuggccgccaccaagaugucugagugugugcugggccagagcaagagaguggacuuuugcggcaagggcuaccaccugaugagcuucccucagucugccccucacggcgugguguuucugcacgugacauaugugcccgcucaagagaagaauuucaccaccgcuccagccaucugccacgacggcaaagcccacuuuccuagagaaggcguguucguguccaacggcacccauugguucgugacacagcggaacuucuacgagccccagaucaucaccaccgacaacaccuucgugucuggcaacugcgacgucgugaucggcauugugaacaauaccguguacgacccucugcagcccgagcuggacagcuucaaagaggaacuggacaaguacuuuaagaaccacacaagccccgacguggaccugggcgauaucagcggaaucaaugccagcgucgugaacauccagaaagagaucgaccggcugaacgagguggccaagaaucugaacgagagccugaucgaccugcaagaacuggggaaguacgagcaguacaucaaguggcccugguacaucuggcugggcuuuaucgccggacugauugccaucgugaucgucacaaucaugcuguguugcaugaccagcugcuguagcugccugaagggcuguuguagcuguggcagcugcugcaaguucgacgaggacgauucugagcccgugcugaagggcgugaaacugcacuacacauga

SEQ ID NO: 23071 - RNA, 3813 nt, Artificial Sequence
  SARS-CoV-2/Wuhan/WIV05/2019__EPI_ISL_402128 spike protein CDS gc mod (1-1273)(H69del_V70del_Y144del_N501Y_A570D_D614G_P681H_T716I_S982 A_D1118H)
auguucguguuccuggugcugcugccucugguguccagccagugugugaaccugaccaccagaacacagcugccuccagccuacaccaacagcuuuaccagaggcguguacuaccccgacaagguguucagauccagcgugcugcacucuacccaggaccuguuccugccuuucuucagcaacgugaccugguuccacgccaucuccggcaccaauggcaccaagagauucgacaaccccgugcugcccuucaacgacgggguguacuuugccagcaccgagaaguccaacaucaucagaggcuggaucuucggcaccacacuggacagcaagacccagagccugcugaucgugaacaacgccaccaacguggucaucaaagugugcgaguuccaguucugcaacgaccccuuccugggcgucuaccacaagaacaacaagagcuggauggaaagcgaguuccggguguacagcagcgccaacaacugcaccuucgaguacgugucccagccuuuccugauggaccuggaaggcaagcagggcaacuucaagaaccugcgcgaguucguguuuaagaacaucgacggcuacuucaagaucuacagcaagcacaccccuaucaaccucgugcgggaucugccucagggcuucucugcucuggaaccccugguggaucugcccaucggcaucaacaucacccgguuucagacacugcuggcccugcacagaagcuaccugacaccuggcgauagcagcagcggauggacagcuggugccgccgcuuacuaugugggcuaccugcagccuagaaccuuccugcugaaguacaacgagaacggcaccaucaccgacgccguggauugugcucuggauccucugagcgagacaaagugcacccugaaguccuucaccguggaaaagggcaucuaccagaccagcaacuuccgggugcagcccaccgaauccaucgugcgguuccccaauaucaccaaucugugccccuucggcgagguguucaaugccaccagauucgccucuguguacgccuggaaccggaagcggaucagcaauugcguggccgacuacuccgugcuguacaacuccgccagcuucagcaccuucaagugcuacggcguguccccuaccaagcugaacgaccugugcuucacaaacguguacgccgacagcuucgugauccggggagaugaagugcggcagauugccccuggacagacaggcaagaucgccgacuacaacuacaagcugcccgacgacuucaccggcugugugauugccuggaacagcaacaaccuggacuccaaagucggcggcaacuacaauuaccuguaccggcuguuccggaaguccaaucugaagcccuucgagcgggacaucuccaccgagaucuaucaggccggcagcaccccuuguaacggcguggaaggcuucaacugcuacuucccacugcaguccuacggcuuucagcccacauacggcgugggcuaucagcccuacagagugguggugcugagcuucgaacugcugcaugccccugccacagugugcggcccuaagaaaagcaccaaucucgugaagaacaaaugcgugaacuucaacuucaacggccugaccggcaccggcgugcugacagagagcaacaagaaguuccugccauuccagcaguuuggccgggauaucgacgauaccacagacgccguuagagauccccagacacuggaaauccuggacaucaccccuugcagcuucggcggagugucugugaucaccccuggcaccaacaccagcaaucagguggcagugcuguaccagggcgugaacuguaccgaagugcccguggccauucacgccgaucagcugacaccuacauggcggguguacuccaccggcagcaauguguuucagaccagagccggcugucugaucggagccgagcacgugaacaauagcuacgagugcgacauccccaucggcgcuggaaucugcgccagcuaccagacacagacaaacagccaccggagagccagaagcguggccagccagagcaucauugccuacacaaugucucugggcgccgagaacagcguggccuacuccaacaacucuaucgcuauccccaucaacuucaccaucagcgugaccacagagauccugccuguguccaugaccaagaccagcguggacugcaccauguacaucugcggcgauuccaccgagugcuccaaccugcugcugcaguacggcagcuucugcacccagcugaauagagcccugacagggaucgccguggaacaggacaagaacacccaagagguguucgcccaagugaagcagaucuacaagaccccuccuaucaaggacuucggcggcuucaauuucagccagauucugcccgauccuagcaagcccagcaagcggagcuucaucgaggaccugcuguucaacaaagugacacuggccgacgccggcuucaucaagcaguauggcgauugucugggcgacauugccgccagggaucugauuugcgcccagaaguuuaacggacugacagugcugccuccucugcugaccgaugagaugaucgcccaguacacaucugcccugcuggccggcacaaucacaagcggcuggacauuuggagcaggcgccgcucugcagauccccuuugcuaugcagauggccuaccgguucaacggcaucggagugacccagaaugugcuguacgagaaccagaagcugaucgccaaccaguucaacagcgccaucggcaagauccaggacagccugagcagcacagcaagcgcccugggaaagcugcaggacguggucaaccagaaugcccaggcacugaacacccuggucaagcagcuguccuccaacuucggcgccaucagcucugugcugaacgauauccuggccagacuggacaaggucgaggccgaggugcagaucgacagacugaucacaggcagacugcagagccuccagacauacgugacccagcagcugaucagagccgccgagauuagagccucugccaaucuggccgccaccaagaugucugagugugugcugggccagagcaagagaguggacuuuugcggcaagggcuaccaccugaugagcuucccucagucugccccucacggcgugguguuucugcacgugacauaugugcccgcucaagagaagaauuucaccaccgcuccagccaucugccacgacggcaaagcccacuuuccuagagaaggcguguucguguccaacggcacccauugguucgugacacagcggaacuucuacgagccccagaucaucaccacccacaacaccuucgugucuggcaacugcgacgucgugaucggcauugugaacaauaccguguacgacccucugcagcccgagcuggacagcuucaaagaggaacuggacaaguacuuuaagaaccacacaagccccgacguggaccugggcgauaucagcggaaucaaugccagcgucgugaacauccagaaagagaucgaccggcugaacgagguggccaagaaucugaacgagagccugaucgaccugcaagaacuggggaaguacgagcaguacaucaaguggcccugguacaucuggcugggcuuuaucgccggacugauugccaucgugauggucacaaucaugcuguguugcaugaccagcugcuguagcugccugaagggcuguuguagcuguggcagcugcugcaaguucgacgaggacgauucugagcccgugcugaagggcgugaaacugcacuacacauga

SEQ ID NO: 23072 - RNA, 3822 nt, Artificial Sequence
  SARS-CoV-2/Wuhan/WIV05/2019__EPI_ISL_402128 spike protein CDS gc mod (1-1273)(K417N_E484K_N501Y_D614G)
auguucguguuccuggugcugcugccucugguguccagccagugugugaaccugaccaccagaacacagcugccuccagccuacaccaacagcuuuaccagaggcguguacuaccccgacaagguguucagauccagcgugcugcacucuacccaggaccuguuccugccuuucuucagcaacgugaccugguuccacgccauccacguguccggcaccaauggcaccaagagauucgacaaccccgugcugcccuucaacgacgggguguacuuugccagcaccgagaaguccaacaucaucagaggcuggaucuucggcaccacacuggacagcaagacccagagccugcugaucgugaacaacgccaccaacguggucaucaaagugugcgaguuccaguucugcaacgaccccuuccugggcgucuacuaccacaagaacaacaagagcuggauggaaagcgaguuccggguguacagcagcgccaacaacugcaccuucgaguacgugucccagccuuuccugauggaccuggaaggcaagcagggcaacuucaagaaccugcgcgaguucguguuuaagaacaucgacggcuacuucaagaucuacagcaagcacaccccuaucaaccucgugcgggaucugccucagggcuucucugcucuggaaccccugguggaucugcccaucggcaucaacaucacccgguuucagacacugcuggcccugcacagaagcuaccugacaccuggcgauagcagcagcggauggacagcuggugccgccgcuuacuaugugggcuaccugcagccuagaaccuuccugcugaaguacaacgagaacggcaccaucaccgacgccguggauugugcucuggauccucugagcgagacaaagugcacccugaaguccuucaccguggaaaagggcaucuaccagaccagcaacuuccgggugcagcccaccgaauccaucgugcgguuccccaauaucaccaaucugugccccuucggcgagguguucaaugccaccagauucgccucuguguacgccuggaaccggaagcggaucagcaauugcguggccgacuacuccgugcuguacaacuccgccagcuucagcaccuucaagugcuacggcguguccccuaccaagcugaacgaccugugcuucacaaacguguacgccgacagcuucgugauccggggagaugaagugcggcagauugccccuggacagacaggcaacaucgccgacuacaacuacaagcugcccgacgacuucaccggcugugugauugccuggaacagcaacaaccuggacuccaaagucggcggcaacuacaauuaccuguaccggcuguuccggaaguccaaucugaagcccuucgagcgggacaucuccaccgagaucuaucaggccggcagcaccccuuguaacggcgugaagggcuucaacugcuacuucccacugcaguccuacggcuuucagcccacauacggcgugggcuaucagcccuacagagugguggugcugagcuucgaacugcugcaugccccugccacagugugcggcccuaagaaaagcaccaaucucgugaagaacaaaugcgugaacuucaacuucaacggccugaccggcaccggcgugcugacagagagcaacaagaaguuccugccauuccagcaguuuggccgggauaucgccgauaccacagacgccguuagagauccccagacacuggaaauccuggacaucaccccuugcagcuucggcggagugucugugaucaccccuggcaccaacaccagcaaucagguggcagugcuguaccagggcgugaacuguaccgaagugcccguggccauucacgccgaucagcugacaccuacauggcggguguacuccaccggcagcaauguguuucagaccagagccggcugucugaucggagccgagcacgugaacaauagcuacgagugcgacauccccaucggcgcuggaaucugcgccagcuaccagacacagacaaacagcccucggagagccagaagcguggccagccagagcaucauugccuacacaaugucucugggcgccgagaacagcguggccuacuccaacaacucuaucgcuauccccaccaacuucaccaucagcgugaccacagagauccugccuguguccaugaccaagaccagcguggacugcaccauguacaucugcggcgauuccaccgagugcuccaaccugcugcugcaguacggcagcuucugcacccagcugaauagagcccugacagggaucgccguggaacaggacaagaacacccaagagguguucgcccaagugaagcagaucuacaagaccccuccuaucaaggacuucggcggcuucaauuucagccagauucugcccgauccuagcaagcccagcaagcggagcuucaucgaggaccugcuguucaacaaagugacacuggccgacgccggcuucaucaagcaguauggcgauugucugggcgacauugccgccagggaucugauuugcgcccagaaguuuaacggacugacagugcugccuccucugcugaccgaugagaugaucgcccaguacacaucugcccugcuggccggcacaaucacaagcggcuggacauuuggagcaggcgccgcucugcagauccccuuugcuaugcagauggccuaccgguucaacggcaucggagugacccagaaugugcuguacgagaaccagaagcugaucgccaaccaguucaacagcgccaucggcaagauccaggacagccugagcagcacagcaagcgcccugggaaagcugcaggacguggucaaccagaaugcccaggcacugaacacccuggucaagcagcuguccuccaacuucggcgccaucagcucugugcugaacgauauccugagcagacuggacaaggucgaggccgaggugcagaucgacagacugaucacaggcagacugcagagccuccagacauacgugacccagcagcugaucagagccgccgagauuagagccucugccaaucuggccgccaccaagaugucugagugugugcugggccagagcaagagaguggacuuuugcggcaagggcuaccaccugaugagcuucccucagucugccccucacggcgugguguuucugcacgugacauaugugcccgcucaagagaagaauuucaccaccgcuccagccaucugccacgacggcaaagcccacuuuccuagagaaggcguguucguguccaacggcacccauugguucgugacacagcggaacuucuacgagccccagaucaucaccaccgacaacaccuucgugucuggcaacugcgacgucgugaucggcauugugaacaauaccguguacgacccucugcagcccgagcuggacagcuucaaagaggaacuggacaaguacuuuaagaaccacacaagccccgacguggaccugggcgauaucagcggaaucaaugccagcgucgugaacauccagaaagagaucgaccggcugaacgagguggccaagaaucugaacgagagccugaucgaccugcaagaacuggggaaguacgagcaguacaucaaguggcccugguacaucuggcugggcuuuaucgccggacugauugccaucgugauggucacaaucaugcuguguugcaugaccagcugcuguagcugccugaagggcuguuguagcuguggcagcugcugcaaguucgacgaggacgauucugagcccgugcugaagggcgugaaacugcacuacacauga

SEQ ID NO: 23073 - RNA, 3813 nt, Artificial Sequence
  SARS-CoV-2/Wuhan/WIV05/2019__EPI_ISL_402128 spike protein CDS gc mod (1-1273)(L18F_D80A_D215G_L242del_A243del_L244del_R246I_K417N_E484 K_N501Y_D614G_A701V)
auguucguguuccuggugcugcugccucugguguccagccagugugugaacuucaccaccagaacacagcugccuccagccuacaccaacagcuuuaccagaggcguguacuaccccgacaagguguucagauccagcgugcugcacucuacccaggaccuguuccugccuuucuucagcaacgugaccugguuccacgccauccacguguccggcaccaauggcaccaagagauucgccaaccccgugcugcccuucaacgacgggguguacuuugccagcaccgagaaguccaacaucaucagaggcuggaucuucggcaccacacuggacagcaagacccagagccugcugaucgugaacaacgccaccaacguggucaucaaagugugcgaguuccaguucugcaacgaccccuuccugggcgucuacuaccacaagaacaacaagagcuggauggaaagcgaguuccggguguacagcagcgccaacaacugcaccuucgaguacgugucccagccuuuccugauggaccuggaaggcaagcagggcaacuucaagaaccugcgcgaguucguguuuaagaacaucgacggcuacuucaagaucuacagcaagcacaccccuaucaaccucgugcggggccugccucagggcuucucugcucuggaaccccugguggaucugcccaucggcaucaacaucacccgguuucagacacugcacaucagcuaccugacaccuggcgauagcagcagcggauggacagcuggugccgccgcuuacuaugugggcuaccugcagccuagaaccuuccugcugaaguacaacgagaacggcaccaucaccgacgccguggauugugcucuggauccucugagcgagacaaagugcacccugaaguccuucaccguggaaaagggcaucuaccagaccagcaacuuccgggugcagcccaccgaauccaucgugcgguuccccaauaucaccaaucugugccccuucggcgagguguucaaugccaccagauucgccucuguguacgccuggaaccggaagcggaucagcaauugcguggccgacuacuccgugcuguacaacuccgccagcuucagcaccuucaagugcuacggcguguccccuaccaagcugaacgaccugugcuucacaaacguguacgccgacagcuucgugauccggggagaugaagugcggcagauugccccuggacagacaggcaacaucgccgacuacaacuacaagcugcccgacgacuucaccggcugugugauugccuggaacagcaacaaccuggacuccaaagucggcggcaacuacaauuaccuguaccggcuguuccggaaguccaaucugaagcccuucgagcgggacaucuccaccgagaucuaucaggccggcagcaccccuuguaacggcgugaagggcuucaacugcuacuucccacugcaguccuacggcuuucagcccacauacggcgugggcuaucagcccuacagagugguggugcugagcuucgaacugcugcaugccccugccacagugugcggcccuaagaaaagcaccaaucucgugaagaacaaaugcgugaacuucaacuucaacggccugaccggcaccggcgugcugacagagagcaacaagaaguuccugccauuccagcaguuuggccgggauaucgccgauaccacagacgccguuagagauccccagacacuggaaauccuggacaucaccccuugcagcuucggcggagugucugugaucaccccuggcaccaacaccagcaaucagguggcagugcuguaccagggcgugaacuguaccgaagugcccguggccauucacgccgaucagcugacaccuacauggcggguguacuccaccggcagcaauguguuucagaccagagccggcugucugaucggagccgagcacgugaacaauagcuacgagugcgacauccccaucggcgcuggaaucugcgccagcuaccagacacagacaaacagcccucggagagccagaagcguggccagccagagcaucauugccuacacaaugucucugggcguggagaacagcguggccuacuccaacaacucuaucgcuauccccaccaacuucaccaucagcgugaccacagagauccugccuguguccaugaccaagaccagcguggacugcaccauguacaucugcggcgauuccaccgagugcuccaaccugcugcugcaguacggcagcuucugcacccagcugaauagagcccugacagggaucgccguggaacaggacaagaacacccaagagguguucgcccaagugaagcagaucuacaagaccccuccuaucaaggacuucggcggcuucaauuucagccagauucugcccgauccuagcaagcccagcaagcggagcuucaucgaggaccugcuguucaacaaagugacacuggccgacgccggcuucaucaagcaguauggcgauugucugggcgacauugccgccagggaucugauuugcgcccagaaguuuaacggacugacagugcugccuccucugcugaccgaugagaugaucgcccaguacacaucugcccugcuggccggcacaaucacaagcggcuggacauuuggagcaggcgccgcucugcagauccccuuugcuaugcagauggccuaccgguucaacggcaucggagugacccagaaugugcuguacgagaaccagaagcugaucgccaaccaguucaacagcgccaucggcaagauccaggacagccugagcagcacagcaagcgcccugggaaagcugcaggacguggucaaccagaaugcccaggcacugaacacccuggucaagcagcuguccuccaacuucggcgccaucagcucugugcugaacgauauccugagcagacuggacaaggucgaggccgaggugcagaucgacagacugaucacaggcagacugcagagccuccagacauacgugacccagcagcugaucagagccgccgagauuagagccucugccaaucuggccgccaccaagaugucugagugugugcugggccagagcaagagaguggacuuuugcggcaagggcuaccaccugaugagcuucccucagucugccccucacggcgugguguuucugcacgugacauaugugcccgcucaagagaagaauuucaccaccgcuccagccaucugccacgacggcaaagcccacuuuccuagagaaggcguguucguguccaacggcacccauugguucgugacacagcggaacuucuacgagccccagaucaucaccaccgacaacaccuucgugucuggcaacugcgacgucgugaucggcauugugaacaauaccguguacgacccucugcagcccgagcuggacagcuucaaagaggaacuggacaaguacuuuaagaaccacacaagccccgacguggaccugggcgauaucagcggaaucaaugccagcgucgugaacauccagaaagagaucgaccggcugaacgagguggccaagaaucugaacgagagccugaucgaccugcaagaacuggggaaguacgagcaguacaucaaguggcccugguacaucuggcugggcuuuaucgccggacugauugccaucgugauggucacaaucaugcuguguugcaugaccagcugcuguagcugccugaagggcuguuguagcuguggcagcugcugcaaguucgacgaggacgauucugagcccgugcugaagggcgugaaacugcacuacacauga

SEQ ID NO: 23074 - RNA, 3822 nt, Artificial Sequence
  SARS-CoV-2/Wuhan/WIV05/2019__EPI_ISL_402128 spike protein CDS gc mod (1-1273)(E484K_D614G)
auguucguguuccuggugcugcugccucugguguccagccagugugugaaccugaccaccagaacacagcugccuccagccuacaccaacagcuuuaccagaggcguguacuaccccgacaagguguucagauccagcgugcugcacucuacccaggaccuguuccugccuuucuucagcaacgugaccugguuccacgccauccacguguccggcaccaauggcaccaagagauucgacaaccccgugcugcccuucaacgacgggguguacuuugccagcaccgagaaguccaacaucaucagaggcuggaucuucggcaccacacuggacagcaagacccagagccugcugaucgugaacaacgccaccaacguggucaucaaagugugcgaguuccaguucugcaacgaccccuuccugggcgucuacuaccacaagaacaacaagagcuggauggaaagcgaguuccggguguacagcagcgccaacaacugcaccuucgaguacgugucccagccuuuccugauggaccuggaaggcaagcagggcaacuucaagaaccugcgcgaguucguguuuaagaacaucgacggcuacuucaagaucuacagcaagcacaccccuaucaaccucgugcgggaucugccucagggcuucucugcucuggaaccccugguggaucugcccaucggcaucaacaucacccgguuucagacacugcuggcccugcacagaagcuaccugacaccuggcgauagcagcagcggauggacagcuggugccgccgcuuacuaugugggcuaccugcagccuagaaccuuccugcugaaguacaacgagaacggcaccaucaccgacgccguggauugugcucuggauccucugagcgagacaaagugcacccugaaguccuucaccguggaaaagggcaucuaccagaccagcaacuuccgggugcagcccaccgaauccaucgugcgguuccccaauaucaccaaucugugccccuucggcgagguguucaaugccaccagauucgccucuguguacgccuggaaccggaagcggaucagcaauugcguggccgacuacuccgugcuguacaacuccgccagcuucagcaccuucaagugcuacggcguguccccuaccaagcugaacgaccugugcuucacaaacguguacgccgacagcuucgugauccggggagaugaagugcggcagauugccccuggacagacaggcaagaucgccgacuacaacuacaagcugcccgacgacuucaccggcugugugauugccuggaacagcaacaaccuggacuccaaagucggcggcaacuacaauuaccuguaccggcuguuccggaaguccaaucugaagcccuucgagcgggacaucuccaccgagaucuaucaggccggcagcaccccuuguaacggcgugaagggcuucaacugcuacuucccacugcaguccuacggcuuucagcccacaaauggcgugggcuaucagcccuacagagugguggugcugagcuucgaacugcugcaugccccugccacagugugcggcccuaagaaaagcaccaaucucgugaagaacaaaugcgugaacuucaacuucaacggccugaccggcaccggcgugcugacagagagcaacaagaaguuccugccauuccagcaguuuggccgggauaucgccgauaccacagacgccguuagagauccccagacacuggaaauccuggacaucaccccuugcagcuucggcggagugucugugaucaccccuggcaccaacaccagcaaucagguggcagugcuguaccagggcgugaacuguaccgaagugcccguggccauucacgccgaucagcugacaccuacauggcggguguacuccaccggcagcaauguguuucagaccagagccggcugucugaucggagccgagcacgugaacaauagcuacgagugcgacauccccaucggcgcuggaaucugcgccagcuaccagacacagacaaacagcccucggagagccagaagcguggccagccagagcaucauugccuacacaaugucucugggcgccgagaacagcguggccuacuccaacaacucuaucgcuauccccaccaacuucaccaucagcgugaccacagagauccugccuguguccaugaccaagaccagcguggacugcaccauguacaucugcggcgauuccaccgagugcuccaaccugcugcugcaguacggcagcuucugcacccagcugaauagagcccugacagggaucgccguggaacaggacaagaacacccaagagguguucgcccaagugaagcagaucuacaagaccccuccuaucaaggacuucggcggcuucaauuucagccagauucugcccgauccuagcaagcccagcaagcggagcuucaucgaggaccugcuguucaacaaagugacacuggccgacgccggcuucaucaagcaguauggcgauugucugggcgacauugccgccagggaucugauuugcgcccagaaguuuaacggacugacagugcugccuccucugcugaccgaugagaugaucgcccaguacacaucugcccugcuggccggcacaaucacaagcggcuggacauuuggagcaggcgccgcucugcagauccccuuugcuaugcagauggccuaccgguucaacggcaucggagugacccagaaugugcuguacgagaaccagaagcugaucgccaaccaguucaacagcgccaucggcaagauccaggacagccugagcagcacagcaagcgcccugggaaagcugcaggacguggucaaccagaaugcccaggcacugaacacccuggucaagcagcuguccuccaacuucggcgccaucagcucugugcugaacgauauccugagcagacuggacaaggucgaggccgaggugcagaucgacagacugaucacaggcagacugcagagccuccagacauacgugacccagcagcugaucagagccgccgagauuagagccucugccaaucuggccgccaccaagaugucugagugugugcugggccagagcaagagaguggacuuuugcggcaagggcuaccaccugaugagcuucccucagucugccccucacggcgugguguuucugcacgugacauaugugcccgcucaagagaagaauuucaccaccgcuccagccaucugccacgacggcaaagcccacuuuccuagagaaggcguguucguguccaacggcacccauugguucgugacacagcggaacuucuacgagccccagaucaucaccaccgacaacaccuucgugucuggcaacugcgacgucgugaucggcauugugaacaauaccguguacgacccucugcagcccgagcuggacagcuucaaagaggaacuggacaaguacuuuaagaaccacacaagccccgacguggaccugggcgauaucagcggaaucaaugccagcgucgugaacauccagaaagagaucgaccggcugaacgagguggccaagaaucugaacgagagccugaucgaccugcaagaacuggggaaguacgagcaguacaucaaguggcccugguacaucuggcugggcuuuaucgccggacugauugccaucgugauggucacaaucaugcuguguugcaugaccagcugcuguagcugccugaagggcuguuguagcuguggcagcugcugcaaguucgacgaggacgauucugagcccgugcugaagggcgugaaacugcacuacacauga

SEQ ID NO: 23075 - RNA, 3822 nt, Artificial Sequence
  SARS-CoV-2/Wuhan/WIV05/2019__EPI_ISL_402128 spike protein CDS gc mod (1-1273)(L18F_T20N_P26S_D138Y_R190S_K417T_E484K_N501Y_D614G_H655Y _T1027I)
auguucguguuccuggugcugcugccucugguguccagccagugugugaacuucaccaacagaacacagcugccuagcgccuacaccaacagcuuuaccagaggcguguacuaccccgacaagguguucagauccagcgugcugcacucuacccaggaccuguuccugccuuucuucagcaacgugaccugguuccacgccauccacguguccggcaccaauggcaccaagagauucgacaaccccgugcugcccuucaacgacgggguguacuuugccagcaccgagaaguccaacaucaucagaggcuggaucuucggcaccacacuggacagcaagacccagagccugcugaucgugaacaacgccaccaacguggucaucaaagugugcgaguuccaguucugcaacuaccccuuccugggcgucuacuaccacaagaacaacaagagcuggauggaaagcgaguuccggguguacagcagcgccaacaacugcaccuucgaguacgugucccagccuuuccugauggaccuggaaggcaagcagggcaacuucaagaaccugagcgaguucguguuuaagaacaucgacggcuacuucaagaucuacagcaagcacaccccuaucaaccucgugcgggaucugccucagggcuucucugcucuggaaccccugguggaucugcccaucggcaucaacaucacccgguuucagacacugcuggcccugcacagaagcuaccugacaccuggcgauagcagcagcggauggacagcuggugccgccgcuuacuaugugggcuaccugcagccuagaaccuuccugcugaaguacaacgagaacggcaccaucaccgacgccguggauugugcucuggauccucugagcgagacaaagugcacccugaaguccuucaccguggaaaagggcaucuaccagaccagcaacuuccgggugcagcccaccgaauccaucgugcgguuccccaauaucaccaaucugugccccuucggcgagguguucaaugccaccagauucgccucuguguacgccuggaaccggaagcggaucagcaauugcguggccgacuacuccgugcuguacaacuccgccagcuucagcaccuucaagugcuacggcguguccccuaccaagcugaacgaccugugcuucacaaacguguacgccgacagcuucgugauccggggagaugaagugcggcagauugccccuggacagacaggcaccaucgccgacuacaacuacaagcugcccgacgacuucaccggcugugugauugccuggaacagcaacaaccuggacuccaaagucggcggcaacuacaauuaccuguaccggcuguuccggaaguccaaucugaagcccuucgagcgggacaucuccaccgagaucuaucaggccggcagcaccccuuguaacggcgugaagggcuucaacugcuacuucccacugcaguccuacggcuuucagcccacauacggcgugggcuaucagcccuacagagugguggugcugagcuucgaacugcugcaugccccugccacagugugcggcccuaagaaaagcaccaaucucgugaagaacaaaugcgugaacuucaacuucaacggccugaccggcaccggcgugcugacagagagcaacaagaaguuccugccauuccagcaguuuggccgggauaucgccgauaccacagacgccguuagagauccccagacacuggaaauccuggacaucaccccuugcagcuucggcggagugucugugaucaccccuggcaccaacaccagcaaucagguggcagugcuguaccagggcgugaacuguaccgaagugcccguggccauucacgccgaucagcugacaccuacauggcggguguacuccaccggcagcaauguguuucagaccagagccggcugucugaucggagccgaguacgugaacaauagcuacgagugcgacauccccaucggcgcuggaaucugcgccagcuaccagacacagacaaacagcccucggagagccagaagcguggccagccagagcaucauugccuacacaaugucucugggcgccgagaacagcguggccuacuccaacaacucuaucgcuauccccaccaacuucaccaucagcgugaccacagagauccugccuguguccaugaccaagaccagcguggacugcaccauguacaucugcggcgauuccaccgagugcuccaaccugcugcugcaguacggcagcuucugcacccagcugaauagagcccugacagggaucgccguggaacaggacaagaacacccaagagguguucgcccaagugaagcagaucuacaagaccccuccuaucaaggacuucggcggcuucaauuucagccagauucugcccgauccuagcaagcccagcaagcggagcuucaucgaggaccugcuguucaacaaagugacacuggccgacgccggcuucaucaagcaguauggcgauugucugggcgacauugccgccagggaucugauuugcgcccagaaguuuaacggacugacagugcugccuccucugcugaccgaugagaugaucgcccaguacacaucugcccugcuggccggcacaaucacaagcggcuggacauuuggagcaggcgccgcucugcagauccccuuugcuaugcagauggccuaccgguucaacggcaucggagugacccagaaugugcuguacgagaaccagaagcugaucgccaaccaguucaacagcgccaucggcaagauccaggacagccugagcagcacagcaagcgcccugggaaagcugcaggacguggucaaccagaaugcccaggcacugaacacccuggucaagcagcuguccuccaacuucggcgccaucagcucugugcugaacgauauccugagcagacuggacaaggucgaggccgaggugcagaucgacagacugaucacaggcagacugcagagccuccagacauacgugacccagcagcugaucagagccgccgagauuagagccucugccaaucuggccgccaucaagaugucugagugugugcugggccagagcaagagaguggacuuuugcggcaagggcuaccaccugaugagcuucccucagucugccccucacggcgugguguuucugcacgugacauaugugcccgcucaagagaagaauuucaccaccgcuccagccaucugccacgacggcaaagcccacuuuccuagagaaggcguguucguguccaacggcacccauugguucgugacacagcggaacuucuacgagccccagaucaucaccaccgacaacaccuucgugucuggcaacugcgacgucgugaucggcauugugaacaauaccguguacgacccucugcagcccgagcuggacagcuucaaagaggaacuggacaaguacuuuaagaaccacacaagccccgacguggaccugggcgauaucagcggaaucaaugccagcgucgugaacauccagaaagagaucgaccggcugaacgagguggccaagaaucugaacgagagccugaucgaccugcaagaacuggggaaguacgagcaguacaucaaguggcccugguacaucuggcugggcuuuaucgccggacugauugccaucgugauggucacaaucaugcuguguugcaugaccagcugcuguagcugccugaagggcuguuguagcuguggcagcugcugcaaguucgacgaggacgauucugagcccgugcugaagggcgugaaacugcacuacacauga

SEQ ID NO: 23076 - RNA, 3822 nt, Artificial Sequence
  SARS-CoV-2/Wuhan/WIV05/2019__EPI_ISL_402128 spike protein CDS gc mod (1-1273)(S13I_W152C_L452R_D614G)
auguucguguuccuggugcugcugccucugguguccauccagugugugaaccugaccaccagaacacagcugccuccagccuacaccaacagcuuuaccagaggcguguacuaccccgacaagguguucagauccagcgugcugcacucuacccaggaccuguuccugccuuucuucagcaacgugaccugguuccacgccauccacguguccggcaccaauggcaccaagagauucgacaaccccgugcugcccuucaacgacgggguguacuuugccagcaccgagaaguccaacaucaucagaggcuggaucuucggcaccacacuggacagcaagacccagagccugcugaucgugaacaacgccaccaacguggucaucaaagugugcgaguuccaguucugcaacgaccccuuccugggcgucuacuaccacaagaacaacaagagcugcauggaaagcgaguuccggguguacagcagcgccaacaacugcaccuucgaguacgugucccagccuuuccugauggaccuggaaggcaagcagggcaacuucaagaaccugcgcgaguucguguuuaagaacaucgacggcuacuucaagaucuacagcaagcacaccccuaucaaccucgugcgggaucugccucagggcuucucugcucuggaaccccugguggaucugcccaucggcaucaacaucacccgguuucagacacugcuggcccugcacagaagcuaccugacaccuggcgauagcagcagcggauggacagcuggugccgccgcuuacuaugugggcuaccugcagccuagaaccuuccugcugaaguacaacgagaacggcaccaucaccgacgccguggauugugcucuggauccucugagcgagacaaagugcacccugaaguccuucaccguggaaaagggcaucuaccagaccagcaacuuccgggugcagcccaccgaauccaucgugcgguuccccaauaucaccaaucugugccccuucggcgagguguucaaugccaccagauucgccucuguguacgccuggaaccggaagcggaucagcaauugcguggccgacuacuccgugcuguacaacuccgccagcuucagcaccuucaagugcuacggcguguccccuaccaagcugaacgaccugugcuucacaaacguguacgccgacagcuucgugauccggggagaugaagugcggcagauugccccuggacagacaggcaagaucgccgacuacaacuacaagcugcccgacgacuucaccggcugugugauugccuggaacagcaacaaccuggacuccaaagucggcggcaacuacaauuaccgcuaccggcuguuccggaaguccaaucugaagcccuucgagcgggacaucuccaccgagaucuaucaggccggcagcaccccuuguaacggcguggaaggcuucaacugcuacuucccacugcaguccuacggcuuucagcccacaaauggcgugggcuaucagcccuacagagugguggugcugagcuucgaacugcugcaugccccugccacagugugcggcccuaagaaaagcaccaaucucgugaagaacaaaugcgugaacuucaacuucaacggccugaccggcaccggcgugcugacagagagcaacaagaaguuccugccauuccagcaguuuggccgggauaucgccgauaccacagacgccguuagagauccccagacacuggaaauccuggacaucaccccuugcagcuucggcggagugucugugaucaccccuggcaccaacaccagcaaucagguggcagugcuguaccagggcgugaacuguaccgaagugcccguggccauucacgccgaucagcugacaccuacauggcggguguacuccaccggcagcaauguguuucagaccagagccggcugucugaucggagccgagcacgugaacaauagcuacgagugcgacauccccaucggcgcuggaaucugcgccagcuaccagacacagacaaacagcccucggagagccagaagcguggccagccagagcaucauugccuacacaaugucucugggcgccgagaacagcguggccuacuccaacaacucuaucgcuauccccaccaacuucaccaucagcgugaccacagagauccugccuguguccaugaccaagaccagcguggacugcaccauguacaucugcggcgauuccaccgagugcuccaaccugcugcugcaguacggcagcuucugcacccagcugaauagagcccugacagggaucgccguggaacaggacaagaacacccaagagguguucgcccaagugaagcagaucuacaagaccccuccuaucaaggacuucggcggcuucaauuucagccagauucugcccgauccuagcaagcccagcaagcggagcuucaucgaggaccugcuguucaacaaagugacacuggccgacgccggcuucaucaagcaguauggcgauugucugggcgacauugccgccagggaucugauuugcgcccagaaguuuaacggacugacagugcugccuccucugcugaccgaugagaugaucgcccaguacacaucugcccugcuggccggcacaaucacaagcggcuggacauuuggagcaggcgccgcucugcagauccccuuugcuaugcagauggccuaccgguucaacggcaucggagugacccagaaugugcuguacgagaaccagaagcugaucgccaaccaguucaacagcgccaucggcaagauccaggacagccugagcagcacagcaagcgcccugggaaagcugcaggacguggucaaccagaaugcccaggcacugaacacccuggucaagcagcuguccuccaacuucggcgccaucagcucugugcugaacgauauccugagcagacuggacaaggucgaggccgaggugcagaucgacagacugaucacaggcagacugcagagccuccagacauacgugacccagcagcugaucagagccgccgagauuagagccucugccaaucuggccgccaccaagaugucugagugugugcugggccagagcaagagaguggacuuuugcggcaagggcuaccaccugaugagcuucccucagucugccccucacggcgugguguuucugcacgugacauaugugcccgcucaagagaagaauuucaccaccgcuccagccaucugccacgacggcaaagcccacuuuccuagagaaggcguguucguguccaacggcacccauugguucgugacacagcggaacuucuacgagccccagaucaucaccaccgacaacaccuucgugucuggcaacugcgacgucgugaucggcauugugaacaauaccguguacgacccucugcagcccgagcuggacagcuucaaagaggaacuggacaaguacuuuaagaaccacacaagccccgacguggaccugggcgauaucagcggaaucaaugccagcgucgugaacauccagaaagagaucgaccggcugaacgagguggccaagaaucugaacgagagccugaucgaccugcaagaacuggggaaguacgagcaguacaucaaguggcccugguacaucuggcugggcuuuaucgccggacugauugccaucgugauggucacaaucaugcuguguugcaugaccagcugcuguagcugccugaagggcuguuguagcuguggcagcugcugcaaguucgacgaggacgauucugagcccgugcugaagggcgugaaacugcacuacacauga

SEQ ID NO: 23077 - RNA, 3822 nt, Artificial Sequence; identical to SEQ ID NO: 137
  SARS-CoV-2/Wuhan/WIV05/2019__EPI_ISL_402128 spike protein CDS gc (1-1273)(K986P_V987P)

SEQ ID NO: 23078 - RNA, 3822 nt, Artificial Sequence; identical to SEQ ID NO: 22765
  SARS-CoV-2/Wuhan/WIV05/2019__EPI_ISL_402128 spike protein CDS gc (1-1273)(K986P_V987P_ D614G)

SEQ ID NO: 23079 - RNA, 3822 nt, Artificial Sequence; identical to SEQ ID NO: 22767
  SARS-CoV-2/Wuhan/WIV05/2019__EPI_ISL_402128 spike protein CDS gc (1-1273)(K986P_V987P_A222V_D614G)

SEQ ID NO: 23080 - RNA, 3822 nt, Artificial Sequence; identical to SEQ ID NO: 22769
  SARS-CoV-2/Wuhan/WIV05/2019__EPI_ISL_402128 spike protein CDS gc (1-1273)(K986P_V987P_N439K_D614G)

SEQ ID NO: 23081 - RNA, 3822 nt, Artificial Sequence; identical to SEQ ID NO: 22771
  SARS-CoV-2/Wuhan/WIV05/2019__EPI_ISL_402128 spike protein CDS gc (1-1273)(K986P_V987P_S477N_D614G)

SEQ ID NO: 23082 - RNA, 3822 nt, Artificial Sequence; identical to SEQ ID NO: 22773
  SARS-CoV-2/Wuhan/WIV05/2019__EPI_ISL_402128 spike protein CDS gc (1-1273)(K986P_V987P_N501Y_D614G)

SEQ ID NO: 23083 - RNA, 3816 nt, Artificial Sequence; identical to SEQ ID NO: 22775
  SARS-CoV-2/Wuhan/WIV05/2019__EPI_ISL_402128 spike protein CDS gc (1-1273)(K986P_V987P_H69del_V70del_D614G)

SEQ ID NO: 23084 - RNA, 3822 nt, Artificial Sequence; identical to SEQ ID NO: 22777
  SARS-CoV-2/Wuhan/WIV05/2019__EPI_ISL_402128 spike protein CDS gc (1-1273)(K986P_V987P_Y453F_D614G)

SEQ ID NO: 23085 - RNA, 3822 nt, Artificial Sequence; identical to SEQ ID NO: 22779
  SARS-CoV-2/Wuhan/WIV05/2019__EPI_ISL_402128 spike protein CDS gc (1-1273)(K986P_V987P_D614G_I692V)

SEQ ID NO: 23086 - RNA, 3822 nt, Artificial Sequence; identical to SEQ ID NO: 22781
  SARS-CoV-2/Wuhan/WIV05/2019__EPI_ISL_402128 spike protein CDS gc (1-1273)(K986P_V987P_D614G_M1229I)

SEQ ID NO: 23087 - RNA, 3816 nt, Artificial Sequence; identical to SEQ ID NO: 22783
  SARS-CoV-2/Wuhan/WIV05/2019__EPI_ISL_402128 spike protein CDS gc (1-1273)(K986P_V987P_H69del_V70del_A222V_Y453F_S477N_D614G_I692V)

SEQ ID NO: 23088 - RNA, 3816 nt, Artificial Sequence; identical to SEQ ID NO: 22785
  SARS-CoV-2/Wuhan/WIV05/2019__EPI_ISL_402128 spike protein CDS gc (1-1273)(K986P_V987P_H69del_V70del_Y453F_D614G_I692V_M1229I)

SEQ ID NO: 23089 - RNA, 3813 nt, Artificial Sequence
  SARS-CoV-2/Wuhan/WIV05/2019__EPI_ISL_402128 spike protein CDS gc (1-1273)(K986P_V987P_K986P_V987P_H69del_V70del_Y144del_N501Y_A570 D_D614G_P681H_T716I_S982A_D1118H)
auguucguguuccugguccuccugccccuggugagcucccagugcgugaaccucaccacccgcacgcagcugccgcccgccuacaccaacagcuucacccggggcgucuacuaccccgacaagguguuccgcuccagcgugcugcacuccacccaggaccucuuccugcccuucuucagcaacgucacgugguuccacgccaucuccgggaccaacggcaccaagcgguucgacaacccggugcugcccuucaacgacggggucuacuucgcgagcaccgagaaguccaacaucauccgcggcuggaucuucgggacgacccucgacagcaagacccagucccugcugaucgugaacaacgccaccaacguggucaucaaggugugcgaguuccaguucugcaacgaccccuuccucggcguguaccacaagaacaacaagagcuggauggaguccgaguuccgggucuacagcuccgccaacaacugcacguucgaguacgugagccagcccuuccugauggaccuggagggcaagcaggggaacuucaagaaccuccgcgaguucguguucaagaacaucgacggcuacuucaagaucuacuccaagcacaccccgaucaaccugguccgggaccugccccagggguucagcgcccucgagccccugguggaccugcccaucggcaucaacaucacccgcuuccagacccuccuggcccugcaccgguccuaccucacgccgggggacagcagcuccggcuggaccgcgggcgccgccgccuacuacgugggguaccugcagccccgcaccuuccugcucaaguacaacgagaacggcaccaucacggacgcggucgacugcgcccuggacccccugagcgagaccaagugcacccucaaguccuucaccguggagaaggggaucuaccagacgagcaacuuccgggugcagcccaccgaguccaucguccgcuucccgaacaucaccaaccugugccccuucggcgagguguucaacgccacccgguucgccagcgucuacgccuggaaccgcaagcggaucuccaacugcguggcggacuacagcgugcuguacaacuccgccagcuucuccacguucaagugcuacggcgucagccccaccaagcucaacgaccugugcuucaccaacguguacgccgacuccuucgugauccgcggggacgagguccggcagaucgcccccggccagaccgggaagaucgccgacuacaacuacaagcugccggacgacuucacgggcugcgugaucgcguggaacagcaacaaccucgacuccaaggucgggggcaacuacaacuaccuguaccgccuguuccgcaagagcaaccucaagcccuucgagcgggacaucuccaccgagaucuaccaggccggcagcacccccugcaacgggguggagggcuucaacugcuacuucccccugcaguccuacggguuccagccgaccuacggcgugggguaccagcccuaccggguggucgugcugagcuucgagcuccugcacgcccccgccacggugugcggccccaagaaguccaccaaccuggucaagaacaagugcgugaacuucaacuucaacggccucaccgggaccggcgugcugaccgagagcaacaagaaguuccugccguuccagcaguucgggcgcgacaucgacgacacgaccgacgcgguccgcgacccccagacccuggagauccucgacaucacccccugcagcuucggcgggguguccgugaucacgccgggcaccaacaccagcaaccaggucgccgugcuguaccagggcgugaacugcaccgagguccccguggccauccacgccgaccagcugacgcccaccuggcggguguacuccaccggcagcaacgucuuccagacccgcgccgggugccucaucggcgcggagcacgugaacaacuccuacgagugcgacauccccaucggggccggcaucugcgccagcuaccagacgcagaccaacucccaccggcgcgcccggagcguggcgucccagagcaucaucgccuacaccaugucccugggcgccgagaacagcgucgccuacuccaacaacagcaucgccauccccaucaacuucacgaucuccgugaccaccgagauccugcccgugagcaugaccaagacgagcgucgacugcaccauguacaucugcggggacuccaccgagugcagcaaccuccugcugcaguacggcuccuucugcacccagcucaaccgcgcgcugacggggaucgccguggagcaggacaagaacacccaggagguguucgcccaggucaagcagaucuacaagacgcccccgaucaaggacuucggcggguucaacuucagccagauccugcccgaccccuccaagcccagcaagcgguccuucaucgaggaccuccuguucaacaaggugacccuggccgacgccggcuucaucaagcaguacggcgacugccucggggacaucgcggcccgcgaccugaucugcgcccagaaguucaacggccugaccgugcucccgccccugcugaccgacgagaugaucgcccaguacaccagcgcccuccuggcggggaccaucacguccggcuggaccuucggggccggcgccgcccugcagauccccuucgcgaugcagauggccuaccgguucaacggcaucggggucacccagaacgugcucuacgagaaccagaagcugaucgccaaccaguucaacagcgccaucggcaagauccaggacucccugagcuccaccgccagcgcgcucgggaagcugcaggacguggucaaccagaacgcccaggcccugaacacgcucgugaagcagcuguccagcaacuucggcgccaucuccagcgugcugaacgacauccucgcccgccuggacccgcccgaggccgaggugcagaucgaccggcugaucaccgggcgccuccagagccugcagaccuacgugacccagcagcugauccgggcggccgagauccgcgccagcgccaaccucgccgcgaccaagauguccgagugcguccugggccagagcaagcggguggacuucugcggcaagggguaccaccugauguccuucccccagagcgccccgcacggcguggucuuccuccacgugacguacguccccgcccaggagaagaacuucaccaccgcccccgcgaucugccacgacgggaaggcccacuucccccgcgagggcguguucguguccaacgggacccacugguucgucacgcagcggaacuucuacgagccgcagaucaucaccacccacaacaccuucgugagcggcaacugcgacguggucaucggcaucgugaacaacacgguguacgacccccugcagcccgagcuggacuccuucaaggaggagcucgacaaguacuucaagaaccacaccagccccgacgucgaccugggggacaucuccggcaucaacgccagcguggugaacauccagaaggagaucgaccgccugaacgaggucgccaagaaccucaacgagucccugaucgaccugcaggagcucgggaaguacgagcaguacaucaaguggccgugguacaucuggcugggcuucaucgccggccugaucgcgaucgugauggugaccaucaugcucugcugcaugaccagcugcugcuccugccugaaggggugcugcagcugcggcuccugcugcaaguucgacgaggacgacagcgagcccguccugaagggggugaagcuccacuacacguga

SEQ ID NO: 23090 - RNA, 3822 nt, Artificial Sequence
  SARS-CoV-2/Wuhan/WIV05/2019__EPI_ISL_402128 spike protein CDS gc (1-1273)(K986P_V987P_K986P_V987P_K417N_E484K_N501Y_D614G)
auguucguguuccugguccuccugccccuggugagcucccagugcgugaaccucaccacccgcacgcagcugccgcccgccuacaccaacagcuucacccggggcgucuacuaccccgacaagguguuccgcuccagcgugcugcacuccacccaggaccucuuccugcccuucuucagcaacgucacgugguuccacgccauccacguguccgggaccaacggcaccaagcgguucgacaacccggugcugcccuucaacgacggggucuacuucgcgagcaccgagaaguccaacaucauccgcggcuggaucuucgggacgacccucgacagcaagacccagucccugcugaucgugaacaacgccaccaacguggucaucaaggugugcgaguuccaguucugcaacgaccccuuccucggcguguacuaccacaagaacaacaagagcuggauggaguccgaguuccgggucuacagcuccgccaacaacugcacguucgaguacgugagccagcccuuccugauggaccuggagggcaagcaggggaacuucaagaaccuccgcgaguucguguucaagaacaucgacggcuacuucaagaucuacuccaagcacaccccgaucaaccugguccgggaccugccccagggguucagcgcccucgagccccugguggaccugcccaucggcaucaacaucacccgcuuccagacccuccuggcccugcaccgguccuaccucacgccgggggacagcagcuccggcuggaccgcgggcgccgccgccuacuacgugggguaccugcagccccgcaccuuccugcucaaguacaacgagaacggcaccaucacggacgcggucgacugcgcccuggacccccugagcgagaccaagugcacccucaaguccuucaccguggagaaggggaucuaccagacgagcaacuuccgggugcagcccaccgaguccaucguccgcuucccgaacaucaccaaccugugccccuucggcgagguguucaacgccacccgguucgccagcgucuacgccuggaaccgcaagcggaucuccaacugcguggcggacuacagcgugcuguacaacuccgccagcuucuccacguucaagugcuacggcgucagccccaccaagcucaacgaccugugcuucaccaacguguacgccgacuccuucgugauccgcggggacgagguccggcagaucgcccccggccagaccgggaacaucgccgacuacaacuacaagcugccggacgacuucacgggcugcgugaucgcguggaacagcaacaaccucgacuccaaggucgggggcaacuacaacuaccuguaccgccuguuccgcaagagcaaccucaagcccuucgagcgggacaucuccaccgagaucuaccaggccggcagcacccccugcaacggggugaagggcuucaacugcuacuucccccugcaguccuacggguuccagccgaccuacggcgugggguaccagcccuaccggguggucgugcugagcuucgagcuccugcacgcccccgccacggugugcggccccaagaaguccaccaaccuggucaagaacaagugcgugaacuucaacuucaacggccucaccgggaccggcgugcugaccgagagcaacaagaaguuccugccguuccagcaguucgggcgcgacaucgccgacacgaccgacgcgguccgcgacccccagacccuggagauccucgacaucacccccugcagcuucggcgggguguccgugaucacgccgggcaccaacaccagcaaccaggucgccgugcuguaccagggcgugaacugcaccgagguccccguggccauccacgccgaccagcugacgcccaccuggcggguguacuccaccggcagcaacgucuuccagacccgcgccgggugccucaucggcgcggagcacgugaacaacuccuacgagugcgacauccccaucggggccggcaucugcgccagcuaccagacgcagaccaacuccccgcggcgcgcccggagcguggcgucccagagcaucaucgccuacaccaugucccugggcgccgagaacagcgucgccuacuccaacaacagcaucgccauccccaccaacuucacgaucuccgugaccaccgagauccugcccgugagcaugaccaagacgagcgucgacugcaccauguacaucugcggggacuccaccgagugcagcaaccuccugcugcaguacggcuccuucugcacccagcucaaccgcgcgcugacggggaucgccguggagcaggacaagaacacccaggagguguucgcccaggucaagcagaucuacaagacgcccccgaucaaggacuucggcggguucaacuucagccagauccugcccgaccccuccaagcccagcaagcgguccuucaucgaggaccuccuguucaacaaggugacccuggccgacgccggcuucaucaagcaguacggcgacugccucggggacaucgcggcccgcgaccugaucugcgcccagaaguucaacggccugaccgugcucccgccccugcugaccgacgagaugaucgcccaguacaccagcgcccuccuggcggggaccaucacguccggcuggaccuucggggccggcgccgcccugcagauccccuucgcgaugcagauggccuaccgguucaacggcaucggggucacccagaacgugcucuacgagaaccagaagcugaucgccaaccaguucaacagcgccaucggcaagauccaggacucccugagcuccaccgccagcgcgcucgggaagcugcaggacguggucaaccagaacgcccaggcccugaacacgcucgugaagcagcuguccagcaacuucggcgccaucuccagcgugcugaacgacauccucucccgccuggacccgcccgaggccgaggugcagaucgaccggcugaucaccgggcgccuccagagccugcagaccuacgugacccagcagcugauccgggcggccgagauccgcgccagcgccaaccucgccgcgaccaagauguccgagugcguccugggccagagcaagcggguggacuucugcggcaagggguaccaccugauguccuucccccagagcgccccgcacggcguggucuuccuccacgugacguacguccccgcccaggagaagaacuucaccaccgcccccgcgaucugccacgacgggaaggcccacuucccccgcgagggcguguucguguccaacgggacccacugguucgucacgcagcggaacuucuacgagccgcagaucaucaccaccgacaacaccuucgugagcggcaacugcgacguggucaucggcaucgugaacaacacgguguacgacccccugcagcccgagcuggacuccuucaaggaggagcucgacaaguacuucaagaaccacaccagccccgacgucgaccugggggacaucuccggcaucaacgccagcguggugaacauccagaaggagaucgaccgccugaacgaggucgccaagaaccucaacgagucccugaucgaccugcaggagcucgggaaguacgagcaguacaucaaguggccgugguacaucuggcugggcuucaucgccggccugaucgcgaucgugauggugaccaucaugcucugcugcaugaccagcugcugcuccugccugaaggggugcugcagcugcggcuccugcugcaaguucgacgaggacgacagcgagcccguccugaagggggugaagcuccacuacacguga

SEQ ID NO: 23091 - RNA, 3813 nt, Artificial Sequence
  SARS-CoV-2/Wuhan/WIV05/2019__EPI_ISL_402128 spike protein CDS gc (1-1273)(K986P_V987P_K986P_V987P_L18F_D80A_D215G_L242del_A243del_ L244del_R246I_K417N_E484K_N501Y_D614G_A701V)
auguucguguuccugguccuccugccccuggugagcucccagugcgugaacuucaccacccgcacgcagcugccgcccgccuacaccaacagcuucacccggggcgucuacuaccccgacaagguguuccgcuccagcgugcugcacuccacccaggaccucuuccugcccuucuucagcaacgucacgugguuccacgccauccacguguccgggaccaacggcaccaagcgguucgccaacccggugcugcccuucaacgacggggucuacuucgcgagcaccgagaaguccaacaucauccgcggcuggaucuucgggacgacccucgacagcaagacccagucccugcugaucgugaacaacgccaccaacguggucaucaaggugugcgaguuccaguucugcaacgaccccuuccucggcguguacuaccacaagaacaacaagagcuggauggaguccgaguuccgggucuacagcuccgccaacaacugcacguucgaguacgugagccagcccuuccugauggaccuggagggcaagcaggggaacuucaagaaccuccgcgaguucguguucaagaacaucgacggcuacuucaagaucuacuccaagcacaccccgaucaaccugguccggggccugccccagggguucagcgcccucgagccccugguggaccugcccaucggcaucaacaucacccgcuuccagacccuccacaucuccuaccucacgccgggggacagcagcuccggcuggaccgcgggcgccgccgccuacuacgugggguaccugcagccccgcaccuuccugcucaaguacaacgagaacggcaccaucacggacgcggucgacugcgcccuggacccccugagcgagaccaagugcacccucaaguccuucaccguggagaaggggaucuaccagacgagcaacuuccgggugcagcccaccgaguccaucguccgcuucccgaacaucaccaaccugugccccuucggcgagguguucaacgccacccgguucgccagcgucuacgccuggaaccgcaagcggaucuccaacugcguggcggacuacagcgugcuguacaacuccgccagcuucuccacguucaagugcuacggcgucagccccaccaagcucaacgaccugugcuucaccaacguguacgccgacuccuucgugauccgcggggacgagguccggcagaucgcccccggccagaccgggaacaucgccgacuacaacuacaagcugccggacgacuucacgggcugcgugaucgcguggaacagcaacaaccucgacuccaaggucgggggcaacuacaacuaccuguaccgccuguuccgcaagagcaaccucaagcccuucgagcgggacaucuccaccgagaucuaccaggccggcagcacccccugcaacggggugaagggcuucaacugcuacuucccccugcaguccuacggguuccagccgaccuacggcgugggguaccagcccuaccggguggucgugcugagcuucgagcuccugcacgcccccgccacggugugcggccccaagaaguccaccaaccuggucaagaacaagugcgugaacuucaacuucaacggccucaccgggaccggcgugcugaccgagagcaacaagaaguuccugccguuccagcaguucgggcgcgacaucgccgacacgaccgacgcgguccgcgacccccagacccuggagauccucgacaucacccccugcagcuucggcgggguguccgugaucacgccgggcaccaacaccagcaaccaggucgccgugcuguaccagggcgugaacugcaccgagguccccguggccauccacgccgaccagcugacgcccaccuggcggguguacuccaccggcagcaacgucuuccagacccgcgccgggugccucaucggcgcggagcacgugaacaacuccuacgagugcgacauccccaucggggccggcaucugcgccagcuaccagacgcagaccaacuccccgcggcgcgcccggagcguggcgucccagagcaucaucgccuacaccaugucccugggcguggagaacagcgucgccuacuccaacaacagcaucgccauccccaccaacuucacgaucuccgugaccaccgagauccugcccgugagcaugaccaagacgagcgucgacugcaccauguacaucugcggggacuccaccgagugcagcaaccuccugcugcaguacggcuccuucugcacccagcucaaccgcgcgcugacggggaucgccguggagcaggacaagaacacccaggagguguucgcccaggucaagcagaucuacaagacgcccccgaucaaggacuucggcggguucaacuucagccagauccugcccgaccccuccaagcccagcaagcgguccuucaucgaggaccuccuguucaacaaggugacccuggccgacgccggcuucaucaagcaguacggcgacugccucggggacaucgcggcccgcgaccugaucugcgcccagaaguucaacggccugaccgugcucccgccccugcugaccgacgagaugaucgcccaguacaccagcgcccuccuggcggggaccaucacguccggcuggaccuucggggccggcgccgcccugcagauccccuucgcgaugcagauggccuaccgguucaacggcaucggggucacccagaacgugcucuacgagaaccagaagcugaucgccaaccaguucaacagcgccaucggcaagauccaggacucccugagcuccaccgccagcgcgcucgggaagcugcaggacguggucaaccagaacgcccaggcccugaacacgcucgugaagcagcuguccagcaacuucggcgccaucuccagcgugcugaacgacauccucucccgccuggacccgcccgaggccgaggugcagaucgaccggcugaucaccgggcgccuccagagccugcagaccuacgugacccagcagcugauccgggcggccgagauccgcgccagcgccaaccucgccgcgaccaagauguccgagugcguccugggccagagcaagcggguggacuucugcggcaagggguaccaccugauguccuucccccagagcgccccgcacggcguggucuuccuccacgugacguacguccccgcccaggagaagaacuucaccaccgcccccgcgaucugccacgacgggaaggcccacuucccccgcgagggcguguucguguccaacgggacccacugguucgucacgcagcggaacuucuacgagccgcagaucaucaccaccgacaacaccuucgugagcggcaacugcgacguggucaucggcaucgugaacaacacgguguacgacccccugcagcccgagcuggacuccuucaaggaggagcucgacaaguacuucaagaaccacaccagccccgacgucgaccugggggacaucuccggcaucaacgccagcguggugaacauccagaaggagaucgaccgccugaacgaggucgccaagaaccucaacgagucccugaucgaccugcaggagcucgggaaguacgagcaguacaucaaguggccgugguacaucuggcugggcuucaucgccggccugaucgcgaucgugauggugaccaucaugcucugcugcaugaccagcugcugcuccugccugaaggggugcugcagcugcggcuccugcugcaaguucgacgaggacgacagcgagcccguccugaagggggugaagcuccacuacacguga

SEQ ID NO: 23092 - RNA, 3822 nt, Artificial Sequence
  SARS-CoV-2/Wuhan/WIV05/2019__EPI_ISL_402128 spike protein CDS gc (1-1273)(K986P_V987P_K986P_V987P_E484K_D614G)
auguucguguuccugguccuccugccccuggugagcucccagugcgugaaccucaccacccgcacgcagcugccgcccgccuacaccaacagcuucacccggggcgucuacuaccccgacaagguguuccgcuccagcgugcugcacuccacccaggaccucuuccugcccuucuucagcaacgucacgugguuccacgccauccacguguccgggaccaacggcaccaagcgguucgacaacccggugcugcccuucaacgacggggucuacuucgcgagcaccgagaaguccaacaucauccgcggcuggaucuucgggacgacccucgacagcaagacccagucccugcugaucgugaacaacgccaccaacguggucaucaaggugugcgaguuccaguucugcaacgaccccuuccucggcguguacuaccacaagaacaacaagagcuggauggaguccgaguuccgggucuacagcuccgccaacaacugcacguucgaguacgugagccagcccuuccugauggaccuggagggcaagcaggggaacuucaagaaccuccgcgaguucguguucaagaacaucgacggcuacuucaagaucuacuccaagcacaccccgaucaaccugguccgggaccugccccagggguucagcgcccucgagccccugguggaccugcccaucggcaucaacaucacccgcuuccagacccuccuggcccugcaccgguccuaccucacgccgggggacagcagcuccggcuggaccgcgggcgccgccgccuacuacgugggguaccugcagccccgcaccuuccugcucaaguacaacgagaacggcaccaucacggacgcggucgacugcgcccuggacccccugagcgagaccaagugcacccucaaguccuucaccguggagaaggggaucuaccagacgagcaacuuccgggugcagcccaccgaguccaucguccgcuucccgaacaucaccaaccugugccccuucggcgagguguucaacgccacccgguucgccagcgucuacgccuggaaccgcaagcggaucuccaacugcguggcggacuacagcgugcuguacaacuccgccagcuucuccacguucaagugcuacggcgucagccccaccaagcucaacgaccugugcuucaccaacguguacgccgacuccuucgugauccgcggggacgagguccggcagaucgcccccggccagaccgggaagaucgccgacuacaacuacaagcugccggacgacuucacgggcugcgugaucgcguggaacagcaacaaccucgacuccaaggucgggggcaacuacaacuaccuguaccgccuguuccgcaagagcaaccucaagcccuucgagcgggacaucuccaccgagaucuaccaggccggcagcacccccugcaacggggugaagggcuucaacugcuacuucccccugcaguccuacggguuccagccgaccaacggcgugggguaccagcccuaccggguggucgugcugagcuucgagcuccugcacgcccccgccacggugugcggccccaagaaguccaccaaccuggucaagaacaagugcgugaacuucaacuucaacggccucaccgggaccggcgugcugaccgagagcaacaagaaguuccugccguuccagcaguucgggcgcgacaucgccgacacgaccgacgcgguccgcgacccccagacccuggagauccucgacaucacccccugcagcuucggcgggguguccgugaucacgccgggcaccaacaccagcaaccaggucgccgugcuguaccagggcgugaacugcaccgagguccccguggccauccacgccgaccagcugacgcccaccuggcggguguacuccaccggcagcaacgucuuccagacccgcgccgggugccucaucggcgcggagcacgugaacaacuccuacgagugcgacauccccaucggggccggcaucugcgccagcuaccagacgcagaccaacuccccgcggcgcgcccggagcguggcgucccagagcaucaucgccuacaccaugucccugggcgccgagaacagcgucgccuacuccaacaacagcaucgccauccccaccaacuucacgaucuccgugaccaccgagauccugcccgugagcaugaccaagacgagcgucgacugcaccauguacaucugcggggacuccaccgagugcagcaaccuccugcugcaguacggcuccuucugcacccagcucaaccgcgcgcugacggggaucgccguggagcaggacaagaacacccaggagguguucgcccaggucaagcagaucuacaagacgcccccgaucaaggacuucggcggguucaacuucagccagauccugcccgaccccuccaagcccagcaagcgguccuucaucgaggaccuccuguucaacaaggugacccuggccgacgccggcuucaucaagcaguacggcgacugccucggggacaucgcggcccgcgaccugaucugcgcccagaaguucaacggccugaccgugcucccgccccugcugaccgacgagaugaucgcccaguacaccagcgcccuccuggcggggaccaucacguccggcuggaccuucggggccggcgccgcccugcagauccccuucgcgaugcagauggccuaccgguucaacggcaucggggucacccagaacgugcucuacgagaaccagaagcugaucgccaaccaguucaacagcgccaucggcaagauccaggacucccugagcuccaccgccagcgcgcucgggaagcugcaggacguggucaaccagaacgcccaggcccugaacacgcucgugaagcagcuguccagcaacuucggcgccaucuccagcgugcugaacgacauccucucccgccuggacccgcccgaggccgaggugcagaucgaccggcugaucaccgggcgccuccagagccugcagaccuacgugacccagcagcugauccgggcggccgagauccgcgccagcgccaaccucgccgcgaccaagauguccgagugcguccugggccagagcaagcggguggacuucugcggcaagggguaccaccugauguccuucccccagagcgccccgcacggcguggucuuccuccacgugacguacguccccgcccaggagaagaacuucaccaccgcccccgcgaucugccacgacgggaaggcccacuucccccgcgagggcguguucguguccaacgggacccacugguucgucacgcagcggaacuucuacgagccgcagaucaucaccaccgacaacaccuucgugagcggcaacugcgacguggucaucggcaucgugaacaacacgguguacgacccccugcagcccgagcuggacuccuucaaggaggagcucgacaaguacuucaagaaccacaccagccccgacgucgaccugggggacaucuccggcaucaacgccagcguggugaacauccagaaggagaucgaccgccugaacgaggucgccaagaaccucaacgagucccugaucgaccugcaggagcucgggaaguacgagcaguacaucaaguggccgugguacaucuggcugggcuucaucgccggccugaucgcgaucgugauggugaccaucaugcucugcugcaugaccagcugcugcuccugccugaaggggugcugcagcugcggcuccugcugcaaguucgacgaggacgacagcgagcccguccugaagggggugaagcuccacuacacguga

SEQ ID NO: 23093 - RNA, 3822 nt, Artificial Sequence
  SARS-CoV-2/Wuhan/WIV05/2019__EPI_ISL_402128 spike protein CDS gc (1-1273)(K986P_V987P_K986P_V987P_L18F_T20N_P26S_D138Y_R190S_K417T _E484K_N501Y_D614G_H655Y_T1027I)
auguucguguuccugguccuccugccccuggugagcucccagugcgugaacuucaccaaccgcacgcagcugccgagcgccuacaccaacagcuucacccggggcgucuacuaccccgacaagguguuccgcuccagcgugcugcacuccacccaggaccucuuccugcccuucuucagcaacgucacgugguuccacgccauccacguguccgggaccaacggcaccaagcgguucgacaacccggugcugcccuucaacgacggggucuacuucgcgagcaccgagaaguccaacaucauccgcggcuggaucuucgggacgacccucgacagcaagacccagucccugcugaucgugaacaacgccaccaacguggucaucaaggugugcgaguuccaguucugcaacuaccccuuccucggcguguacuaccacaagaacaacaagagcuggauggaguccgaguuccgggucuacagcuccgccaacaacugcacguucgaguacgugagccagcccuuccugauggaccuggagggcaagcaggggaacuucaagaaccucagcgaguucguguucaagaacaucgacggcuacuucaagaucuacuccaagcacaccccgaucaaccugguccgggaccugccccagggguucagcgcccucgagccccugguggaccugcccaucggcaucaacaucacccgcuuccagacccuccuggcccugcaccgguccuaccucacgccgggggacagcagcuccggcuggaccgcgggcgccgccgccuacuacgugggguaccugcagccccgcaccuuccugcucaaguacaacgagaacggcaccaucacggacgcggucgacugcgcccuggacccccugagcgagaccaagugcacccucaaguccuucaccguggagaaggggaucuaccagacgagcaacuuccgggugcagcccaccgaguccaucguccgcuucccgaacaucaccaaccugugccccuucggcgagguguucaacgccacccgguucgccagcgucuacgccuggaaccgcaagcggaucuccaacugcguggcggacuacagcgugcuguacaacuccgccagcuucuccacguucaagugcuacggcgucagccccaccaagcucaacgaccugugcuucaccaacguguacgccgacuccuucgugauccgcggggacgagguccggcagaucgcccccggccagaccgggaccaucgccgacuacaacuacaagcugccggacgacuucacgggcugcgugaucgcguggaacagcaacaaccucgacuccaaggucgggggcaacuacaacuaccuguaccgccuguuccgcaagagcaaccucaagcccuucgagcgggacaucuccaccgagaucuaccaggccggcagcacccccugcaacggggugaagggcuucaacugcuacuucccccugcaguccuacggguuccagccgaccuacggcgugggguaccagcccuaccggguggucgugcugagcuucgagcuccugcacgcccccgccacggugugcggccccaagaaguccaccaaccuggucaagaacaagugcgugaacuucaacuucaacggccucaccgggaccggcgugcugaccgagagcaacaagaaguuccugccguuccagcaguucgggcgcgacaucgccgacacgaccgacgcgguccgcgacccccagacccuggagauccucgacaucacccccugcagcuucggcgggguguccgugaucacgccgggcaccaacaccagcaaccaggucgccgugcuguaccagggcgugaacugcaccgagguccccguggccauccacgccgaccagcugacgcccaccuggcggguguacuccaccggcagcaacgucuuccagacccgcgccgggugccucaucggcgcggaguacgugaacaacuccuacgagugcgacauccccaucggggccggcaucugcgccagcuaccagacgcagaccaacuccccgcggcgcgcccggagcguggcgucccagagcaucaucgccuacaccaugucccugggcgccgagaacagcgucgccuacuccaacaacagcaucgccauccccaccaacuucacgaucuccgugaccaccgagauccugcccgugagcaugaccaagacgagcgucgacugcaccauguacaucugcggggacuccaccgagugcagcaaccuccugcugcaguacggcuccuucugcacccagcucaaccgcgcgcugacggggaucgccguggagcaggacaagaacacccaggagguguucgcccaggucaagcagaucuacaagacgcccccgaucaaggacuucggcggguucaacuucagccagauccugcccgaccccuccaagcccagcaagcgguccuucaucgaggaccuccuguucaacaaggugacccuggccgacgccggcuucaucaagcaguacggcgacugccucggggacaucgcggcccgcgaccugaucugcgcccagaaguucaacggccugaccgugcucccgccccugcugaccgacgagaugaucgcccaguacaccagcgcccuccuggcggggaccaucacguccggcuggaccuucggggccggcgccgcccugcagauccccuucgcgaugcagauggccuaccgguucaacggcaucggggucacccagaacgugcucuacgagaaccagaagcugaucgccaaccaguucaacagcgccaucggcaagauccaggacucccugagcuccaccgccagcgcgcucgggaagcugcaggacguggucaaccagaacgcccaggcccugaacacgcucgugaagcagcuguccagcaacuucggcgccaucuccagcgugcugaacgacauccucucccgccuggacccgcccgaggccgaggugcagaucgaccggcugaucaccgggcgccuccagagccugcagaccuacgugacccagcagcugauccgggcggccgagauccgcgccagcgccaaccucgccgcgaucaagauguccgagugcguccugggccagagcaagcggguggacuucugcggcaagggguaccaccugauguccuucccccagagcgccccgcacggcguggucuuccuccacgugacguacguccccgcccaggagaagaacuucaccaccgcccccgcgaucugccacgacgggaaggcccacuucccccgcgagggcguguucguguccaacgggacccacugguucgucacgcagcggaacuucuacgagccgcagaucaucaccaccgacaacaccuucgugagcggcaacugcgacguggucaucggcaucgugaacaacacgguguacgacccccugcagcccgagcuggacuccuucaaggaggagcucgacaaguacuucaagaaccacaccagccccgacgucgaccugggggacaucuccggcaucaacgccagcguggugaacauccagaaggagaucgaccgccugaacgaggucgccaagaaccucaacgagucccugaucgaccugcaggagcucgggaaguacgagcaguacaucaaguggccgugguacaucuggcugggcuucaucgccggccugaucgcgaucgugauggugaccaucaugcucugcugcaugaccagcugcugcuccugccugaaggggugcugcagcugcggcuccugcugcaaguucgacgaggacgacagcgagcccguccugaagggggugaagcuccacuacacguga

SEQ ID NO: 23094 - RNA, 3822 nt, Artificial Sequence
  SARS-CoV-2/Wuhan/WIV05/2019__EPI_ISL_402128 spike protein CDS gc (1-1273)(K986P_V987P_K986P_V987P_S13I_W152C_L452R_D614G)
auguucguguuccugguccuccugccccuggugagcauccagugcgugaaccucaccacccgcacgcagcugccgcccgccuacaccaacagcuucacccggggcgucuacuaccccgacaagguguuccgcuccagcgugcugcacuccacccaggaccucuuccugcccuucuucagcaacgucacgugguuccacgccauccacguguccgggaccaacggcaccaagcgguucgacaacccggugcugcccuucaacgacggggucuacuucgcgagcaccgagaaguccaacaucauccgcggcuggaucuucgggacgacccucgacagcaagacccagucccugcugaucgugaacaacgccaccaacguggucaucaaggugugcgaguuccaguucugcaacgaccccuuccucggcguguacuaccacaagaacaacaagagcugcauggaguccgaguuccgggucuacagcuccgccaacaacugcacguucgaguacgugagccagcccuuccugauggaccuggagggcaagcaggggaacuucaagaaccuccgcgaguucguguucaagaacaucgacggcuacuucaagaucuacuccaagcacaccccgaucaaccugguccgggaccugccccagggguucagcgcccucgagccccugguggaccugcccaucggcaucaacaucacccgcuuccagacccuccuggcccugcaccgguccuaccucacgccgggggacagcagcuccggcuggaccgcgggcgccgccgccuacuacgugggguaccugcagccccgcaccuuccugcucaaguacaacgagaacggcaccaucacggacgcggucgacugcgcccuggacccccugagcgagaccaagugcacccucaaguccuucaccguggagaaggggaucuaccagacgagcaacuuccgggugcagcccaccgaguccaucguccgcuucccgaacaucaccaaccugugccccuucggcgagguguucaacgccacccgguucgccagcgucuacgccuggaaccgcaagcggaucuccaacugcguggcggacuacagcgugcuguacaacuccgccagcuucuccacguucaagugcuacggcgucagccccaccaagcucaacgaccugugcuucaccaacguguacgccgacuccuucgugauccgcggggacgagguccggcagaucgcccccggccagaccgggaagaucgccgacuacaacuacaagcugccggacgacuucacgggcugcgugaucgcguggaacagcaacaaccucgacuccaaggucgggggcaacuacaacuaccgcuaccgccuguuccgcaagagcaaccucaagcccuucgagcgggacaucuccaccgagaucuaccaggccggcagcacccccugcaacgggguggagggcuucaacugcuacuucccccugcaguccuacggguuccagccgaccaacggcgugggguaccagcccuaccggguggucgugcugagcuucgagcuccugcacgcccccgccacggugugcggccccaagaaguccaccaaccuggucaagaacaagugcgugaacuucaacuucaacggccucaccgggaccggcgugcugaccgagagcaacaagaaguuccugccguuccagcaguucgggcgcgacaucgccgacacgaccgacgcgguccgcgacccccagacccuggagauccucgacaucacccccugcagcuucggcgggguguccgugaucacgccgggcaccaacaccagcaaccaggucgccgugcuguaccagggcgugaacugcaccgagguccccguggccauccacgccgaccagcugacgcccaccuggcggguguacuccaccggcagcaacgucuuccagacccgcgccgggugccucaucggcgcggagcacgugaacaacuccuacgagugcgacauccccaucggggccggcaucugcgccagcuaccagacgcagaccaacuccccgcggcgcgcccggagcguggcgucccagagcaucaucgccuacaccaugucccugggcgccgagaacagcgucgccuacuccaacaacagcaucgccauccccaccaacuucacgaucuccgugaccaccgagauccugcccgugagcaugaccaagacgagcgucgacugcaccauguacaucugcggggacuccaccgagugcagcaaccuccugcugcaguacggcuccuucugcacccagcucaaccgcgcgcugacggggaucgccguggagcaggacaagaacacccaggagguguucgcccaggucaagcagaucuacaagacgcccccgaucaaggacuucggcggguucaacuucagccagauccugcccgaccccuccaagcccagcaagcgguccuucaucgaggaccuccuguucaacaaggugacccuggccgacgccggcuucaucaagcaguacggcgacugccucggggacaucgcggcccgcgaccugaucugcgcccagaaguucaacggccugaccgugcucccgccccugcugaccgacgagaugaucgcccaguacaccagcgcccuccuggcggggaccaucacguccggcuggaccuucggggccggcgccgcccugcagauccccuucgcgaugcagauggccuaccgguucaacggcaucggggucacccagaacgugcucuacgagaaccagaagcugaucgccaaccaguucaacagcgccaucggcaagauccaggacucccugagcuccaccgccagcgcgcucgggaagcugcaggacguggucaaccagaacgcccaggcccugaacacgcucgugaagcagcuguccagcaacuucggcgccaucuccagcgugcugaacgacauccucucccgccuggacccgcccgaggccgaggugcagaucgaccggcugaucaccgggcgccuccagagccugcagaccuacgugacccagcagcugauccgggcggccgagauccgcgccagcgccaaccucgccgcgaccaagauguccgagugcguccugggccagagcaagcggguggacuucugcggcaagggguaccaccugauguccuucccccagagcgccccgcacggcguggucuuccuccacgugacguacguccccgcccaggagaagaacuucaccaccgcccccgcgaucugccacgacgggaaggcccacuucccccgcgagggcguguucguguccaacgggacccacugguucgucacgcagcggaacuucuacgagccgcagaucaucaccaccgacaacaccuucgugagcggcaacugcgacguggucaucggcaucgugaacaacacgguguacgacccccugcagcccgagcuggacuccuucaaggaggagcucgacaaguacuucaagaaccacaccagccccgacgucgaccugggggacaucuccggcaucaacgccagcguggugaacauccagaaggagaucgaccgccugaacgaggucgccaagaaccucaacgagucccugaucgaccugcaggagcucgggaaguacgagcaguacaucaaguggccgugguacaucuggcugggcuucaucgccggccugaucgcgaucgugauggugaccaucaugcucugcugcaugaccagcugcugcuccugccugaaggggugcugcagcugcggcuccugcugcaaguucgacgaggacgacagcgagcccguccugaagggggugaagcuccacuacacguga

SEQ ID NO: 23095 - RNA, 3822 nt, Artificial Sequence
  SARS-CoV-2/Wuhan/WIV05/2019__EPI_ISL_402128 spike protein CDS gc (1-1273)(K986P_V987P)
auguucguguuccugguccuccugccccuggugagcucccagugcgugaaccucaccacccgcacgcagcugccgcccgccuacaccaacagcuucacccggggcgucuacuaccccgacaagguguuccgcuccagcgugcugcacuccacccaggaccucuuccugcccuucuucagcaacgucacgugguuccacgccauccacguguccgggaccaacggcaccaagcgguucgacaacccggugcugcccuucaacgacggggucuacuucgcgagcaccgagaaguccaacaucauccgcggcuggaucuucgggacgacccucgacagcaagacccagucccugcugaucgugaacaacgccaccaacguggucaucaaggugugcgaguuccaguucugcaacgaccccuuccucggcguguacuaccacaagaacaacaagagcuggauggaguccgaguuccgggucuacagcuccgccaacaacugcacguucgaguacgugagccagcccuuccugauggaccuggagggcaagcaggggaacuucaagaaccuccgcgaguucguguucaagaacaucgacggcuacuucaagaucuacuccaagcacaccccgaucaaccugguccgggaccugccccagggguucagcgcccucgagccccugguggaccugcccaucggcaucaacaucacccgcuuccagacccuccuggcccugcaccgguccuaccucacgccgggggacagcagcuccggcuggaccgcgggcgccgccgccuacuacgugggguaccugcagccccgcaccuuccugcucaaguacaacgagaacggcaccaucacggacgcggucgacugcgcccuggacccccugagcgagaccaagugcacccucaaguccuucaccguggagaaggggaucuaccagacgagcaacuuccgggugcagcccaccgaguccaucguccgcuucccgaacaucaccaaccugugccccuucggcgagguguucaacgccacccgguucgccagcgucuacgccuggaaccgcaagcggaucuccaacugcguggcggacuacagcgugcuguacaacuccgccagcuucuccacguucaagugcuacggcgucagccccaccaagcucaacgaccugugcuucaccaacguguacgccgacuccuucgugauccgcggggacgagguccggcagaucgcccccggccagaccgggaagaucgccgacuacaacuacaagcugccggacgacuucacgggcugcgugaucgcguggaacagcaacaaccucgacuccaaggucgggggcaacuacaacuaccuguaccgccuguuccgcaagagcaaccucaagcccuucgagcgggacaucuccaccgagaucuaccaggccggcagcacccccugcaacgggguggagggcuucaacugcuacuucccccugcaguccuacggguuccagccgaccaacggcgugggguaccagcccuaccggguggucgugcugagcuucgagcuccugcacgcccccgccacggugugcggccccaagaaguccaccaaccuggucaagaacaagugcgugaacuucaacuucaacggccucaccgggaccggcgugcugaccgagagcaacaagaaguuccugccguuccagcaguucgggcgcgacaucgccgacacgaccgacgcgguccgcgacccccagacccuggagauccucgacaucacccccugcagcuucggcgggguguccgugaucacgccgggcaccaacaccagcaaccaggucgccgugcuguaccaggacgugaacugcaccgagguccccguggccauccacgccgaccagcugacgcccaccuggcggguguacuccaccggcagcaacgucuuccagacccgcgccgggugccucaucggcgcggagcacgugaacaacuccuacgagugcgacauccccaucggggccggcaucugcgccagcuaccagacgcagaccaacuccccgcggcgcgcccggagcguggcgucccagagcaucaucgccuacaccaugucccugggcgccgagaacagcgucgccuacuccaacaacagcaucgccauccccaccaacuucacgaucuccgugaccaccgagauccugcccgugagcaugaccaagacgagcgucgacugcaccauguacaucugcggggacuccaccgagugcagcaaccuccugcugcaguacggcuccuucugcacccagcucaaccgcgcgcugacggggaucgccguggagcaggacaagaacacccaggagguguucgcccaggucaagcagaucuacaagacgcccccgaucaaggacuucggcggguucaacuucagccagauccugcccgaccccuccaagcccagcaagcgguccuucaucgaggaccuccuguucaacaaggugacccuggccgacgccggcuucaucaagcaguacggcgacugccucggggacaucgcggcccgcgaccugaucugcgcccagaaguucaacggccugaccgugcucccgccccugcugaccgacgagaugaucgcccaguacaccagcgcccuccuggcggggaccaucacguccggcuggaccuucggggccggcgccgcccugcagauccccuucgcgaugcagauggccuaccgguucaacggcaucggggucacccagaacgugcucuacgagaaccagaagcugaucgccaaccaguucaacagcgccaucggcaagauccaggacucccugagcuccaccgccagcgcgcucgggaagcugcaggacguggucaaccagaacgcccaggcccugaacacgcucgugaagcagcuguccagcaacuucggcgccaucuccagcgugcugaacgacauccucucccgccuggacccgcccgaggccgagguccagaucgaccggcugaucaccgggcgccuccagagccugcagaccuacgugacccagcagcugauccgggcggccgagauccgcgccagcgccaaccucgccgcgaccaagauguccgagugcgugcugggccagagcaagcgggucgacuucugcggcaagggguaccaccugauguccuucccccagagcgcgccccacggcgugguguuccuccacgucacguacgugcccgcccaggagaagaacuucaccaccgccccggccaucugccacgacgggaaggcccacuucccccgcgagggcgucuucguguccaacgggacccacugguucgugacgcagcggaacuucuacgagccccagaucaucaccaccgacaacaccuucgucagcggcaacugcgacguggugaucggcaucgucaacaacacgguguacgacccccugcagccggagcuggacuccuucaaggaggagcucgacaaguacuucaagaaccacaccagccccgacguggaccugggggacaucuccggcaucaacgccagcgucgugaacauccagaaggagaucgaccgccugaacgagguggccaagaaccucaacgagucccugaucgaccugcaggagcucgggaaguacgagcaguacaucaaguggcccugguacaucuggcugggcuucaucgccggccugaucgcgaucgucauggugaccaucaugcucugcugcaugaccagcugcugcuccugccugaaggggugcugcagcugcggcuccugcugcaaguucgacgaggacgacagcgagccggugcugaagggggucaagcuccacuacacguga

SEQ ID NO: 23096 - RNA, 3822 nt, Artificial Sequence
  SARS-CoV-2/Wuhan/WIV05/2019__EPI_ISL_402128 spike protein CDS gc (1-1273)(K986P_V987P_ D614G)
auguucguguuccugguccuccugccccuggugagcucccagugcgugaaccucaccacccgcacgcagcugccgcccgccuacaccaacagcuucacccggggcgucuacuaccccgacaagguguuccgcuccagcgugcugcacuccacccaggaccucuuccugcccuucuucagcaacgucacgugguuccacgccauccacguguccgggaccaacggcaccaagcgguucgacaacccggugcugcccuucaacgacggggucuacuucgcgagcaccgagaaguccaacaucauccgcggcuggaucuucgggacgacccucgacagcaagacccagucccugcugaucgugaacaacgccaccaacguggucaucaaggugugcgaguuccaguucugcaacgaccccuuccucggcguguacuaccacaagaacaacaagagcuggauggaguccgaguuccgggucuacagcuccgccaacaacugcacguucgaguacgugagccagcccuuccugauggaccuggagggcaagcaggggaacuucaagaaccuccgcgaguucguguucaagaacaucgacggcuacuucaagaucuacuccaagcacaccccgaucaaccugguccgggaccugccccagggguucagcgcccucgagccccugguggaccugcccaucggcaucaacaucacccgcuuccagacccuccuggcccugcaccgguccuaccucacgccgggggacagcagcuccggcuggaccgcgggcgccgccgccuacuacgugggguaccugcagccccgcaccuuccugcucaaguacaacgagaacggcaccaucacggacgcggucgacugcgcccuggacccccugagcgagaccaagugcacccucaaguccuucaccguggagaaggggaucuaccagacgagcaacuuccgggugcagcccaccgaguccaucguccgcuucccgaacaucaccaaccugugccccuucggcgagguguucaacgccacccgguucgccagcgucuacgccuggaaccgcaagcggaucuccaacugcguggcggacuacagcgugcuguacaacuccgccagcuucuccacguucaagugcuacggcgucagccccaccaagcucaacgaccugugcuucaccaacguguacgccgacuccuucgugauccgcggggacgagguccggcagaucgcccccggccagaccgggaagaucgccgacuacaacuacaagcugccggacgacuucacgggcugcgugaucgcguggaacagcaacaaccucgacuccaaggucgggggcaacuacaacuaccuguaccgccuguuccgcaagagcaaccucaagcccuucgagcgggacaucuccaccgagaucuaccaggccggcagcacccccugcaacgggguggagggcuucaacugcuacuucccccugcaguccuacggguuccagccgaccaacggcgugggguaccagcccuaccggguggucgugcugagcuucgagcuccugcacgcccccgccacggugugcggccccaagaaguccaccaaccuggucaagaacaagugcgugaacuucaacuucaacggccucaccgggaccggcgugcugaccgagagcaacaagaaguuccugccguuccagcaguucgggcgcgacaucgccgacacgaccgacgcgguccgcgacccccagacccuggagauccucgacaucacccccugcagcuucggcgggguguccgugaucacgccgggcaccaacaccagcaaccaggucgccgugcuguaccagggcgugaacugcaccgagguccccguggccauccacgccgaccagcugacgcccaccuggcggguguacuccaccgggagcaacgucuuccagacccgcgccggcugccucaucggggcggagcacgugaacaacuccuacgagugcgacauccccaucggcgccggcaucugcgccagcuaccagacgcagaccaacuccccgcggcgcgcccggagcguggcgucccagagcaucaucgccuacaccaugucccugggggccgagaacagcgucgccuacuccaacaacagcaucgccauccccaccaacuucacgaucuccgugaccaccgagauccugcccgugagcaugaccaagacgagcgucgacugcaccauguacaucugcggcgacuccaccgagugcagcaaccuccugcugcaguacggguccuucugcacccagcucaaccgcgcgcugacgggcaucgccguggagcaggacaagaacacccaggagguguucgcccaggucaagcagaucuacaagacgcccccgaucaaggacuucgggggcuucaacuucagccagauccugcccgaccccuccaagcccagcaagcgguccuucaucgaggaccuccuguucaacaaggugacccuggccgacgccggcuucaucaagcaguacggggacugccucggcgacaucgcggcccgcgaccugaucugcgcccagaaguucaacgggcugaccgugcucccgccccugcugaccgacgagaugaucgcccaguacaccagcgcccuccuggcgggcaccaucacguccggguggaccuucggcgccggcgccgcccugcagauccccuucgcgaugcagauggccuaccgguucaacgggaucggcgucacccagaacgugcucuacgagaaccagaagcugaucgccaaccaguucaacagcgccaucgggaagauccaggacucccugagcuccaccgccagcgcgcucggcaagcugcaggacguggucaaccagaacgcccaggcccugaacacgcucgugaagcagcuguccagcaacuucggggccaucuccagcgugcugaacgacauccucucccgccuggacccgcccgaggccgagguccagaucgaccggcugaucaccggccgccuccagagccugcagaccuacgugacccagcagcugauccgggcggccgagauccgcgccagcgccaaccucgccgcgaccaagauguccgagugcgugcugggccagagcaagcgggucgacuucugcgggaagggcuaccaccugauguccuucccccagagcgcgccccacggggugguguuccuccacgucacguacgugcccgcccaggagaagaacuucaccaccgccccggccaucugccacgacggcaaggcccacuucccccgcgagggggucuucguguccaacggcacccacugguucgugacgcagcggaacuucuacgagccccagaucaucaccaccgacaacaccuucgucagcggcaacugcgacguggugaucgggaucgucaacaacacgguguacgacccccugcagccggagcuggacuccuucaaggaggagcucgacaaguacuucaagaaccacaccagccccgacguggaccugggcgacaucuccgggaucaacgccagcgucgugaacauccagaaggagaucgaccgccugaacgagguggccaagaaccucaacgagucccugaucgaccugcaggagcucggcaaguacgagcaguacaucaaguggcccugguacaucuggcugggcuucaucgccgggcugaucgcgaucgucauggugaccaucaugcucugcugcaugaccagcugcugcuccugccugaagggcugcugcagcugcggguccugcugcaaguucgacgaggacgacagcgagccggugcugaagggcgucaagcuccacuacacguga

SEQ ID NO: 23097 - RNA, 3822 nt, Artificial Sequence
  SARS-CoV-2/Wuhan/WIV05/2019__EPI_ISL_402128 spike protein CDS gc (1-1273)(K986P_V987P_A222V_D614G)
auguucguguuccugguccuccugccccuggugagcucccagugcgugaaccucaccacccgcacgcagcugccgcccgccuacaccaacagcuucacccggggcgucuacuaccccgacaagguguuccgcuccagcgugcugcacuccacccaggaccucuuccugcccuucuucagcaacgucacgugguuccacgccauccacguguccgggaccaacggcaccaagcgguucgacaacccggugcugcccuucaacgacggggucuacuucgcgagcaccgagaaguccaacaucauccgcggcuggaucuucgggacgacccucgacagcaagacccagucccugcugaucgugaacaacgccaccaacguggucaucaaggugugcgaguuccaguucugcaacgaccccuuccucggcguguacuaccacaagaacaacaagagcuggauggaguccgaguuccgggucuacagcuccgccaacaacugcacguucgaguacgugagccagcccuuccugauggaccuggagggcaagcaggggaacuucaagaaccuccgcgaguucguguucaagaacaucgacggcuacuucaagaucuacuccaagcacaccccgaucaaccugguccgggaccugccccagggguucagcgugcucgagccccugguggaccugcccaucggcaucaacaucacccgcuuccagacccuccuggcccugcaccgguccuaccucacgccgggggacagcagcuccggcuggaccgccggcgcggccgccuacuacgucggguaccugcagccccgcaccuuccugcucaaguacaacgagaacggcaccaucacggacgccguggacugcgcgcuggacccccugagcgagaccaagugcacccucaaguccuucaccguggagaaggggaucuaccagacgagcaacuuccggguccagcccaccgaguccaucgugcgcuucccgaacaucaccaaccugugccccuucggcgaggucuucaacgccacccgguucgccagcguguacgccuggaaccgcaagcggaucuccaacugcguggccgacuacagcguccuguacaacuccgcgagcuucuccacguucaagugcuacggcgugagccccaccaagcucaacgaccugugcuucaccaacguguacgccgacuccuucgucauccgcggggacgaggugcggcagaucgcccccggccagaccgggaagaucgccgacuacaacuacaagcugccggacgacuucacgggcugcgugaucgccuggaacagcaacaaccucgacuccaaggucgggggcaacuacaacuaccuguaccgccuguuccgcaagagcaaccucaagcccuucgagcgggacaucuccaccgagaucuaccaggcgggcagcacccccugcaacgggguggagggcuucaacugcuacuucccccugcaguccuacggguuccagccgaccaacggcgugggguaccagcccuaccgggucguggugcugagcuucgagcuccugcacgcccccgccacggucugcggccccaagaaguccaccaaccuggugaagaacaagugcgugaacuucaacuucaacggccucaccgggaccggcguccugaccgagagcaacaagaaguuccugccguuccagcaguucgggcgcgacaucgccgacacgaccgacgccgugcgcgacccccagacccuggagauccucgacaucacccccugcagcuucggcgggguguccgucaucacgccgggcaccaacaccagcaaccagguggcggugcuguaccagggcgucaacugcaccgaggugcccguggccauccacgccgaccagcugacgcccaccuggcgggucuacuccaccgggagcaacguguuccagacccgcgccggcugccucaucggggccgagcacgugaacaacuccuacgagugcgacauccccaucggcgcgggcaucugcgccagcuaccagacgcagaccaacuccccgcggcgcgcccggagcgucgccucccagagcaucaucgcguacaccaugucccugggggccgagaacagcguggccuacuccaacaacagcaucgccauccccaccaacuucacgaucuccgugaccaccgagauccugcccgucagcaugaccaagacgagcguggacugcaccauguacaucugcggcgacuccaccgagugcagcaaccuccugcugcaguacggguccuucugcacccagcucaaccgcgcccugacgggcaucgcgguggagcaggacaagaacacccaggaggucuucgcccaggugaagcagaucuacaagacgcccccgaucaaggacuucgggggcuucaacuucagccagauccugcccgaccccuccaagcccagcaagcgguccuucaucgaggaccuccuguucaacaaggugacccuggccgacgccggcuucaucaagcaguacggggacugccucggcgacaucgccgcgcgcgaccugaucugcgcccagaaguucaacgggcugaccguccucccgccccugcugaccgacgagaugaucgcccaguacaccagcgcccuccuggccggcaccaucacguccggguggaccuucggcgcgggcgccgcccugcagauccccuucgccaugcagauggcguaccgguucaacgggaucggcgugacccagaacgugcucuacgagaaccagaagcugaucgccaaccaguucaacagcgccaucgggaagauccaggacucccugagcuccaccgccagcgcccucggcaagcugcaggacgucgugaaccagaacgcgcaggcccugaacacgcucgugaagcagcuguccagcaacuucggggccaucuccagcguccugaacgacauccucucccgccuggacccgcccgaggccgaggugcagaucgaccggcugaucaccggccgccuccagagccugcagaccuacgugacccagcagcugauccgggccgcggagauccgcgccagcgccaaccucgccgccaccaagauguccgagugcguccugggccagagcaagcggguggacuucugcgggaagggcuaccaccugauguccuucccccagagcgcgccccacgggguggucuuccuccacgugacguacguccccgcccaggagaagaacuucaccaccgccccggccaucugccacgacggcaaggcgcacuucccccgcgaggggguguucguguccaacggcacccacugguucgucacgcagcggaacuucuacgagccccagaucaucaccaccgacaacaccuucgugagcggcaacugcgacguggucaucgggaucgugaacaacacgguguacgacccccugcagccggagcuggacuccuucaaggaggagcucgacaaguacuucaagaaccacaccagccccgacgucgaccugggcgacaucuccgggaucaacgccagcguggugaacauccagaaggagaucgaccgccugaacgaggucgccaagaaccucaacgagucccugaucgaccugcaggagcucggcaaguacgagcaguacaucaaguggcccugguacaucuggcugggcuucaucgccgggcugaucgccaucgugauggugaccaucaugcucugcugcaugaccagcugcugcuccugccugaagggcugcugcagcugcggguccugcugcaaguucgacgaggacgacagcgagccgguccugaagggcgugaagcuccacuacacguga

SEQ ID NO: 23098 - RNA, 3822 nt, Artificial Sequence
  SARS-CoV-2/Wuhan/WIV05/2019__EPI_ISL_402128 spike protein CDS gc (1-1273)(K986P_V987P_N439K_D614G)
auguucguguuccugguccuccugccccuggugagcucccagugcgugaaccucaccacccgcacgcagcugccgcccgccuacaccaacagcuucacccggggcgucuacuaccccgacaagguguuccgcuccagcgugcugcacuccacccaggaccucuuccugcccuucuucagcaacgucacgugguuccacgccauccacguguccgggaccaacggcaccaagcgguucgacaacccggugcugcccuucaacgacggggucuacuucgcgagcaccgagaaguccaacaucauccgcggcuggaucuucgggacgacccucgacagcaagacccagucccugcugaucgugaacaacgccaccaacguggucaucaaggugugcgaguuccaguucugcaacgaccccuuccucggcguguacuaccacaagaacaacaagagcuggauggaguccgaguuccgggucuacagcuccgccaacaacugcacguucgaguacgugagccagcccuuccugauggaccuggagggcaagcaggggaacuucaagaaccuccgcgaguucguguucaagaacaucgacggcuacuucaagaucuacuccaagcacaccccgaucaaccugguccgggaccugccccagggguucagcgcccucgagccccugguggaccugcccaucggcaucaacaucacccgcuuccagacccuccuggcccugcaccgguccuaccucacgccgggggacagcagcuccggcuggaccgcgggcgccgccgccuacuacgugggguaccugcagccccgcaccuuccugcucaaguacaacgagaacggcaccaucacggacgcggucgacugcgcccuggacccccugagcgagaccaagugcacccucaaguccuucaccguggagaaggggaucuaccagacgagcaacuuccgggugcagcccaccgaguccaucguccgcuucccgaacaucaccaaccugugccccuucggcgagguguucaacgccacccgguucgccagcgucuacgccuggaaccgcaagcggaucuccaacugcguggcggacuacagcgugcuguacaacuccgccagcuucuccacguucaagugcuacggcgucagccccaccaagcucaacgaccugugcuucaccaacguguacgccgacuccuucgugauccgcggggacgagguccggcagaucgcccccggccagaccgggaagaucgccgacuacaacuacaagcugccggacgacuucacgggcugcgugaucgcguggaacagcaagaaccucgacuccaaggucgggggcaacuacaacuaccuguaccgccuguuccgcaagagcaaccucaagcccuucgagcgggacaucuccaccgagaucuaccaggccggcagcacccccugcaacgggguggagggcuucaacugcuacuucccccugcaguccuacggguuccagccgaccaacggcgugggguaccagcccuaccggguggucgugcugagcuucgagcuccugcacgcccccgccacggugugcggccccaagaaguccaccaaccuggucaagaacaagugcgugaacuucaacuucaacggccucaccgggaccggcgugcugaccgagagcaacaagaaguuccugccguuccagcaguucgggcgcgacaucgccgacacgaccgacgcgguccgcgacccccagacccuggagauccucgacaucacccccugcagcuucggcgggguguccgugaucacgccgggcaccaacaccagcaaccaggucgccgugcuguaccagggcgugaacugcaccgagguccccguggccauccacgccgaccagcugacgcccaccuggcggguguacuccaccgggagcaacgucuuccagacccgcgccggcugccucaucggggcggagcacgugaacaacuccuacgagugcgacauccccaucggcgccggcaucugcgccagcuaccagacgcagaccaacuccccgcggcgcgcccggagcguggcgucccagagcaucaucgccuacaccaugucccugggggccgagaacagcgucgccuacuccaacaacagcaucgccauccccaccaacuucacgaucuccgugaccaccgagauccugcccgugagcaugaccaagacgagcgucgacugcaccauguacaucugcggcgacuccaccgagugcagcaaccuccugcugcaguacggguccuucugcacccagcucaaccgcgcgcugacgggcaucgccguggagcaggacaagaacacccaggagguguucgcccaggucaagcagaucuacaagacgcccccgaucaaggacuucgggggcuucaacuucagccagauccugcccgaccccuccaagcccagcaagcgguccuucaucgaggaccuccuguucaacaaggugacccuggccgacgccggcuucaucaagcaguacggggacugccucggcgacaucgcggcccgcgaccugaucugcgcccagaaguucaacgggcugaccgugcucccgccccugcugaccgacgagaugaucgcccaguacaccagcgcccuccuggcgggcaccaucacguccggguggaccuucggcgccggcgccgcccugcagauccccuucgcgaugcagauggccuaccgguucaacgggaucggcgucacccagaacgugcucuacgagaaccagaagcugaucgccaaccaguucaacagcgccaucgggaagauccaggacucccugagcuccaccgccagcgcgcucggcaagcugcaggacguggucaaccagaacgcccaggcccugaacacgcucgugaagcagcuguccagcaacuucggggccaucuccagcgugcugaacgacauccucucccgccuggacccgcccgaggccgagguccagaucgaccggcugaucaccggccgccuccagagccugcagaccuacgugacccagcagcugauccgggcggccgagauccgcgccagcgccaaccucgccgcgaccaagauguccgagugcgugcugggccagagcaagcgggucgacuucugcgggaagggcuaccaccugauguccuucccccagagcgcgccccacggggugguguuccuccacgucacguacgugcccgcccaggagaagaacuucaccaccgccccggccaucugccacgacggcaaggcccacuucccccgcgagggggucuucguguccaacggcacccacugguucgugacgcagcggaacuucuacgagccccagaucaucaccaccgacaacaccuucgucagcggcaacugcgacguggugaucgggaucgucaacaacacgguguacgacccccugcagccggagcuggacuccuucaaggaggagcucgacaaguacuucaagaaccacaccagccccgacguggaccugggcgacaucuccgggaucaacgccagcgucgugaacauccagaaggagaucgaccgccugaacgagguggccaagaaccucaacgagucccugaucgaccugcaggagcucggcaaguacgagcaguacaucaaguggcccugguacaucuggcugggcuucaucgccgggcugaucgcgaucgucauggugaccaucaugcucugcugcaugaccagcugcugcuccugccugaagggcugcugcagcugcggguccugcugcaaguucgacgaggacgacagcgagccggugcugaagggcgucaagcuccacuacacguga

SEQ ID NO: 23099 - RNA, 3822 nt, Artificial Sequence
  SARS-CoV-2/Wuhan/WIV05/2019__EPI_ISL_402128 spike protein CDS gc (1-1273)(K986P_V987P_S477N_D614G)
auguucguguuccugguccuccugccccuggugagcucccagugcgugaaccucaccacccgcacgcagcugccgcccgccuacaccaacagcuucacccggggcgucuacuaccccgacaagguguuccgcuccagcgugcugcacuccacccaggaccucuuccugcccuucuucagcaacgucacgugguuccacgccauccacguguccgggaccaacggcaccaagcgguucgacaacccggugcugcccuucaacgacggggucuacuucgcgagcaccgagaaguccaacaucauccgcggcuggaucuucgggacgacccucgacagcaagacccagucccugcugaucgugaacaacgccaccaacguggucaucaaggugugcgaguuccaguucugcaacgaccccuuccucggcguguacuaccacaagaacaacaagagcuggauggaguccgaguuccgggucuacagcuccgccaacaacugcacguucgaguacgugagccagcccuuccugauggaccuggagggcaagcaggggaacuucaagaaccuccgcgaguucguguucaagaacaucgacggcuacuucaagaucuacuccaagcacaccccgaucaaccugguccgggaccugccccagggguucagcgcccucgagccccugguggaccugcccaucggcaucaacaucacccgcuuccagacccuccuggcccugcaccgguccuaccucacgccgggggacagcagcuccggcuggaccgcgggcgccgccgccuacuacgugggguaccugcagccccgcaccuuccugcucaaguacaacgagaacggcaccaucacggacgcggucgacugcgcccuggacccccugagcgagaccaagugcacccucaaguccuucaccguggagaaggggaucuaccagacgagcaacuuccgggugcagcccaccgaguccaucguccgcuucccgaacaucaccaaccugugccccuucggcgagguguucaacgccacccgguucgccagcgucuacgccuggaaccgcaagcggaucuccaacugcguggcggacuacagcgugcuguacaacuccgccagcuucuccacguucaagugcuacggcgucagccccaccaagcucaacgaccugugcuucaccaacguguacgccgacuccuucgugauccgcggggacgagguccggcagaucgcccccggccagaccgggaagaucgccgacuacaacuacaagcugccggacgacuucacgggcugcgugaucgcguggaacagcaacaaccucgacuccaaggucgggggcaacuacaacuaccuguaccgccuguuccgcaagagcaaccucaagcccuucgagcgggacaucuccaccgagaucuaccaggccggcaacacccccugcaacgggguggagggcuucaacugcuacuucccccugcagagcuacggguuccagccgaccaacggcgugggguaccagcccuaccggguggucgugcuguccuucgagcuccugcacgcccccgccacggugugcggccccaagaaguccaccaaccuggucaagaacaagugcgugaacuucaacuucaacggccucaccgggaccggcgugcugaccgagagcaacaagaaguuccugccguuccagcaguucgggcgcgacaucgccgacacgaccgacgcgguccgcgacccccagacccuggagauccucgacaucacccccugcagcuucggcggggugagcgugaucacgccgggcaccaacaccuccaaccaggucgccgugcuguaccagggcgugaacugcaccgagguccccguggccauccacgccgaccagcugacgcccaccuggcggguguacagcaccggguccaacgucuuccagacccgcgccggcugccucaucggggcggagcacgugaacaacagcuacgagugcgacauccccaucggcgccggcaucugcgccuccuaccagacgcagaccaacagcccgcggcgcgcccgguccguggcgagccaguccaucaucgccuacaccaugagccugggggccgagaacuccgucgccuacagcaacaacuccaucgccauccccaccaacuucacgaucagcgugaccaccgagauccugcccguguccaugaccaagacgagcgucgacugcaccauguacaucugcggcgacagcaccgagugcuccaaccuccugcugcaguacgggagcuucugcacccagcucaaccgcgcgcugacgggcaucgccguggagcaggacaagaacacccaggagguguucgcccaggucaagcagaucuacaagacgcccccgaucaaggacuucgggggcuucaacuucucccagauccugcccgaccccagcaagcccuccaagcggagcuucaucgaggaccuccuguucaacaaggugacccuggccgacgccggcuucaucaagcaguacggggacugccucggcgacaucgcggcccgcgaccugaucugcgcccagaaguucaacgggcugaccgugcucccgccccugcugaccgacgagaugaucgcccaguacaccuccgcccuccuggcgggcaccaucacgagcggguggaccuucggcgccggcgccgcccugcagauccccuucgcgaugcagauggccuaccgguucaacgggaucggcgucacccagaacgugcucuacgagaaccagaagcugaucgccaaccaguucaacuccgccaucgggaagauccaggacagccuguccagcaccgccuccgcgcucggcaagcugcaggacguggucaaccagaacgcccaggcccugaacacgcucgugaagcagcugagcuccaacuucggggccaucagcuccgugcugaacgacauccucagccgccuggacccgcccgaggccgagguccagaucgaccggcugaucaccggccgccuccagucccugcagaccuacgugacccagcagcugauccgggcggccgagauccgcgccagcgccaaccucgccgcgaccaagaugagcgagugcgugcugggccaguccaagcgggucgacuucugcgggaagggcuaccaccugaugagcuucccccaguccgcgccccacggggugguguuccuccacgucacguacgugcccgcccaggagaagaacuucaccaccgccccggccaucugccacgacggcaaggcccacuucccccgcgagggggucuucgugagcaacggcacccacugguucgugacgcagcggaacuucuacgagccccagaucaucaccaccgacaacaccuucgucuccggcaacugcgacguggugaucgggaucgucaacaacacgguguacgacccccugcagccggagcuggacagcuucaaggaggagcucgacaaguacuucaagaaccacaccucccccgacguggaccugggcgacaucagcgggaucaacgccuccgucgugaacauccagaaggagaucgaccgccugaacgagguggccaagaaccucaacgagagccugaucgaccugcaggagcucggcaaguacgagcaguacaucaaguggcccugguacaucuggcugggcuucaucgccgggcugaucgcgaucgucauggugaccaucaugcucugcugcaugaccuccugcugcagcugccugaagggcugcugcuccugcgggagcugcugcaaguucgacgaggacgacuccgagccggugcugaagggcgucaagcuccacuacacguga

SEQ ID NO: 23100 - RNA, 3822 nt, Artificial Sequence
  SARS-CoV-2/Wuhan/WIV05/2019__EPI_ISL_402128 spike protein CDS gc (1-1273)(K986P_V987P_N501Y_D614G)
auguucguguuccugguccuccugccccuggugagcucccagugcgugaaccucaccacccgcacgcagcugccgcccgccuacaccaacagcuucacccggggcgucuacuaccccgacaagguguuccgcuccagcgugcugcacuccacccaggaccucuuccugcccuucuucagcaacgucacgugguuccacgccauccacguguccgggaccaacggcaccaagcgguucgacaacccggugcugcccuucaacgacggggucuacuucgcgagcaccgagaaguccaacaucauccgcggcuggaucuucgggacgacccucgacagcaagacccagucccugcugaucgugaacaacgccaccaacguggucaucaaggugugcgaguuccaguucugcaacgaccccuuccucggcguguacuaccacaagaacaacaagagcuggauggaguccgaguuccgggucuacagcuccgccaacaacugcacguucgaguacgugagccagcccuuccugauggaccuggagggcaagcaggggaacuucaagaaccuccgcgaguucguguucaagaacaucgacggcuacuucaagaucuacuccaagcacaccccgaucaaccugguccgggaccugccccagggguucagcgcccucgagccccugguggaccugcccaucggcaucaacaucacccgcuuccagacccuccuggcccugcaccgguccuaccucacgccgggggacagcagcuccggcuggaccgcgggcgccgccgccuacuacgugggguaccugcagccccgcaccuuccugcucaaguacaacgagaacggcaccaucacggacgcggucgacugcgcccuggacccccugagcgagaccaagugcacccucaaguccuucaccguggagaaggggaucuaccagacgagcaacuuccgggugcagcccaccgaguccaucguccgcuucccgaacaucaccaaccugugccccuucggcgagguguucaacgccacccgguucgccagcgucuacgccuggaaccgcaagcggaucuccaacugcguggcggacuacagcgugcuguacaacuccgccagcuucuccacguucaagugcuacggcgucagccccaccaagcucaacgaccugugcuucaccaacguguacgccgacuccuucgugauccgcggggacgagguccggcagaucgcccccggccagaccgggaagaucgccgacuacaacuacaagcugccggacgacuucacgggcugcgugaucgcguggaacagcaacaaccucgacuccaaggucgggggcaacuacaacuaccuguaccgccuguuccgcaagagcaaccucaagcccuucgagcgggacaucuccaccgagaucuaccaggccggcagcacccccugcaacgggguggagggcuucaacugcuacuucccccugcaguccuacggguuccagccgaccuacggcgugggguaccagcccuaccggguggucgugcugagcuucgagcuccugcacgcccccgccacggugugcggccccaagaaguccaccaaccuggucaagaacaagugcgugaacuucaacuucaacggccucaccgggaccggcgugcugaccgagagcaacaagaaguuccugccguuccagcaguucgggcgcgacaucgccgacacgaccgacgcgguccgcgacccccagacccuggagauccucgacaucacccccugcagcuucggcgggguguccgugaucacgccgggcaccaacaccagcaaccaggucgccgugcuguaccagggcgugaacugcaccgagguccccguggccauccacgccgaccagcugacgcccaccuggcggguguacuccaccgggagcaacgucuuccagacccgcgccggcugccucaucggggcggagcacgugaacaacuccuacgagugcgacauccccaucggcgccggcaucugcgccagcuaccagacgcagaccaacuccccgcggcgcgcccggagcguggcgucccagagcaucaucgccuacaccaugucccugggggccgagaacagcgucgccuacuccaacaacagcaucgccauccccaccaacuucacgaucuccgugaccaccgagauccugcccgugagcaugaccaagacgagcgucgacugcaccauguacaucugcggcgacuccaccgagugcagcaaccuccugcugcaguacggguccuucugcacccagcucaaccgcgcgcugacgggcaucgccguggagcaggacaagaacacccaggagguguucgcccaggucaagcagaucuacaagacgcccccgaucaaggacuucgggggcuucaacuucagccagauccugcccgaccccuccaagcccagcaagcgguccuucaucgaggaccuccuguucaacaaggugacccuggccgacgccggcuucaucaagcaguacggggacugccucggcgacaucgcggcccgcgaccugaucugcgcccagaaguucaacgggcugaccgugcucccgccccugcugaccgacgagaugaucgcccaguacaccagcgcccuccuggcgggcaccaucacguccggguggaccuucggcgccggcgccgcccugcagauccccuucgcgaugcagauggccuaccgguucaacgggaucggcgucacccagaacgugcucuacgagaaccagaagcugaucgccaaccaguucaacagcgccaucgggaagauccaggacucccugagcuccaccgccagcgcgcucggcaagcugcaggacguggucaaccagaacgcccaggcccugaacacgcucgugaagcagcuguccagcaacuucggggccaucuccagcgugcugaacgacauccucucccgccuggacccgcccgaggccgagguccagaucgaccggcugaucaccggccgccuccagagccugcagaccuacgugacccagcagcugauccgggcggccgagauccgcgccagcgccaaccucgccgcgaccaagauguccgagugcgugcugggccagagcaagcgggucgacuucugcgggaagggcuaccaccugauguccuucccccagagcgcgccccacggggugguguuccuccacgucacguacgugcccgcccaggagaagaacuucaccaccgccccggccaucugccacgacggcaaggcccacuucccccgcgagggggucuucguguccaacggcacccacugguucgugacgcagcggaacuucuacgagccccagaucaucaccaccgacaacaccuucgucagcggcaacugcgacguggugaucgggaucgucaacaacacgguguacgacccccugcagccggagcuggacuccuucaaggaggagcucgacaaguacuucaagaaccacaccagccccgacguggaccugggcgacaucuccgggaucaacgccagcgucgugaacauccagaaggagaucgaccgccugaacgagguggccaagaaccucaacgagucccugaucgaccugcaggagcucggcaaguacgagcaguacaucaaguggcccugguacaucuggcugggcuucaucgccgggcugaucgcgaucgucauggugaccaucaugcucugcugcaugaccagcugcugcuccugccugaagggcugcugcagcugcggguccugcugcaaguucgacgaggacgacagcgagccggugcugaagggcgucaagcuccacuacacguga

SEQ ID NO: 23101 - RNA, 3816 nt, Artificial Sequence
  SARS-CoV-2/Wuhan/WIV05/2019__EPI_ISL_402128 spike protein CDS gc (1-1273)(K986P_V987P_H69del_V70del_D614G)
auguucguguuccugguccuccugccccuggugagcucccagugcgugaaccucaccacccgcacgcagcugccgcccgccuacaccaacagcuucacccggggcgucuacuaccccgacaagguguuccgcuccagcgugcugcacuccacccaggaccucuuccugcccuucuucagcaacgucacgugguuccacgccaucuccgggaccaacggcaccaagcgguucgacaacccggugcugcccuucaacgacgggguguacuucgcgagcaccgagaaguccaacaucauccgcggcuggaucuucgggacgacccucgacagcaagacccagucccugcugaucgucaacaacgccaccaacguggugaucaaggucugcgaguuccaguucugcaacgaccccuuccucggcguguacuaccacaagaacaacaagagcuggauggaguccgaguuccggguguacagcuccgccaacaacugcacguucgaguacgucagccagcccuuccugauggaccuggagggcaagcaggggaacuucaagaaccuccgcgaguucguguucaagaacaucgacggcuacuucaagaucuacuccaagcacaccccgaucaaccuggugcgggaccugccccagggguucagcgcccucgagccccuggucgaccugcccaucggcaucaacaucacccgcuuccagacccuccuggcccugcaccgguccuaccucacgccgggggacagcagcuccggcuggaccgcgggcgccgccgccuacuacgugggguaccugcagccccgcaccuuccugcucaaguacaacgagaacggcaccaucacggacgcgguggacugcgcccuggacccccugagcgagaccaagugcacccucaaguccuucaccgucgagaaggggaucuaccagacgagcaacuuccgggugcagcccaccgaguccaucgugcgcuucccgaacaucaccaaccugugccccuucggcgaggucuucaacgccacccgguucgccagcguguacgccuggaaccgcaagcggaucuccaacugcgucgcggacuacagcgugcuguacaacuccgccagcuucuccacguucaagugcuacggcgugagccccaccaagcucaacgaccugugcuucaccaacgucuacgccgacuccuucgugauccgcggggacgaggugcggcagaucgcccccggccagaccgggaagaucgccgacuacaacuacaagcugccggacgacuucacgggcugcgucaucgcguggaacagcaacaaccucgacuccaaggucgggggcaacuacaacuaccuguaccgccuguuccgcaagagcaaccucaagcccuucgagcgggacaucuccaccgagaucuaccaggccggcagcacccccugcaacgggguggagggcuucaacugcuacuucccccugcaguccuacggguuccagccgaccaacggcgugggguaccagcccuaccggguggugguccugagcuucgagcuccugcacgcccccgccacggugugcggccccaagaaguccaccaaccuggugaagaacaagugcgucaacuucaacuucaacggccucaccgggaccggcgugcugaccgagagcaacaagaaguuccugccguuccagcaguucgggcgcgacaucgccgacacgaccgacgcggugcgcgacccccagacccuggagauccucgacaucacccccugcagcuucggcggggucuccgugaucacgccgggcaccaacaccagcaaccagguggccguccuguaccagggcgugaacugcaccgaggugcccgucgccauccacgccgaccagcugacgcccaccuggcggguguacuccaccgggagcaacguguuccagacccgcgccggcugccucaucggggcggagcacgucaacaacuccuacgagugcgacauccccaucggcgccggcaucugcgccagcuaccagacgcagaccaacuccccgcggcgcgcccggagcguggcgucccagagcaucaucgccuacaccaugucccugggggccgagaacagcguggccuacuccaacaacagcaucgccauccccaccaacuucacgaucuccgucaccaccgagauccugcccgugagcaugaccaagacgagcguggacugcaccauguacaucugcggcgacuccaccgagugcagcaaccuccugcugcaguacggguccuucugcacccagcucaaccgcgcgcugacgggcaucgccgucgagcaggacaagaacacccaggagguguucgcccaggugaagcagaucuacaagacgcccccgaucaaggacuucgggggcuucaacuucagccagauccugcccgaccccuccaagcccagcaagcgguccuucaucgaggaccuccuguucaacaaggucacccuggccgacgccggcuucaucaagcaguacggggacugccucggcgacaucgcggcccgcgaccugaucugcgcccagaaguucaacgggcugaccgugcucccgccccugcugaccgacgagaugaucgcccaguacaccagcgcccuccuggcgggcaccaucacguccggguggaccuucggcgccggcgccgcccugcagauccccuucgcgaugcagauggccuaccgguucaacgggaucggcgugacccagaacguccucuacgagaaccagaagcugaucgccaaccaguucaacagcgccaucgggaagauccaggacucccugagcuccaccgccagcgcgcucggcaagcugcaggacguggugaaccagaacgcccaggcccugaacacgcucgucaagcagcuguccagcaacuucggggccaucuccagcgugcugaacgacauccucucccgccuggacccgcccgaggccgaggugcagaucgaccggcugaucaccggccgccuccagagccugcagaccuacgucacccagcagcugauccgggcggccgagauccgcgccagcgccaaccucgccgcgaccaagauguccgagugcgugcugggccagagcaagcggguggacuucugcgggaagggcuaccaccugauguccuucccccagagcgcgccccacggggucguguuccuccacgugacguacguccccgcccaggagaagaacuucaccaccgccccggccaucugccacgacggcaaggcccacuucccccgcgaggggguguucgucuccaacggcacccacugguucgugacgcagcggaacuucuacgagccccagaucaucaccaccgacaacaccuucgugagcggcaacugcgacgucgugaucgggaucgugaacaacacggucuacgacccccugcagccggagcuggacuccuucaaggaggagcucgacaaguacuucaagaaccacaccagccccgacguggaccugggcgacaucuccgggaucaacgccagcguggucaacauccagaaggagaucgaccgccugaacgagguggccaagaaccucaacgagucccugaucgaccugcaggagcucggcaaguacgagcaguacaucaaguggcccugguacaucuggcugggcuucaucgccgggcugaucgcgaucgugauggucaccaucaugcucugcugcaugaccagcugcugcuccugccugaagggcugcugcagcugcggguccugcugcaaguucgacgaggacgacagcgagccggugcugaagggcgugaagcuccacuacacguga

SEQ ID NO: 23102 - RNA, 3822 nt, Artificial Sequence
  SARS-CoV-2/Wuhan/WIV05/2019__EPI_ISL_402128 spike protein CDS gc (1-1273)(K986P_V987P_Y453F_D614G)
auguucguguuccugguccuccugccccuggugagcucccagugcgugaaccucaccacccgcacgcagcugccgcccgccuacaccaacagcuucacccggggcgucuacuaccccgacaagguguuccgcuccagcgugcugcacuccacccaggaccucuuccugcccuucuucagcaacgucacgugguuccacgccauccacguguccgggaccaacggcaccaagcgguucgacaacccggugcugcccuucaacgacggggucuacuucgcgagcaccgagaaguccaacaucauccgcggcuggaucuucgggacgacccucgacagcaagacccagucccugcugaucgugaacaacgccaccaacguggucaucaaggugugcgaguuccaguucugcaacgaccccuuccucggcguguacuaccacaagaacaacaagagcuggauggaguccgaguuccgggucuacagcuccgccaacaacugcacguucgaguacgugagccagcccuuccugauggaccuggagggcaagcaggggaacuucaagaaccuccgcgaguucguguucaagaacaucgacggcuacuucaagaucuacuccaagcacaccccgaucaaccugguccgggaccugccccagggguucagcgcccucgagccccugguggaccugcccaucggcaucaacaucacccgcuuccagacccuccuggcccugcaccgguccuaccucacgccgggggacagcagcuccggcuggaccgcgggcgccgccgccuacuacgugggguaccugcagccccgcaccuuccugcucaaguacaacgagaacggcaccaucacggacgcggucgacugcgcccuggacccccugagcgagaccaagugcacccucaaguccuucaccguggagaaggggaucuaccagacgagcaacuuccgggugcagcccaccgaguccaucguccgcuucccgaacaucaccaaccugugccccuucggcgagguguucaacgccacccgguucgccagcgucuacgccuggaaccgcaagcggaucuccaacugcguggcggacuacagcgugcuguacaacuccgccagcuucuccacguucaagugcuacggcgucagccccaccaagcucaacgaccugugcuucaccaacguguacgccgacuccuucgugauccgcggggacgagguccggcagaucgcccccggccagaccgggaagaucgccgacuacaacuacaagcugccggacgacuucacgggcugcgugaucgcguggaacagcaacaaccucgacuccaaggucgggggcaacuacaacuaccuguuccgccuguuccgcaagagcaaccucaagcccuucgagcgggacaucuccaccgagaucuaccaggccggcagcacccccugcaacgggguggagggcuucaacugcuacuucccccugcaguccuacggguuccagccgaccaacggcgugggguaccagcccuaccggguggucgugcugagcuucgagcuccugcacgcccccgccacggugugcggccccaagaaguccaccaaccuggucaagaacaagugcgugaacuucaacuucaacggccucaccgggaccggcgugcugaccgagagcaacaagaaguuccugccguuccagcaguucgggcgcgacaucgccgacacgaccgacgcgguccgcgacccccagacccuggagauccucgacaucacccccugcagcuucggcgggguguccgugaucacgccgggcaccaacaccagcaaccaggucgccgugcuguaccagggcgugaacugcaccgagguccccguggccauccacgccgaccagcugacgcccaccuggcggguguacuccaccgggagcaacgucuuccagacccgcgccggcugccucaucggggcggagcacgugaacaacuccuacgagugcgacauccccaucggcgccggcaucugcgccagcuaccagacgcagaccaacuccccgcggcgcgcccggagcguggcgucccagagcaucaucgccuacaccaugucccugggggccgagaacagcgucgccuacuccaacaacagcaucgccauccccaccaacuucacgaucuccgugaccaccgagauccugcccgugagcaugaccaagacgagcgucgacugcaccauguacaucugcggcgacuccaccgagugcagcaaccuccugcugcaguacggguccuucugcacccagcucaaccgcgcgcugacgggcaucgccguggagcaggacaagaacacccaggagguguucgcccaggucaagcagaucuacaagacgcccccgaucaaggacuucgggggcuucaacuucagccagauccugcccgaccccuccaagcccagcaagcgguccuucaucgaggaccuccuguucaacaaggugacccuggccgacgccggcuucaucaagcaguacggggacugccucggcgacaucgcggcccgcgaccugaucugcgcccagaaguucaacgggcugaccgugcucccgccccugcugaccgacgagaugaucgcccaguacaccagcgcccuccuggcgggcaccaucacguccggguggaccuucggcgccggcgccgcccugcagauccccuucgcgaugcagauggccuaccgguucaacgggaucggcgucacccagaacgugcucuacgagaaccagaagcugaucgccaaccaguucaacagcgccaucgggaagauccaggacucccugagcuccaccgccagcgcgcucggcaagcugcaggacguggucaaccagaacgcccaggcccugaacacgcucgugaagcagcuguccagcaacuucggggccaucuccagcgugcugaacgacauccucucccgccuggacccgcccgaggccgagguccagaucgaccggcugaucaccggccgccuccagagccugcagaccuacgugacccagcagcugauccgggcggccgagauccgcgccagcgccaaccucgccgcgaccaagauguccgagugcgugcugggccagagcaagcgggucgacuucugcgggaagggcuaccaccugauguccuucccccagagcgcgccccacggggugguguuccuccacgucacguacgugcccgcccaggagaagaacuucaccaccgccccggccaucugccacgacggcaaggcccacuucccccgcgagggggucuucguguccaacggcacccacugguucgugacgcagcggaacuucuacgagccccagaucaucaccaccgacaacaccuucgucagcggcaacugcgacguggugaucgggaucgucaacaacacgguguacgacccccugcagccggagcuggacuccuucaaggaggagcucgacaaguacuucaagaaccacaccagccccgacguggaccugggcgacaucuccgggaucaacgccagcgucgugaacauccagaaggagaucgaccgccugaacgagguggccaagaaccucaacgagucccugaucgaccugcaggagcucggcaaguacgagcaguacaucaaguggcccugguacaucuggcugggcuucaucgccgggcugaucgcgaucgucauggugaccaucaugcucugcugcaugaccagcugcugcuccugccugaagggcugcugcagcugcggguccugcugcaaguucgacgaggacgacagcgagccggugcugaagggcgucaagcuccacuacacguga

SEQ ID NO: 23103 - RNA, 3822 nt, Artificial Sequence
  SARS-CoV-2/Wuhan/WIV05/2019__EPI_ISL_402128 spike protein CDS gc (1-1273)(K986P_V987P_D614G_I692V)
auguucguguuccugguccuccugccccuggugagcucccagugcgugaaccucaccacccgcacgcagcugccgcccgccuacaccaacagcuucacccggggcgucuacuaccccgacaagguguuccgcuccagcgugcugcacuccacccaggaccucuuccugcccuucuucagcaacgucacgugguuccacgccauccacguguccgggaccaacggcaccaagcgguucgacaacccggugcugcccuucaacgacggggucuacuucgcgagcaccgagaaguccaacaucauccgcggcuggaucuucgggacgacccucgacagcaagacccagucccugcugaucgugaacaacgccaccaacguggucaucaaggugugcgaguuccaguucugcaacgaccccuuccucggcguguacuaccacaagaacaacaagagcuggauggaguccgaguuccgggucuacagcuccgccaacaacugcacguucgaguacgugagccagcccuuccugauggaccuggagggcaagcaggggaacuucaagaaccuccgcgaguucguguucaagaacaucgacggcuacuucaagaucuacuccaagcacaccccgaucaaccugguccgggaccugccccagggguucagcgcccucgagccccugguggaccugcccaucggcaucaacaucacccgcuuccagacccuccuggcccugcaccgguccuaccucacgccgggggacagcagcuccggcuggaccgcgggcgccgccgccuacuacgugggguaccugcagccccgcaccuuccugcucaaguacaacgagaacggcaccaucacggacgcggucgacugcgcccuggacccccugagcgagaccaagugcacccucaaguccuucaccguggagaaggggaucuaccagacgagcaacuuccgggugcagcccaccgaguccaucguccgcuucccgaacaucaccaaccugugccccuucggcgagguguucaacgccacccgguucgccagcgucuacgccuggaaccgcaagcggaucuccaacugcguggcggacuacagcgugcuguacaacuccgccagcuucuccacguucaagugcuacggcgucagccccaccaagcucaacgaccugugcuucaccaacguguacgccgacuccuucgugauccgcggggacgagguccggcagaucgcccccggccagaccgggaagaucgccgacuacaacuacaagcugccggacgacuucacgggcugcgugaucgcguggaacagcaacaaccucgacuccaaggucgggggcaacuacaacuaccuguaccgccuguuccgcaagagcaaccucaagcccuucgagcgggacaucuccaccgagaucuaccaggccggcagcacccccugcaacgggguggagggcuucaacugcuacuucccccugcaguccuacggguuccagccgaccaacggcgugggguaccagcccuaccggguggucgugcugagcuucgagcuccugcacgcccccgccacggugugcggccccaagaaguccaccaaccuggucaagaacaagugcgugaacuucaacuucaacggccucaccgggaccggcgugcugaccgagagcaacaagaaguuccugccguuccagcaguucgggcgcgacaucgccgacacgaccgacgcgguccgcgacccccagacccuggagauccucgacaucacccccugcagcuucggcgggguguccgugaucacgccgggcaccaacaccagcaaccaggucgccgugcuguaccagggcgugaacugcaccgagguccccguggccauccacgccgaccagcugacgcccaccuggcggguguacuccaccgggagcaacgucuuccagacccgcgccggcugccucaucggggcggagcacgugaacaacuccuacgagugcgacauccccaucggcgccggcaucugcgccagcuaccagacgcagaccaacuccccgcggcgcgcccggagcguggcgucccagagcgucaucgccuacaccaugucccugggggccgagaacagcguggccuacuccaacaacagcaucgccauccccaccaacuucacgaucuccgugaccaccgagauccugcccgucagcaugaccaagacgagcguggacugcaccauguacaucugcggcgacuccaccgagugcagcaaccuccugcugcaguacggguccuucugcacccagcucaaccgcgcgcugacgggcaucgccguggagcaggacaagaacacccaggaggucuucgcccaggugaagcagaucuacaagacgcccccgaucaaggacuucgggggcuucaacuucagccagauccugcccgaccccuccaagcccagcaagcgguccuucaucgaggaccuccuguucaacaaggugacccuggccgacgccggcuucaucaagcaguacggggacugccucggcgacaucgcggcccgcgaccugaucugcgcccagaaguucaacgggcugaccguccucccgccccugcugaccgacgagaugaucgcccaguacaccagcgcccuccuggcgggcaccaucacguccggguggaccuucggcgccggcgccgcccugcagauccccuucgcgaugcagauggccuaccgguucaacgggaucggcgugacccagaacgugcucuacgagaaccagaagcugaucgccaaccaguucaacagcgccaucgggaagauccaggacucccugagcuccaccgccagcgcgcucggcaagcugcaggacgucgugaaccagaacgcccaggcccugaacacgcucgugaagcagcuguccagcaacuucggggccaucuccagcguccugaacgacauccucucccgccuggacccgcccgaggccgaggugcagaucgaccggcugaucaccggccgccuccagagccugcagaccuacgugacccagcagcugauccgggcggccgagauccgcgccagcgccaaccucgccgcgaccaagauguccgagugcguccugggccagagcaagcggguggacuucugcgggaagggcuaccaccugauguccuucccccagagcgcgccccacgggguggucuuccuccacgugacguacguccccgcccaggagaagaacuucaccaccgccccggccaucugccacgacggcaaggcccacuucccccgcgaggggguguucguguccaacggcacccacugguucgucacgcagcggaacuucuacgagccccagaucaucaccaccgacaacaccuucgugagcggcaacugcgacguggucaucgggaucgugaacaacacgguguacgacccccugcagccggagcuggacuccuucaaggaggagcucgacaaguacuucaagaaccacaccagccccgacgucgaccugggcgacaucuccgggaucaacgccagcguggugaacauccagaaggagaucgaccgccugaacgaggucgccaagaaccucaacgagucccugaucgaccugcaggagcucggcaaguacgagcaguacaucaaguggcccugguacaucuggcugggcuucaucgccgggcugaucgcgaucgugauggugaccaucaugcucugcugcaugaccagcugcugcuccugccugaagggcugcugcagcugcggguccugcugcaaguucgacgaggacgacagcgagccgguccugaagggcgugaagcuccacuacacguga

SEQ ID NO: 23104 - RNA, 3822 nt, Artificial Sequence
  SARS-CoV-2/Wuhan/WIV05/2019__EPI_ISL_402128 spike protein CDS gc (1-1273)(K986P_V987P_D614G_M1229I)
auguucguguuccugguccuccugccccuggugagcucccagugcgugaaccucaccacccgcacgcagcugccgcccgccuacaccaacagcuucacccggggcgucuacuaccccgacaagguguuccgcuccagcgugcugcacuccacccaggaccucuuccugcccuucuucagcaacgucacgugguuccacgccauccacguguccgggaccaacggcaccaagcgguucgacaacccggugcugcccuucaacgacggggucuacuucgcgagcaccgagaaguccaacaucauccgcggcuggaucuucgggacgacccucgacagcaagacccagucccugcugaucgugaacaacgccaccaacguggucaucaaggugugcgaguuccaguucugcaacgaccccuuccucggcguguacuaccacaagaacaacaagagcuggauggaguccgaguuccgggucuacagcuccgccaacaacugcacguucgaguacgugagccagcccuuccugauggaccuggagggcaagcaggggaacuucaagaaccuccgcgaguucguguucaagaacaucgacggcuacuucaagaucuacuccaagcacaccccgaucaaccugguccgggaccugccccagggguucagcgcccucgagccccugguggaccugcccaucggcaucaacaucacccgcuuccagacccuccuggcccugcaccgguccuaccucacgccgggggacagcagcuccggcuggaccgcgggcgccgccgccuacuacgugggguaccugcagccccgcaccuuccugcucaaguacaacgagaacggcaccaucacggacgcggucgacugcgcccuggacccccugagcgagaccaagugcacccucaaguccuucaccguggagaaggggaucuaccagacgagcaacuuccgggugcagcccaccgaguccaucguccgcuucccgaacaucaccaaccugugccccuucggcgagguguucaacgccacccgguucgccagcgucuacgccuggaaccgcaagcggaucuccaacugcguggcggacuacagcgugcuguacaacuccgccagcuucuccacguucaagugcuacggcgucagccccaccaagcucaacgaccugugcuucaccaacguguacgccgacuccuucgugauccgcggggacgagguccggcagaucgcccccggccagaccgggaagaucgccgacuacaacuacaagcugccggacgacuucacgggcugcgugaucgcguggaacagcaacaaccucgacuccaaggucgggggcaacuacaacuaccuguaccgccuguuccgcaagagcaaccucaagcccuucgagcgggacaucuccaccgagaucuaccaggccggcagcacccccugcaacgggguggagggcuucaacugcuacuucccccugcaguccuacggguuccagccgaccaacggcgugggguaccagcccuaccggguggucgugcugagcuucgagcuccugcacgcccccgccacggugugcggccccaagaaguccaccaaccuggucaagaacaagugcgugaacuucaacuucaacggccucaccgggaccggcgugcugaccgagagcaacaagaaguuccugccguuccagcaguucgggcgcgacaucgccgacacgaccgacgcgguccgcgacccccagacccuggagauccucgacaucacccccugcagcuucggcgggguguccgugaucacgccgggcaccaacaccagcaaccaggucgccgugcuguaccagggcgugaacugcaccgagguccccguggccauccacgccgaccagcugacgcccaccuggcggguguacuccaccgggagcaacgucuuccagacccgcgccggcugccucaucggggcggagcacgugaacaacuccuacgagugcgacauccccaucggcgccggcaucugcgccagcuaccagacgcagaccaacuccccgcggcgcgcccggagcguggcgucccagagcaucaucgccuacaccaugucccugggggccgagaacagcgucgccuacuccaacaacagcaucgccauccccaccaacuucacgaucuccgugaccaccgagauccugcccgugagcaugaccaagacgagcgucgacugcaccauguacaucugcggcgacuccaccgagugcagcaaccuccugcugcaguacggguccuucugcacccagcucaaccgcgcgcugacgggcaucgccguggagcaggacaagaacacccaggagguguucgcccaggucaagcagaucuacaagacgcccccgaucaaggacuucgggggcuucaacuucagccagauccugcccgaccccuccaagcccagcaagcgguccuucaucgaggaccuccuguucaacaaggugacccuggccgacgccggcuucaucaagcaguacggggacugccucggcgacaucgcggcccgcgaccugaucugcgcccagaaguucaacgggcugaccgugcucccgccccugcugaccgacgagaugaucgcccaguacaccagcgcccuccuggcgggcaccaucacguccggguggaccuucggcgccggcgccgcccugcagauccccuucgcgaugcagauggccuaccgguucaacgggaucggcgucacccagaacgugcucuacgagaaccagaagcugaucgccaaccaguucaacagcgccaucgggaagauccaggacucccugagcuccaccgccagcgcgcucggcaagcugcaggacguggucaaccagaacgcccaggcccugaacacgcucgugaagcagcuguccagcaacuucggggccaucuccagcgugcugaacgacauccucucccgccuggacccgcccgaggccgagguccagaucgaccggcugaucaccggccgccuccagagccugcagaccuacgugacccagcagcugauccgggcggccgagauccgcgccagcgccaaccucgccgcgaccaagauguccgagugcgugcugggccagagcaagcgggucgacuucugcgggaagggcuaccaccugauguccuucccccagagcgcgccccacggggugguguuccuccacgucacguacgugcccgcccaggagaagaacuucaccaccgccccggccaucugccacgacggcaaggcccacuucccccgcgagggggucuucguguccaacggcacccacugguucgugacgcagcggaacuucuacgagccccagaucaucaccaccgacaacaccuucgucagcggcaacugcgacguggugaucgggaucgucaacaacacgguguacgacccccugcagccggagcuggacuccuucaaggaggagcucgacaaguacuucaagaaccacaccagccccgacguggaccugggcgacaucuccgggaucaacgccagcgucgugaacauccagaaggagaucgaccgccugaacgagguggccaagaaccucaacgagucccugaucgaccugcaggagcucggcaaguacgagcaguacaucaaguggcccugguacaucuggcugggcuucaucgccgggcugaucgcgaucgucaucgugaccaucaugcucugcugcaugaccagcugcugcuccugccugaagggcugcugcagcugcggguccugcugcaaguucgacgaggacgacagcgagccggugcugaagggcgucaagcuccacuacacguga

SEQ ID NO: 23105 - RNA, 3816 nt, Artificial Sequence
  SARS-CoV-2/Wuhan/WIV05/2019__EPI_ISL_402128 spike protein CDS gc (1-1273)(K986P_V987P_H69del_V70del_A222V_Y453F_S477N_D614G_I692V)
auguucguguuccugguccuccugccccuggugagcucccagugcgugaaccucaccacccgcacgcagcugccgcccgccuacaccaacagcuucacccggggcgucuacuaccccgacaagguguuccgcuccagcgugcugcacuccacccaggaccucuuccugcccuucuucagcaacgucacgugguuccacgccaucuccgggaccaacggcaccaagcgguucgacaacccggugcugcccuucaacgacgggguguacuucgcgagcaccgagaaguccaacaucauccgcggcuggaucuucgggacgacccucgacagcaagacccagucccugcugaucgucaacaacgccaccaacguggugaucaaggucugcgaguuccaguucugcaacgaccccuuccucggcguguacuaccacaagaacaacaagagcuggauggaguccgaguuccggguguacagcuccgccaacaacugcacguucgaguacgucagccagcccuuccugauggaccuggagggcaagcaggggaacuucaagaaccuccgcgaguucguguucaagaacaucgacggcuacuucaagaucuacuccaagcacaccccgaucaaccuggugcgggaccugccccagggguucagcguccucgagccccugguggaccugcccaucggcaucaacaucacccgcuuccagacccuccuggcccugcaccgguccuaccucacgccgggggacagcagcuccggcuggaccgccggcgcggccgccuacuacgugggguaccugcagccccgcaccuuccugcucaaguacaacgagaacggcaccaucacggacgccgucgacugcgcgcuggacccccugagcgagaccaagugcacccucaaguccuucaccguggagaaggggaucuaccagacgagcaacuuccgggugcagcccaccgaguccaucguccgcuucccgaacaucaccaaccugugccccuucggcgagguguucaacgccacccgguucgccagcgucuacgccuggaaccgcaagcggaucuccaacugcguggccgacuacagcgugcuguacaacuccgcgagcuucuccacguucaagugcuacggcgucagccccaccaagcucaacgaccugugcuucaccaacguguacgccgacuccuucgugauccgcggggacgagguccggcagaucgcccccggccagaccgggaagaucgccgacuacaacuacaagcugccggacgacuucacgggcugcgugaucgccuggaacagcaacaaccucgacuccaaggucgggggcaacuacaacuaccuguuccgccuguuccgcaagagcaaccucaagcccuucgagcgggacaucuccaccgagaucuaccaggcgggcaacacccccugcaacgggguggagggcuucaacugcuacuucccccugcagagcuacggguuccagccgaccaacggcgugggguaccagcccuaccggguggucgugcuguccuucgagcuccugcacgcccccgccacggugugcggccccaagaaguccaccaaccuggucaagaacaagugcgugaacuucaacuucaacggccucaccgggaccggcgugcugaccgagagcaacaagaaguuccugccguuccagcaguucgggcgcgacaucgccgacacgaccgacgccguccgcgacccccagacccuggagauccucgacaucacccccugcagcuucggcggggugagcgugaucacgccgggcaccaacaccuccaaccaggucgcggugcuguaccagggcgugaacugcaccgagguccccguggccauccacgccgaccagcugacgcccaccuggcggguguacagcaccggguccaacgucuuccagacccgcgccggcugccucaucggggccgagcacgugaacaacagcuacgagugcgacauccccaucggcgcgggcaucugcgccuccuaccagacgcagaccaacagcccgcggcgcgcccgguccguggccagccaguccgucaucgcguacaccaugagccugggggccgagaacuccguggccuacagcaacaacuccaucgccauccccaccaacuucacgaucagcgugaccaccgagauccugcccgucuccaugaccaagacgagcguggacugcaccauguacaucugcggcgacagcaccgagugcuccaaccuccugcugcaguacgggagcuucugcacccagcucaaccgcgcccugacgggcaucgcgguggagcaggacaagaacacccaggaggucuucgcccaggugaagcagaucuacaagacgcccccgaucaaggacuucgggggcuucaacuucucccagauccugcccgaccccagcaagcccuccaagcggagcuucaucgaggaccuccuguucaacaaggugacccuggccgacgccggcuucaucaagcaguacggggacugccucggcgacaucgccgcgcgcgaccugaucugcgcccagaaguucaacgggcugaccguccucccgccccugcugaccgacgagaugaucgcccaguacaccuccgcccuccuggccggcaccaucacgagcggguggaccuucggcgcgggcgccgcccugcagauccccuucgccaugcagauggcguaccgguucaacgggaucggcgugacccagaacgugcucuacgagaaccagaagcugaucgccaaccaguucaacuccgccaucgggaagauccaggacagccuguccagcaccgccuccgcccucggcaagcugcaggacgucgugaaccagaacgcgcaggcccugaacacgcucgugaagcagcugagcuccaacuucggggccaucagcuccguccugaacgacauccucagccgccuggacccgcccgaggccgaggugcagaucgaccggcugaucaccggccgccuccagucccugcagaccuacgugacccagcagcugauccgggccgcggagauccgcgccagcgccaaccucgccgccaccaagaugagcgagugcguccugggccaguccaagcggguggacuucugcgggaagggcuaccaccugaugagcuucccccaguccgcgccccacgggguggucuuccuccacgugacguacguccccgcccaggagaagaacuucaccaccgccccggccaucugccacgacggcaaggcgcacuucccccgcgaggggguguucgugagcaacggcacccacugguucgucacgcagcggaacuucuacgagccccagaucaucaccaccgacaacaccuucguguccggcaacugcgacguggucaucgggaucgugaacaacacgguguacgacccccugcagccggagcuggacagcuucaaggaggagcucgacaaguacuucaagaaccacaccucccccgacgucgaccugggcgacaucagcgggaucaacgccuccguggugaacauccagaaggagaucgaccgccugaacgaggucgccaagaaccucaacgagagccugaucgaccugcaggagcucggcaaguacgagcaguacaucaaguggcccugguacaucuggcugggcuucaucgccgggcugaucgccaucgugauggugaccaucaugcucugcugcaugaccuccugcugcagcugccugaagggcugcugcuccugcgggagcugcugcaaguucgacgaggacgacuccgagccgguccugaagggcgugaagcuccacuacacguga

SEQ ID NO: 23106 - RNA, 3816 nt, Artificial Sequence
  SARS-CoV-2/Wuhan/WIV05/2019__EPI_ISL_402128 spike protein CDS gc (1-1273)(K986P_V987P_H69del_V70del_Y453F_D614G_I692V_M1229I)
auguucguguuccugguccuccugccccuggugagcucccagugcgugaaccucaccacccgcacgcagcugccgcccgccuacaccaacagcuucacccggggcgucuacuaccccgacaagguguuccgcuccagcgugcugcacuccacccaggaccucuuccugcccuucuucagcaacgucacgugguuccacgccaucuccgggaccaacggcaccaagcgguucgacaacccggugcugcccuucaacgacgggguguacuucgcgagcaccgagaaguccaacaucauccgcggcuggaucuucgggacgacccucgacagcaagacccagucccugcugaucgucaacaacgccaccaacguggugaucaaggucugcgaguuccaguucugcaacgaccccuuccucggcguguacuaccacaagaacaacaagagcuggauggaguccgaguuccggguguacagcuccgccaacaacugcacguucgaguacgucagccagcccuuccugauggaccuggagggcaagcaggggaacuucaagaaccuccgcgaguucguguucaagaacaucgacggcuacuucaagaucuacuccaagcacaccccgaucaaccuggugcgggaccugccccagggguucagcgcccucgagccccuggucgaccugcccaucggcaucaacaucacccgcuuccagacccuccuggcccugcaccgguccuaccucacgccgggggacagcagcuccggcuggaccgcgggcgccgccgccuacuacgugggguaccugcagccccgcaccuuccugcucaaguacaacgagaacggcaccaucacggacgcgguggacugcgcccuggacccccugagcgagaccaagugcacccucaaguccuucaccgucgagaaggggaucuaccagacgagcaacuuccgggugcagcccaccgaguccaucgugcgcuucccgaacaucaccaaccugugccccuucggcgaggucuucaacgccacccgguucgccagcguguacgccuggaaccgcaagcggaucuccaacugcgucgcggacuacagcgugcuguacaacuccgccagcuucuccacguucaagugcuacggcgugagccccaccaagcucaacgaccugugcuucaccaacgucuacgccgacuccuucgugauccgcggggacgaggugcggcagaucgcccccggccagaccgggaagaucgccgacuacaacuacaagcugccggacgacuucacgggcugcgucaucgcguggaacagcaacaaccucgacuccaaggucgggggcaacuacaacuaccuguuccgccuguuccgcaagagcaaccucaagcccuucgagcgggacaucuccaccgagaucuaccaggccggcagcacccccugcaacgggguggagggcuucaacugcuacuucccccugcaguccuacggguuccagccgaccaacggcgugggguaccagcccuaccggguggugguccugagcuucgagcuccugcacgcccccgccacggugugcggccccaagaaguccaccaaccuggugaagaacaagugcgucaacuucaacuucaacggccucaccgggaccggcgugcugaccgagagcaacaagaaguuccugccguuccagcaguucgggcgcgacaucgccgacacgaccgacgcggugcgcgacccccagacccuggagauccucgacaucacccccugcagcuucggcggggucuccgugaucacgccgggcaccaacaccagcaaccagguggccguccuguaccagggcgugaacugcaccgaggugcccgucgccauccacgccgaccagcugacgcccaccuggcggguguacuccaccgggagcaacguguuccagacccgcgccggcugccucaucggggcggagcacgucaacaacuccuacgagugcgacauccccaucggcgccggcaucugcgccagcuaccagacgcagaccaacuccccgcggcgcgcccggagcguggcgucccagagcgugaucgccuacaccaugucccugggggccgagaacagcgucgccuacuccaacaacagcaucgccauccccaccaacuucacgaucuccgugaccaccgagauccugcccgugagcaugaccaagacgagcgucgacugcaccauguacaucugcggcgacuccaccgagugcagcaaccuccugcugcaguacggguccuucugcacccagcucaaccgcgcgcugacgggcaucgccguggagcaggacaagaacacccaggagguguucgcccaggucaagcagaucuacaagacgcccccgaucaaggacuucgggggcuucaacuucagccagauccugcccgaccccuccaagcccagcaagcgguccuucaucgaggaccuccuguucaacaaggugacccuggccgacgccggcuucaucaagcaguacggggacugccucggcgacaucgcggcccgcgaccugaucugcgcccagaaguucaacgggcugaccgugcucccgccccugcugaccgacgagaugaucgcccaguacaccagcgcccuccuggcgggcaccaucacguccggguggaccuucggcgccggcgccgcccugcagauccccuucgcgaugcagauggccuaccgguucaacgggaucggcgucacccagaacgugcucuacgagaaccagaagcugaucgccaaccaguucaacagcgccaucgggaagauccaggacucccugagcuccaccgccagcgcgcucggcaagcugcaggacguggucaaccagaacgcccaggcccugaacacgcucgugaagcagcuguccagcaacuucggggccaucuccagcgugcugaacgacauccucucccgccuggacccgcccgaggccgagguccagaucgaccggcugaucaccggccgccuccagagccugcagaccuacgugacccagcagcugauccgggcggccgagauccgcgccagcgccaaccucgccgcgaccaagauguccgagugcgugcugggccagagcaagcgggucgacuucugcgggaagggcuaccaccugauguccuucccccagagcgcgccccacggggugguguuccuccacgucacguacgugcccgcccaggagaagaacuucaccaccgccccggccaucugccacgacggcaaggcccacuucccccgcgagggggucuucguguccaacggcacccacugguucgugacgcagcggaacuucuacgagccccagaucaucaccaccgacaacaccuucgucagcggcaacugcgacguggugaucgggaucgucaacaacacgguguacgacccccugcagccggagcuggacuccuucaaggaggagcucgacaaguacuucaagaaccacaccagccccgacguggaccugggcgacaucuccgggaucaacgccagcgucgugaacauccagaaggagaucgaccgccugaacgagguggccaagaaccucaacgagucccugaucgaccugcaggagcucggcaaguacgagcaguacaucaaguggcccugguacaucuggcugggcuucaucgccgggcugaucgcgaucgucaucgugaccaucaugcucugcugcaugaccagcugcugcuccugccugaagggcugcugcagcugcggguccugcugcaaguucgacgaggacgacagcgagccggugcugaagggcgucaagcuccacuacacguga

SEQ ID NO: 23107 - RNA, 3813 nt, Artificial Sequence
  SARS-CoV-2/Wuhan/WIV05/2019__EPI_ISL_402128 spike protein CDS gc (1-1273)(K986P_V987P_K986P_V987P_H69del_V70del_Y144del_N501Y_A570 D_D614G_P681H_T716I_S982A_D1118H)
auguucguguuccugguccuccugccccuggugagcucccagugcgugaaccucaccacccgcacgcagcugccgcccgccuacaccaacagcuucacccggggcgucuacuaccccgacaagguguuccgcuccagcgugcugcacuccacccaggaccucuuccugcccuucuucagcaacgucacgugguuccacgccaucuccgggaccaacggcaccaagcgguucgacaacccggugcugcccuucaacgacgggguguacuucgcgagcaccgagaaguccaacaucauccgcggcuggaucuucgggacgacccucgacagcaagacccagucccugcugaucgucaacaacgccaccaacguggugaucaaggucugcgaguuccaguucugcaacgaccccuuccucggcguguaccacaagaacaacaagagcuggauggaguccgaguuccggguguacagcuccgccaacaacugcacguucgaguacgucagccagcccuuccugauggaccuggagggcaagcaggggaacuucaagaaccuccgcgaguucguguucaagaacaucgacggcuacuucaagaucuacuccaagcacaccccgaucaaccuggugcgggaccugccccagggguucagcgcccucgagccccuggucgaccugcccaucggcaucaacaucacccgcuuccagacccuccuggcccugcaccgguccuaccucacgccgggggacagcagcuccggcuggaccgcgggcgccgccgccuacuacgugggguaccugcagccccgcaccuuccugcucaaguacaacgagaacggcaccaucacggacgcgguggacugcgcccuggacccccugagcgagaccaagugcacccucaaguccuucaccgucgagaaggggaucuaccagacgagcaacuuccgggugcagcccaccgaguccaucgugcgcuucccgaacaucaccaaccugugccccuucggcgaggucuucaacgccacccgguucgccagcguguacgccuggaaccgcaagcggaucuccaacugcgucgcggacuacagcgugcuguacaacuccgccagcuucuccacguucaagugcuacggcgugagccccaccaagcucaacgaccugugcuucaccaacgucuacgccgacuccuucgugauccgcggggacgaggugcggcagaucgcccccggccagaccgggaagaucgccgacuacaacuacaagcugccggacgacuucacgggcugcgucaucgcguggaacagcaacaaccucgacuccaaggucgggggcaacuacaacuaccuguaccgccuguuccgcaagagcaaccucaagcccuucgagcgggacaucuccaccgagaucuaccaggccggcagcacccccugcaacgggguggagggcuucaacugcuacuucccccugcaguccuacggguuccagccgaccuacggcgugggguaccagcccuaccggguggugguccugagcuucgagcuccugcacgcccccgccacggugugcggccccaagaaguccaccaaccuggugaagaacaagugcgucaacuucaacuucaacggccucaccgggaccggcgugcugaccgagagcaacaagaaguuccugccguuccagcaguucgggcgcgacaucgacgacacgaccgacgccgugcgcgacccccagacccuggagauccucgacaucacccccugcagcuucggcggggucuccgugaucacgccgggcaccaacaccagcaaccagguggcgguccuguaccagggcgugaacugcaccgaggugcccgucgccauccacgccgaccagcugacgcccaccuggcggguguacuccaccgggagcaacguguuccagacccgcgccggcugccucaucggggccgagcacgucaacaacuccuacgagugcgacauccccaucggcgcgggcaucugcgccagcuaccagacgcagaccaacucccaccggcgcgcccggagcguggccucccagagcaucaucgcguacaccaugucccugggggccgagaacagcguggccuacuccaacaacagcaucgccaucccgaucaacuucaccaucuccgucacgaccgagauccugcccgugagcaugaccaagaccagcguggacugcacgauguacaucugcggcgacuccaccgagugcagcaaccuccugcugcaguacggguccuucugcacccagcucaaccgcgcccugaccggcaucgcggucgagcaggacaagaacacgcaggagguguucgcccaggugaagcagaucuacaagaccccgcccaucaaggacuucgggggcuucaacuucagccagauccugcccgaccccuccaagcccagcaagcgguccuucaucgaggaccuccuguucaacaaggucacccuggccgacgccggcuucaucaagcaguacggggacugccucggcgacaucgccgcgcgcgaccugaucugcgcccagaaguucaacgggcugaccgugcugcccccgcuccugacggacgagaugaucgcccaguacaccagcgcccuccuggccggcaccaucaccuccggguggacguucggcgcgggcgccgcccugcagauccccuucgccaugcagauggcguaccgguucaacgggaucggcgugacccagaacguccucuacgagaaccagaagcugaucgccaaccaguucaacagcgccaucgggaagauccaggacucccugagcuccaccgccagcgcccucggcaagcugcaggacguggugaaccagaacgcgcaggcccugaacacccucgucaagcagcuguccagcaacuucggggccaucuccagcgugcugaacgacauccucgcccgccuggacccgcccgaggccgaggugcagaucgaccggcugaucacgggccgccuccagucccugcagaccuacgucacccagcagcugauccgggcggccgagauccgcgccagcgccaaccucgccgcgaccaagaugagcgagugcgugcugggccaguccaagcggguggacuucugcgggaagggcuaccaccugaugagcuucccccaguccgcgccccacggggucguguuccuccacgugaccuacguccccgcccaggagaagaacuucacgaccgcccccgccaucugccacgacggcaaggcccacuucccgcgcgaggggguguucgucagcaacggcacccacugguucgugacccagcggaacuucuacgagccccagaucaucacgacccacaacaccuucguguccggcaacugcgacgucgugaucgggaucgugaacaacaccgucuacgacccccugcagcccgagcuggacagcuucaaggaggagcucgacaaguacuucaagaaccacacguccccggacguggaccugggcgacaucagcgggaucaacgccuccguggucaacauccagaaggagaucgaccgccugaacgagguggccaagaaccucaacgagagccugaucgaccugcaggagcucggcaaguacgagcaguacaucaaguggcccugguacaucuggcugggcuucaucgccgggcugaucgcgaucgugauggucaccaucaugcucugcugcaugaccuccugcugcagcugccugaagggcugcugcuccugcgggagcugcugcaaguucgacgaggacgacuccgagcccgugcugaagggcgugaagcuccacuacaccuga

SEQ ID NO: 23108 - RNA, 3822 nt, Artificial Sequence
  SARS-CoV-2/Wuhan/WIV05/2019__EPI_ISL_402128 spike protein CDS gc (1-1273)(K986P_V987P_K986P_V987P_K417N_E484K_N501Y_D614G)
auguucguguuccugguccuccugccccuggugagcucccagugcgugaaccucaccacccgcacgcagcugccgcccgccuacaccaacagcuucacccggggcgucuacuaccccgacaagguguuccgcuccagcgugcugcacuccacccaggaccucuuccugcccuucuucagcaacgucacgugguuccacgccauccacguguccgggaccaacggcaccaagcgguucgacaacccggugcugcccuucaacgacggggucuacuucgcgagcaccgagaaguccaacaucauccgcggcuggaucuucgggacgacccucgacagcaagacccagucccugcugaucgugaacaacgccaccaacguggucaucaaggugugcgaguuccaguucugcaacgaccccuuccucggcguguacuaccacaagaacaacaagagcuggauggaguccgaguuccgggucuacagcuccgccaacaacugcacguucgaguacgugagccagcccuuccugauggaccuggagggcaagcaggggaacuucaagaaccuccgcgaguucguguucaagaacaucgacggcuacuucaagaucuacuccaagcacaccccgaucaaccugguccgggaccugccccagggguucagcgcccucgagccccugguggaccugcccaucggcaucaacaucacccgcuuccagacccuccuggcccugcaccgguccuaccucacgccgggggacagcagcuccggcuggaccgcgggcgccgccgccuacuacgugggguaccugcagccccgcaccuuccugcucaaguacaacgagaacggcaccaucacggacgcggucgacugcgcccuggacccccugagcgagaccaagugcacccucaaguccuucaccguggagaaggggaucuaccagacgagcaacuuccgggugcagcccaccgaguccaucguccgcuucccgaacaucaccaaccugugccccuucggcgagguguucaacgccacccgguucgccagcgucuacgccuggaaccgcaagcggaucuccaacugcguggcggacuacagcgugcuguacaacuccgccagcuucuccacguucaagugcuacggcgucagccccaccaagcucaacgaccugugcuucaccaacguguacgccgacuccuucgugauccgcggggacgagguccggcagaucgcccccggccagaccgggaacaucgccgacuacaacuacaagcugccggacgacuucacgggcugcgugaucgcguggaacagcaacaaccucgacuccaaggucgggggcaacuacaacuaccuguaccgccuguuccgcaagagcaaccucaagcccuucgagcgggacaucuccaccgagaucuaccaggccggcagcacccccugcaacggggugaagggcuucaacugcuacuucccccugcaguccuacggguuccagccgaccuacggcgugggguaccagcccuaccggguggucgugcugagcuucgagcuccugcacgcccccgccacggugugcggccccaagaaguccaccaaccuggucaagaacaagugcgugaacuucaacuucaacggccucaccgggaccggcgugcugaccgagagcaacaagaaguuccugccguuccagcaguucgggcgcgacaucgccgacacgaccgacgcgguccgcgacccccagacccuggagauccucgacaucacccccugcagcuucggcgggguguccgugaucacgccgggcaccaacaccagcaaccaggucgccgugcuguaccagggcgugaacugcaccgagguccccguggccauccacgccgaccagcugacgcccaccuggcggguguacuccaccgggagcaacgucuuccagacccgcgccggcugccucaucggggcggagcacgugaacaacuccuacgagugcgacauccccaucggcgccggcaucugcgccagcuaccagacgcagaccaacuccccgcggcgcgcccggagcguggcgucccagagcaucaucgccuacaccaugucccugggggccgagaacagcgucgccuacuccaacaacagcaucgccauccccaccaacuucacgaucuccgugaccaccgagauccugcccgugagcaugaccaagacgagcgucgacugcaccauguacaucugcggcgacuccaccgagugcagcaaccuccugcugcaguacggguccuucugcacccagcucaaccgcgcgcugacgggcaucgccguggagcaggacaagaacacccaggagguguucgcccaggucaagcagaucuacaagacgcccccgaucaaggacuucgggggcuucaacuucagccagauccugcccgaccccuccaagcccagcaagcgguccuucaucgaggaccuccuguucaacaaggugacccuggccgacgccggcuucaucaagcaguacggggacugccucggcgacaucgcggcccgcgaccugaucugcgcccagaaguucaacgggcugaccgugcucccgccccugcugaccgacgagaugaucgcccaguacaccagcgcccuccuggcgggcaccaucacguccggguggaccuucggcgccggcgccgcccugcagauccccuucgcgaugcagauggccuaccgguucaacgggaucggcgucacccagaacgugcucuacgagaaccagaagcugaucgccaaccaguucaacagcgccaucgggaagauccaggacucccugagcuccaccgccagcgcgcucggcaagcugcaggacguggucaaccagaacgcccaggcccugaacacgcucgugaagcagcuguccagcaacuucggggccaucuccagcgugcugaacgacauccucucccgccuggacccgcccgaggccgagguccagaucgaccggcugaucaccggccgccuccagagccugcagaccuacgugacccagcagcugauccgggcggccgagauccgcgccagcgccaaccucgccgcgaccaagauguccgagugcgugcugggccagagcaagcgggucgacuucugcgggaagggcuaccaccugauguccuucccccagagcgcgccccacggggugguguuccuccacgucacguacgugcccgcccaggagaagaacuucaccaccgccccggccaucugccacgacggcaaggcccacuucccccgcgagggggucuucguguccaacggcacccacugguucgugacgcagcggaacuucuacgagccccagaucaucaccaccgacaacaccuucgucagcggcaacugcgacguggugaucgggaucgucaacaacacgguguacgacccccugcagccggagcuggacuccuucaaggaggagcucgacaaguacuucaagaaccacaccagccccgacguggaccugggcgacaucuccgggaucaacgccagcgucgugaacauccagaaggagaucgaccgccugaacgagguggccaagaaccucaacgagucccugaucgaccugcaggagcucggcaaguacgagcaguacaucaaguggcccugguacaucuggcugggcuucaucgccgggcugaucgcgaucgucauggugaccaucaugcucugcugcaugaccagcugcugcuccugccugaagggcugcugcagcugcggguccugcugcaaguucgacgaggacgacagcgagccggugcugaagggcgucaagcuccacuacacguga

SEQ ID NO: 23109 - RNA, 3813 nt, Artificial Sequence
  SARS-CoV-2/Wuhan/WIV05/2019__EPI_ISL_402128 spike protein CDS gc (1-1273)(K986P_V987P_K986P_V987P_L18F_D80A_D215G_L242del_A243del_ L244del_R246I_K417N_E484K_N501Y_D614G_A701V)
auguucguguuccugguccuccugccccuggugagcucccagugcgugaacuucaccacccgcacgcagcucccgcccgccuacaccaacagcuucacccggggcgucuacuaccccgacaagguguuccgcuccagcgugcugcacuccacccaggaccuguuccuccccuucuucagcaacgucacgugguuccacgccauccacguguccgggaccaacggcaccaagcgguucgcgaacccggugcugcccuucaacgacggggucuacuucgccagcaccgagaaguccaacaucauccgcggcuggaucuucgggacgacccuggacagcaagacccagucccuccugaucgugaacaacgccaccaacguggucaucaaggugugcgaguuccaguucugcaacgaccccuuccugggcguguacuaccacaagaacaacaagagcuggauggaguccgaguuccgggucuacagcuccgccaacaacugcacguucgaguacgugagccagcccuuccucauggaccuggagggcaagcaggggaacuucaagaaccugcgcgaguucguguucaagaacaucgacggcuacuucaagaucuacuccaagcacaccccgaucaaccucguccgggggcugccccagggcuucagcgcccuggagccccucguggaccugcccaucgggaucaacaucacccgcuuccagacccugcacaucuccuaccucacgccgggcgacagcagcuccggcuggaccgcgggggccgccgccuacuacgugggcuaccugcagccccggaccuuccugcucaaguacaacgagaacgggaccaucacggacgcggucgacugcgcccuggacccccugagcgagaccaagugcacccucaaguccuucaccguggagaagggcaucuaccagacgagcaacuuccgcgugcagcccaccgaguccaucguccgguucccgaacaucaccaaccugugccccuucggcgagguguucaacgccacccgcuucgccagcgucuacgccuggaaccggaagcgcaucuccaacugcguggcggacuacagcgugcuguacaacuccgccagcuucuccacguucaagugcuacggggucagccccaccaagcucaacgaccugugcuucaccaacguguacgccgacuccuucgugauccggggcgacgagguccgccagaucgcccccgggcagaccggcaacaucgccgacuacaacuacaagcugccggacgacuucacggggugcgugaucgcguggaacagcaacaaccucgacuccaaggugggcggcaacuacaacuaccuguaccggcuguuccgcaagagcaaccucaagcccuucgagcgggacaucuccaccgagaucuaccaggccgggagcacccccugcaacggcgucaagggguucaacugcuacuucccccugcaguccuacggcuuccagccgaccuacggggugggcuaccagcccuaccgcguggucgugcugagcuucgagcuccugcacgcccccgccacggugugcggccccaagaaguccaccaaccuggucaagaacaagugcgugaacuucaacuucaacgggcucaccggcaccggggugcugaccgagagcaacaagaaguuccugccguuccagcaguucggccgggacaucgccgacacgaccgacgcgguccgcgacccccagacccucgagauccuggacaucacccccugcagcuucgggggcguguccgugaucacgccgggcaccaacaccagcaaccaggucgccgugcuguaccagggggugaacugcaccgagguccccguggccauccacgccgaccagcugacgcccaccuggcgcguguacuccaccggcagcaacgucuuccagacccgggccgggugccucaucggcgcggagcacgugaacaacuccuacgagugcgacauccccaucggcgccgggaucugcgccagcuaccagacgcagaccaacuccccgcgccgggcccgcagcguggcgucccagagcaucaucgccuacaccaugucccugggcgucgagaacagcguggccuacuccaacaacagcaucgccauccccaccaacuucacgaucuccgugaccaccgagauccugcccgucagcaugaccaagacgagcguggacugcaccauguacaucugcggggacuccaccgagugcagcaaccuccugcugcaguacggcuccuucugcacccagcucaaccgggcccugacggggaucgcgguggagcaggacaagaacacccaggaggucuucgcccaggugaagcagaucuacaagacgcccccgaucaaggacuucggcggcuucaacuucagccagauccugcccgaccccuccaagcccagcaagcgcuccuucaucgaggaccuccuguucaacaaggugacccuggccgacgccggguucaucaagcaguacggcgacugccucggggacaucgccgcgcgggaccugaucugcgcccagaaguucaacggccugaccguccucccgccccugcugaccgacgagaugaucgcccaguacaccagcgcccuccuggccgggaccaucacguccggcuggaccuucggcgcgggggccgcccugcagauccccuucgccaugcagauggcguaccgcuucaacggcaucggggugacccagaacgugcucuacgagaaccagaagcugaucgccaaccaguucaacagcgccaucggcaagauccaggacucccugagcuccaccgccagcgcccucgggaagcugcaggacgucgugaaccagaacgcgcaggcccugaacacgcucgugaagcagcuguccagcaacuucggcgccaucuccagcguccugaacgacauccucucccggcuggacccgcccgaggccgaggugcagaucgaccgccugaucaccggccggcuccagagccugcagaccuacgugacccagcagcugauccgcgccgcggagauccgggccagcgccaaccucgccgccaccaagauguccgagugcguccuggggcagagcaagcgcguggacuucugcggcaagggguaccaccugauguccuucccccagagcgcgccccacggcguggucuuccuccacgugacguacguccccgcccaggagaagaacuucaccaccgccccggccaucugccacgacgggaaggcgcacuucccccgggagggcguguucguguccaacggcacccacugguucgucacgcagcgcaacuucuacgagccccagaucaucaccaccgacaacaccuucgugagcgggaacugcgacguggucaucggcaucgugaacaacacgguguacgacccccugcagccggagcuggacuccuucaaggaggagcucgacaaguacuucaagaaccacaccagccccgacgucgaccugggggacaucuccggcaucaacgccagcguggugaacauccagaaggagaucgaccggcugaacgaggucgccaagaaccucaacgagucccugaucgaccugcaggagcucggcaaguacgagcaguacaucaaguggcccugguacaucuggcugggguucaucgccggccugaucgccaucgugauggugaccaucaugcucugcugcaugaccagcugcugcuccugccugaaggggugcugcagcugcggcuccugcugcaaguucgacgaggacgacagcgagccgguccugaagggggugaagcuccacuacacguga

SEQ ID NO: 23110 - RNA, 3822 nt, Artificial Sequence
  SARS-CoV-2/Wuhan/WIV05/2019__EPI_ISL_402128 spike protein CDS gc (1-1273)(K986P_V987P_K986P_V987P_E484K_D614G)
auguucguguuccugguccuccugccccuggugagcucccagugcgugaaccucaccacccgcacgcagcugccgcccgccuacaccaacagcuucacccggggcgucuacuaccccgacaagguguuccgcuccagcgugcugcacuccacccaggaccucuuccugcccuucuucagcaacgucacgugguuccacgccauccacguguccgggaccaacggcaccaagcgguucgacaacccggugcugcccuucaacgacggggucuacuucgcgagcaccgagaaguccaacaucauccgcggcuggaucuucgggacgacccucgacagcaagacccagucccugcugaucgugaacaacgccaccaacguggucaucaaggugugcgaguuccaguucugcaacgaccccuuccucggcguguacuaccacaagaacaacaagagcuggauggaguccgaguuccgggucuacagcuccgccaacaacugcacguucgaguacgugagccagcccuuccugauggaccuggagggcaagcaggggaacuucaagaaccuccgcgaguucguguucaagaacaucgacggcuacuucaagaucuacuccaagcacaccccgaucaaccugguccgggaccugccccagggguucagcgcccucgagccccugguggaccugcccaucggcaucaacaucacccgcuuccagacccuccuggcccugcaccgguccuaccucacgccgggggacagcagcuccggcuggaccgcgggcgccgccgccuacuacgugggguaccugcagccccgcaccuuccugcucaaguacaacgagaacggcaccaucacggacgcggucgacugcgcccuggacccccugagcgagaccaagugcacccucaaguccuucaccguggagaaggggaucuaccagacgagcaacuuccgggugcagcccaccgaguccaucguccgcuucccgaacaucaccaaccugugccccuucggcgagguguucaacgccacccgguucgccagcgucuacgccuggaaccgcaagcggaucuccaacugcguggcggacuacagcgugcuguacaacuccgccagcuucuccacguucaagugcuacggcgucagccccaccaagcucaacgaccugugcuucaccaacguguacgccgacuccuucgugauccgcggggacgagguccggcagaucgcccccggccagaccgggaagaucgccgacuacaacuacaagcugccggacgacuucacgggcugcgugaucgcguggaacagcaacaaccucgacuccaaggucgggggcaacuacaacuaccuguaccgccuguuccgcaagagcaaccucaagcccuucgagcgggacaucuccaccgagaucuaccaggccggcagcacccccugcaacggggugaagggcuucaacugcuacuucccccugcaguccuacggguuccagccgaccaacggcgugggguaccagcccuaccggguggucgugcugagcuucgagcuccugcacgcccccgccacggugugcggccccaagaaguccaccaaccuggucaagaacaagugcgugaacuucaacuucaacggccucaccgggaccggcgugcugaccgagagcaacaagaaguuccugccguuccagcaguucgggcgcgacaucgccgacacgaccgacgcgguccgcgacccccagacccuggagauccucgacaucacccccugcagcuucggcgggguguccgugaucacgccgggcaccaacaccagcaaccaggucgccgugcuguaccagggcgugaacugcaccgagguccccguggccauccacgccgaccagcugacgcccaccuggcggguguacuccaccgggagcaacgucuuccagacccgcgccggcugccucaucggggcggagcacgugaacaacuccuacgagugcgacauccccaucggcgccggcaucugcgccagcuaccagacgcagaccaacuccccgcggcgcgcccggagcguggcgucccagagcaucaucgccuacaccaugucccugggggccgagaacagcgucgccuacuccaacaacagcaucgccauccccaccaacuucacgaucuccgugaccaccgagauccugcccgugagcaugaccaagacgagcgucgacugcaccauguacaucugcggcgacuccaccgagugcagcaaccuccugcugcaguacggguccuucugcacccagcucaaccgcgcgcugacgggcaucgccguggagcaggacaagaacacccaggagguguucgcccaggucaagcagaucuacaagacgcccccgaucaaggacuucgggggcuucaacuucagccagauccugcccgaccccuccaagcccagcaagcgguccuucaucgaggaccuccuguucaacaaggugacccuggccgacgccggcuucaucaagcaguacggggacugccucggcgacaucgcggcccgcgaccugaucugcgcccagaaguucaacgggcugaccgugcucccgccccugcugaccgacgagaugaucgcccaguacaccagcgcccuccuggcgggcaccaucacguccggguggaccuucggcgccggcgccgcccugcagauccccuucgcgaugcagauggccuaccgguucaacgggaucggcgucacccagaacgugcucuacgagaaccagaagcugaucgccaaccaguucaacagcgccaucgggaagauccaggacucccugagcuccaccgccagcgcgcucggcaagcugcaggacguggucaaccagaacgcccaggcccugaacacgcucgugaagcagcuguccagcaacuucggggccaucuccagcgugcugaacgacauccucucccgccuggacccgcccgaggccgagguccagaucgaccggcugaucaccggccgccuccagagccugcagaccuacgugacccagcagcugauccgggcggccgagauccgcgccagcgccaaccucgccgcgaccaagauguccgagugcgugcugggccagagcaagcgggucgacuucugcgggaagggcuaccaccugauguccuucccccagagcgcgccccacggggugguguuccuccacgucacguacgugcccgcccaggagaagaacuucaccaccgccccggccaucugccacgacggcaaggcccacuucccccgcgagggggucuucguguccaacggcacccacugguucgugacgcagcggaacuucuacgagccccagaucaucaccaccgacaacaccuucgucagcggcaacugcgacguggugaucgggaucgucaacaacacgguguacgacccccugcagccggagcuggacuccuucaaggaggagcucgacaaguacuucaagaaccacaccagccccgacguggaccugggcgacaucuccgggaucaacgccagcgucgugaacauccagaaggagaucgaccgccugaacgagguggccaagaaccucaacgagucccugaucgaccugcaggagcucggcaaguacgagcaguacaucaaguggcccugguacaucuggcugggcuucaucgccgggcugaucgcgaucgucauggugaccaucaugcucugcugcaugaccagcugcugcuccugccugaagggcugcugcagcugcggguccugcugcaaguucgacgaggacgacagcgagccggugcugaagggcgucaagcuccacuacacguga

SEQ ID NO: 23111 - RNA, 3822 nt, Artificial Sequence
  SARS-CoV-2/Wuhan/WIV05/2019__EPI_ISL_402128 spike protein CDS gc (1-1273)(K986P_V987P_K986P_V987P_L18F_T20N_P26S_D138Y_R190S_K417T _E484K_N501Y_D614G_H655Y_T1027I)
auguucguguuccugguccuccugccccuggugagcucccagugcgugaacuucaccaaccgcacccagcucccgagcgccuacacgaacuccuucacccggggcgucuacuaccccgacaagguguuccgcagcuccgugcugcacagcacccaggaccuguuccuccccuucuucuccaacgucaccugguuccacgccauccacgugagcgggacgaacggcaccaagcgguucgacaaccccgugcugccguucaacgacggggucuacuucgcguccaccgagaaguccaacaucauccgcggcuggaucuucgggaccacgcuggacuccaagacccagagccuccugaucgugaacaacgccaccaacguggucaucaaggugugcgaguuccaguucugcaacuaccccuuccugggcguguacuaccacaagaacaacaaguccuggauggagagcgaguuccgggucuacuccagcgccaacaacugcaccuucgaguacgugucccagcccuuccucauggaccuggagggcaagcaggggaacuucaagaaccugagcgaguucguguucaagaacaucgacggcuacuucaagaucuacuccaagcacacgcccaucaaccucguccgcgaccugccgcagggguucagcgcccuggagccccucguggaccugcccaucggcaucaacaucacccgguuccagacccugcucgcccugcaccgcagcuaccugacccccggggacuccagcuccggcuggacggcgggcgccgccgccuacuacgugggguaccuccagccgcggaccuuccugcugaaguacaacgagaacggcaccaucaccgacgcggucgacugcgcccucgacccccugagcgagacgaagugcacccugaaguccuucaccguggagaaggggaucuaccagaccagcaacuuccgcgugcagcccacggaguccaucguccgguuccccaacaucaccaaccucugcccguucggcgagguguucaacgccacccgcuucgccagcgucuacgccuggaaccggaagcgcaucuccaacugcguggcggacuacagcgugcuguacaacuccgccagcuucuccaccuucaagugcuacggcgucagccccacgaagcugaacgaccucugcuucaccaacguguacgccgacuccuucgugauccgcggggacgagguccggcagaucgcccccggccagaccgggaccaucgccgacuacaacuacaagcugcccgacgacuucacgggcugcgugaucgcguggaacagcaacaaccuggacuccaaggucgggggcaacuacaacuaccucuaccggcuguuccgcaagagcaaccugaagccguucgagcgggacaucuccaccgagaucuaccaggccggcagcacccccugcaacggggugaagggcuucaacugcuacuucccccuccagagcuacggguuccagcccaccuacggcgugggguaccagccguaccgcguggucgugcuguccuucgagcugcuccacgcccccgccacggugugcggccccaagaaguccaccaaccuggucaagaacaagugcgugaacuucaacuucaacggccugaccgggaccggcgugcucaccgagagcaacaagaaguuccugcccuuccagcaguucgggcgggacaucgccgacacgaccgacgcgguccgcgacccgcagacccuggagauccuggacaucacccccugcagcuucggcgggguguccgugaucacgcccggcaccaacaccagcaaccaggucgccgugcucuaccagggcgugaacugcaccgaggucccgguggccauccacgccgaccagcugacgcccaccuggcgcguguacuccaccgggagcaacgucuuccagacccgggccggcugccugaucggggcggaguacgugaacaacuccuacgagugcgacauccccaucggcgccggcaucugcgccagcuaccagacgcagaccaacagcccccgccgggcccgcagcguggcgucccagagcaucaucgccuacaccaugucccucggggccgagaacagcgucgccuacuccaacaacagcaucgccaucccgaccaacuucacgaucagcgugaccaccgagauccugcccguguccaugaccaagacgagcgucgacugcaccauguacaucugcggcgacuccaccgagugcagcaaccugcuccugcaguacggguccuucugcacccagcugaaccgggcgcucacgggcaucgccguggagcaggacaagaacacccaggagguguucgcccaggucaagcagaucuacaagaccccgcccaucaaggacuucgggggcuucaacuucagccagauccugcccgaccccuccaagcccagcaagcgcuccuucaucgaggaccuccuguucaacaaggugacccuggccgacgccggcuucaucaagcaguacggggacugccugggcgacaucgcggcccgggaccucaucugcgcccagaaguucaacgggcugacggugcugcccccgcuccugaccgacgagaugaucgcccaguacaccagcgcccugcucgcgggcaccaucacguccggguggaccuucggcgccggcgccgcccugcagauccccuucgcgaugcagauggccuaccgcuucaacgggaucggcgucacccagaacgugcuguacgagaaccagaagcucaucgccaaccaguucaacagcgccaucgggaagauccaggacucccugagcuccaccgccagcgcgcugggcaagcuccaggacguggucaaccagaacgcccaggcccugaacacgcuggugaagcagcucuccagcaacuucggggccaucuccagcgugcugaacgacauccugagccggcucgacccgcccgaggccgagguccagaucgaccgccugaucaccggccggcugcagucccuccagaccuacgugacccagcagcugauccgcgcggccgagauccgggccagcgccaaccuggccgcgaucaagauguccgagugcgugcucggccagagcaagcgcgucgacuucugcgggaagggcuaccaccugauguccuucccccagagcgcgccccacggggugguguuccugcacgucaccuacgugcccgcccaggagaagaacuucacgaccgcccccgccaucugccacgacggcaaggcccacuucccgcgggagggggucuucguguccaacggcacccacugguucgugacccagcgcaacuucuacgagccccagaucaucacgaccgacaacaccuucgucagcggcaacugcgacguggugaucgggaucgucaacaacaccguguacgacccccuccagcccgagcuggacuccuucaaggaggagcuggacaaguacuucaagaaccacacgagcccggacguggaccucggcgacaucuccgggaucaacgccagcgucgugaacauccagaaggagaucgaccggcugaacgagguggccaagaaccugaacgagucccucaucgaccugcaggagcugggcaaguacgagcaguacaucaaguggcccugguacaucuggcucggcuucaucgccgggcugaucgcgaucgucauggugaccaucaugcugugcugcaugaccagcugcugcuccugccucaagggcugcugcagcugcggguccugcugcaaguucgacgaggacgacagcgagcccgugcugaagggcgucaagcugcacuacaccuga

SEQ ID NO: 23112 - RNA, 3822 nt, Artificial Sequence
  SARS-CoV-2/Wuhan/WIV05/2019__EPI_ISL_402128 spike protein CDS gc (1-1273)(K986P_V987P_K986P_V987P_S13I_W152C_L452R_D614G)
auguucguguuccugguccuccugccccuggugagcauccagugcgugaaccucaccacccgcacgcagcugccgcccgccuacaccaacuccuucacccggggcgucuacuaccccgacaagguguuccgcagcuccgugcugcacagcacccaggaccucuuccugcccuucuucuccaacgucacgugguuccacgccauccacgugagcgggaccaacggcaccaagcgguucgacaacccggugcugcccuucaacgacggggucuacuucgcguccaccgagaaguccaacaucauccgcggcuggaucuucgggacgacccucgacagcaagacccagagccugcugaucgugaacaacgccaccaacguggucaucaaggugugcgaguuccaguucugcaacgaccccuuccucggcguguacuaccacaagaacaacaaguccugcauggagagcgaguuccgggucuacuccagcgccaacaacugcacguucgaguacgugucccagcccuuccugauggaccuggagggcaagcaggggaacuucaagaaccuccgcgaguucguguucaagaacaucgacggcuacuucaagaucuacagcaagcacaccccgaucaaccugguccgggaccugccccagggguucuccgcccucgagccccugguggaccugcccaucggcaucaacaucacccgcuuccagacccuccuggcccugcaccggagcuaccucacgccgggggacuccagcagcggcuggaccgcgggcgccgccgccuacuacgugggguaccugcagccccgcaccuuccugcucaaguacaacgagaacggcaccaucacggacgcggucgacugcgcccuggacccccuguccgagaccaagugcacccucaagagcuucaccguggagaaggggaucuaccagacguccaacuuccgggugcagcccaccgagagcaucguccgcuucccgaacaucaccaaccugugccccuucggcgagguguucaacgccacccgguucgccuccgucuacgccuggaaccgcaagcggaucagcaacugcguggcggacuacuccgugcuguacaacagcgccuccuucagcacguucaagugcuacggcgucucccccaccaagcucaacgaccugugcuucaccaacguguacgccgacagcuucgugauccgcggggacgagguccggcagaucgcccccggccagaccgggaagaucgccgacuacaacuacaagcugccggacgacuucacgggcugcgugaucgcguggaacuccaacaaccucgacagcaaggucgggggcaacuacaacuaccgcuaccggcuguuccgcaaguccaaccugaagcccuucgagcgggacaucagcaccgagaucuaccaggccggcuccacccccugcaacgggguggagggcuucaacugcuacuucccccuccagagcuacggguuccagccgaccaacggcgugggguaccagcccuaccgcguggucgugcuguccuucgagcugcuccacgcccccgccacggugugcggccccaagaaguccaccaaccuggucaagaacaagugcgugaacuucaacuucaacggccugaccgggaccggcgugcucaccgagagcaacaagaaguuccugccguuccagcaguucgggcgcgacaucgccgacacgaccgacgcgguccgggacccccagacccuggagauccuggacaucacccccugcagcuucggcggggugagcgugaucacgccgggcaccaacaccuccaaccaggucgccgugcucuaccagggcgugaacugcaccgagguccccguggccauccacgccgaccagcugacgcccaccuggcgcguguacagcaccggguccaacgucuuccagacccgggccggcugccugaucggggcggagcacgugaacaacagcuacgagugcgacauccccaucggcgccggcaucugcgccuccuaccagacgcagaccaacagcccgcgccgggcccgcuccguggcgagccaguccaucaucgccuacaccaugagccucggggccgagaacuccgucgccuacagcaacaacuccaucgccauccccaccaacuucacgaucagcgugaccaccgagauccugcccguguccaugaccaagacgagcgucgacugcaccauguacaucugcggcgacagcaccgagugcuccaaccugcuccugcaguacgggagcuucugcacccagcugaaccgggcgcucacgggcaucgccguggagcaggacaagaacacccaggagguguucgcccaggucaagcagaucuacaagacgcccccgaucaaggacuucgggggcuucaacuucucccagauccugcccgaccccagcaagcccuccaagcgcagcuucaucgaggaccuccuguucaacaaggugacccuggccgacgccggcuucaucaagcaguacggggacugccugggcgacaucgcggcccgggaccucaucugcgcccagaaguucaacgggcugaccgugcugccgccccuccugaccgacgagaugaucgcccaguacaccuccgcccugcucgcgggcaccaucacgagcggguggaccuucggcgccggcgccgcccugcagauccccuucgcgaugcagauggccuaccgcuucaacgggaucggcgucacccagaacgugcuguacgagaaccagaagcucaucgccaaccaguucaacuccgccaucgggaagauccaggacagccuguccagcaccgccuccgcgcugggcaagcuccaggacguggucaaccagaacgcccaggcccugaacacgcuggugaagcagcucagcuccaacuucggggccaucagcuccgugcugaacgacauccugagccggcucgacccgcccgaggccgagguccagaucgaccgccugaucaccggccggcugcagucccuccagaccuacgugacccagcagcugauccgcgcggccgagauccgggccagcgccaaccuggccgcgaccaagaugagcgagugcgugcucggccaguccaagcgcgucgacuucugcgggaagggcuaccaccugaugagcuucccccaguccgcgccccacggggugguguuccugcacgucacguacgugcccgcccaggagaagaacuucaccaccgccccggccaucugccacgacggcaaggcccacuucccccgggagggggucuucgugagcaacggcacccacugguucgugacgcagcgcaacuucuacgagccccagaucaucaccaccgacaacaccuucgucuccggcaacugcgacguggugaucgggaucgucaacaacacgguguacgacccccuccagccggagcuggacagcuucaaggaggagcuggacaaguacuucaagaaccacaccucccccgacguggaccucggcgacaucagcgggaucaacgccuccgucgugaacauccagaaggagaucgaccggcugaacgagguggccaagaaccugaacgagagccucaucgaccugcaggagcugggcaaguacgagcaguacaucaaguggcccugguacaucuggcucggcuucaucgccgggcugaucgcgaucgucauggugaccaucaugcugugcugcaugaccuccugcugcagcugccucaagggcugcugcuccugcgggagcugcugcaaguucgacgaggacgacuccgagccggugcugaagggcgucaagcugcacuacacguga

SEQ ID NO: 23113 - RNA, 3822 nt, Artificial Sequence
  SARS-CoV-2/Wuhan/WIV05/2019__EPI_ISL_402128 spike protein CDS gc (1-1273)(K986P_V987P)
auguucguguuccuggugcugcugccccuggugagcagccagugcgugaaccugaccacccggacccagcugccaccagccuacaccaacagcuucacccggggcgucuacuaccccgacaagguguuccggagcagcguccugcacagcacccaggaccuguuccugcccuucuucagcaacgugaccugguuccacgccauccacgugagcggcaccaacggcaccaagcgguucgacaaccccgugcugcccuucaacgacggcguguacuucgccagcaccgagaagagcaacaucauccggggcuggaucuucggcaccacccuggacagcaagacccagagccugcugaucgugaauaacgccaccaacguggugaucaaggugugcgaguuccaguucugcaacgaccccuuccugggcguguacuaccacaagaacaacaagagcuggauggagagcgaguuccggguguacagcagcgccaacaacugcaccuucgaguacgugagccagcccuuccugauggaccuggagggcaagcagggcaacuucaagaaccugcgggaguucguguucaagaacaucgacggcuacuucaagaucuacagcaagcacaccccaaucaaccuggugcgggaucugccccagggcuucucagcccuggagccccugguggaccugcccaucggcaucaacaucacccgguuccagacccugcuggcccugcaccggagcuaccugaccccaggcgacagcagcagcggguggacagcaggcgcggcugcuuacuacgugggcuaccugcagccccggaccuuccugcugaaguacaacgagaacggcaccaucaccgacgccguggacugcgcccuggacccucugagcgagaccaagugcacccugaagagcuucaccguggagaagggcaucuaccagaccagcaacuuccgggugcagcccaccgagagcaucgugcgguuccccaacaucaccaaccugugccccuucggcgagguguucaacgccacccgguucgccagcguguacgccuggaaccggaagcggaucagcaacugcguggccgacuacagcgugcuguacaacagcgccagcuucagcaccuucaagugcuacggcgugagccccaccaagcugaacgaccugugcuucaccaacguguacgccgacagcuucgugauccguggcgacgaggugcggcagaucgcacccggccagacaggcaagaucgccgacuacaacuacaagcugcccgacgacuucaccggcugcgugaucgccuggaacagcaacaaccucgacagcaaggugggcggcaacuacaacuaccuguaccggcuguuccggaagagcaaccugaagcccuucgagcgggacaucagcaccgagaucuaccaagccggcuccaccccuugcaacggcguggagggcuucaacugcuacuucccucugcagagcuacggcuuccagcccaccaacggcgugggcuaccagcccuaccgggugguggugcugagcuucgagcugcugcacgccccagccaccguguguggccccaagaagagcaccaaccuggugaagaacaagugcgugaacuucaacuucaacggccuuaccggcaccggcgugcugaccgagagcaacaagaaauuccugcccuuucagcaguucggccgggacaucgccgacaccaccgacgcugugcgggauccccagacccuggagauccuggacaucaccccuugcagcuucggcggcgugagcgugaucaccccaggcaccaacaccagcaaccagguggccgugcuguaccaggacgugaacugcaccgaggugcccguggccauccacgccgaccagcugacacccaccuggcgggucuacagcaccggcagcaacguguuccagacccgggccgguugccugaucggcgccgagcacgugaacaacagcuacgagugcgacauccccaucggcgccggcaucugugccagcuaccagacccagaccaauucaccccggagggcaaggagcguggccagccagagcaucaucgccuacaccaugagccugggcgccgagaacagcguggccuacagcaacaacagcaucgccauccccaccaacuucaccaucagcgugaccaccgagauucugcccgugagcaugaccaagaccagcguggacugcaccauguacaucugcggcgacagcaccgagugcagcaaccugcugcugcaguacggcagcuucugcacccagcugaaccgggcccugaccggcaucgccguggagcaggacaagaacacccaggagguguucgcccaggugaagcagaucuacaagaccccucccaucaaggacuucggcggcuucaacuucagccagauccugcccgaccccagcaagcccagcaagcggagcuucaucgaggaccugcuguucaacaaggugacccuagccgacgccggcuucaucaagcaguacggcgacugccucggcgacauagccgcccgggaccugaucugcgcccagaaguucaacggccugaccgugcugccuccccugcugaccgacgagaugaucgcccaguacaccagcgcccuguuagccggaaccaucaccagcggcuggacuuucggcgcuggagccgcucugcagauccccuucgccaugcagauggccuaccgguucaacggcaucggcgugacccagaacgugcuguacgagaaccagaagcugaucgccaaccaguucaacagcgccaucggcaagauccaggacagccugagcagcaccgcuagcgcccugggcaagcugcaggacguggugaaccagaacgcccaggcccugaacacccuggugaagcagcugagcagcaacuucggcgccaucagcagcgugcugaacgacauccugagccggcuggacccucccgaggccgaggugcagaucgaccggcugaucacuggccggcugcagagccugcagaccuacgugacccagcagcugauccgggccgccgagauucgggccagcgccaaccuggccgccaccaagaugagcgagugcgugcugggccagagcaagcggguggacuucugcggcaagggcuaccaccugaugagcuuuccccagagcgcaccccacggagugguguuccugcacgugaccuacgugcccgcccaggagaagaacuucaccaccgccccagccaucugccacgacggcaaggcccacuuuccccgggagggcguguucgugagcaacggcacccacugguucgugacccagcggaacuucuacgagccccagaucaucaccaccgacaacaccuucgugagcggcaacugcgacguggugaucggcaucgugaacaacaccguguacgauccccugcagcccgagcuggacagcuucaaggaggagcuggacaaguacuucaagaaucacaccagccccgacguggaccugggcgacaucagcggcaucaacgccagcguggugaacauccagaaggagaucgaucggcugaacgagguggccaagaaccugaacgagagccugaucgaccugcaggagcugggcaaguacgagcaguacaucaaguggcccugguacaucuggcugggcuucaucgccggccugaucgccaucgugauggugaccaucaugcugugcugcaugaccagcugcugcagcugccugaagggcuguugcagcugcggcagcugcugcaaguucgacgaggacgacagcgagcccgugcugaagggcgugaagcugcacuacaccuga

SEQ ID NO: 23114 - RNA, 3822 nt, Artificial Sequence
  SARS-CoV-2/Wuhan/WIV05/2019__EPI_ISL_402128 spike protein CDS gc (1-1273)(K986P_V987P_ D614G)
auguucguguuccuggugcugcugccccuggugagcagccagugcgugaaccugaccacccggacccagcugccaccagccuacaccaacagcuucacccggggcgucuacuaccccgacaagguguuccggagcagcguccugcacagcacccaggaccuguuccugcccuucuucagcaacgugaccugguuccacgccauccacgugagcggcaccaacggcaccaagcgguucgacaaccccgugcugcccuucaacgacggcguguacuucgccagcaccgagaagagcaacaucauccggggcuggaucuucggcaccacccuggacagcaagacccagagccugcugaucgugaauaacgccaccaacguggugaucaaggugugcgaguuccaguucugcaacgaccccuuccugggcguguacuaccacaagaacaacaagagcuggauggagagcgaguuccggguguacagcagcgccaacaacugcaccuucgaguacgugagccagcccuuccugauggaccuggagggcaagcagggcaacuucaagaaccugcgggaguucguguucaagaacaucgacggcuacuucaagaucuacagcaagcacaccccaaucaaccuggugcgggaucugccccagggcuucucagcccuggagccccugguggaccugcccaucggcaucaacaucacccgguuccagacccugcuggcccugcaccggagcuaccugaccccaggcgacagcagcagcggguggacagcaggcgcggcugcuuacuacgugggcuaccugcagccccggaccuuccugcugaaguacaacgagaacggcaccaucaccgacgccguggacugcgcccuggacccucugagcgagaccaagugcacccugaagagcuucaccguggagaagggcaucuaccagaccagcaacuuccgggugcagcccaccgagagcaucgugcgguuccccaacaucaccaaccugugccccuucggcgagguguucaacgccacccgguucgccagcguguacgccuggaaccggaagcggaucagcaacugcguggccgacuacagcgugcuguacaacagcgccagcuucagcaccuucaagugcuacggcgugagccccaccaagcugaacgaccugugcuucaccaacguguacgccgacagcuucgugauccguggcgacgaggugcggcagaucgcacccggccagacaggcaagaucgccgacuacaacuacaagcugcccgacgacuucaccggcugcgugaucgccuggaacagcaacaaccucgacagcaaggugggcggcaacuacaacuaccuguaccggcuguuccggaagagcaaccugaagcccuucgagcgggacaucagcaccgagaucuaccaagccggcuccaccccuugcaacggcguggagggcuucaacugcuacuucccucugcagagcuacggcuuccagcccaccaacggcgugggcuaccagcccuaccgggugguggugcugagcuucgagcugcugcacgccccagccaccguguguggccccaagaagagcaccaaccuggugaagaacaagugcgugaacuucaacuucaacggccuuaccggcaccggcgugcugaccgagagcaacaagaaauuccugcccuuucagcaguucggccgggacaucgccgacaccaccgacgcugugcgggauccccagacccuggagauccuggacaucaccccuugcagcuucggcggcgugagcgugaucaccccaggcaccaacaccagcaaccagguggccgugcuguaccagggcgugaacugcaccgaggugcccguggccauccacgccgaccagcugacacccaccuggcgggucuacagcaccggcagcaacguguuccagacccgggccgguugccugaucggcgccgagcacgugaacaacagcuacgagugcgacauccccaucggcgccggcaucugugccagcuaccagacccagaccaauucaccccggagggcaaggagcguggccagccagagcaucaucgccuacaccaugagccugggcgccgagaacagcguggccuacagcaacaacagcaucgccauccccaccaacuucaccaucagcgugaccaccgagauucugcccgugagcaugaccaagaccagcguggacugcaccauguacaucugcggcgacagcaccgagugcagcaaccugcugcugcaguacggcagcuucugcacccagcugaaccgggcccugaccggcaucgccguggagcaggacaagaacacccaggagguguucgcccaggugaagcagaucuacaagaccccucccaucaaggacuucggcggcuucaacuucagccagauccugcccgaccccagcaagcccagcaagcggagcuucaucgaggaccugcuguucaacaaggugacccuagccgacgccggcuucaucaagcaguacggcgacugccucggcgacauagccgcccgggaccugaucugcgcccagaaguucaacggccugaccgugcugccuccccugcugaccgacgagaugaucgcccaguacaccagcgcccuguuagccggaaccaucaccagcggcuggacuuucggcgcuggagccgcucugcagauccccuucgccaugcagauggccuaccgguucaacggcaucggcgugacccagaacgugcuguacgagaaccagaagcugaucgccaaccaguucaacagcgccaucggcaagauccaggacagccugagcagcaccgcuagcgcccugggcaagcugcaggacguggugaaccagaacgcccaggcccugaacacccuggugaagcagcugagcagcaacuucggcgccaucagcagcgugcugaacgacauccugagccggcuggacccucccgaggccgaggugcagaucgaccggcugaucacuggccggcugcagagccugcagaccuacgugacccagcagcugauccgggccgccgagauucgggccagcgccaaccuggccgccaccaagaugagcgagugcgugcugggccagagcaagcggguggacuucugcggcaagggcuaccaccugaugagcuuuccccagagcgcaccccacggagugguguuccugcacgugaccuacgugcccgcccaggagaagaacuucaccaccgccccagccaucugccacgacggcaaggcccacuuuccccgggagggcguguucgugagcaacggcacccacugguucgugacccagcggaacuucuacgagccccagaucaucaccaccgacaacaccuucgugagcggcaacugcgacguggugaucggcaucgugaacaacaccguguacgauccccugcagcccgagcuggacagcuucaaggaggagcuggacaaguacuucaagaaucacaccagccccgacguggaccugggcgacaucagcggcaucaacgccagcguggugaacauccagaaggagaucgaucggcugaacgagguggccaagaaccugaacgagagccugaucgaccugcaggagcugggcaaguacgagcaguacaucaaguggcccugguacaucuggcugggcuucaucgccggccugaucgccaucgugauggugaccaucaugcugugcugcaugaccagcugcugcagcugccugaagggcuguugcagcugcggcagcugcugcaaguucgacgaggacgacagcgagcccgugcugaagggcgugaagcugcacuacaccuga

SEQ ID NO: 23115 - RNA, 3822 nt, Artificial Sequence
  SARS-CoV-2/Wuhan/WIV05/2019__EPI_ISL_402128 spike protein CDS gc (1-1273)(K986P_V987P_A222V_D614G)
auguucguguuccuggugcugcugccccuggugagcagccagugcgugaaccugaccacccggacccagcugccaccagccuacaccaacagcuucacccggggcgucuacuaccccgacaagguguuccggagcagcguccugcacagcacccaggaccuguuccugcccuucuucagcaacgugaccugguuccacgccauccacgugagcggcaccaacggcaccaagcgguucgacaaccccgugcugcccuucaacgacggcguguacuucgccagcaccgagaagagcaacaucauccggggcuggaucuucggcaccacccuggacagcaagacccagagccugcugaucgugaauaacgccaccaacguggugaucaaggugugcgaguuccaguucugcaacgaccccuuccugggcguguacuaccacaagaacaacaagagcuggauggagagcgaguuccggguguacagcagcgccaacaacugcaccuucgaguacgugagccagcccuuccugauggaccuggagggcaagcagggcaacuucaagaaccugcgggaguucguguucaagaacaucgacggcuacuucaagaucuacagcaagcacaccccaaucaaccuggugcgggaucugccccagggcuucucagugcuggagccccugguggaccugcccaucggcaucaacaucacccgguuccagacccugcuggcccugcaccggagcuaccugaccccaggcgacagcagcagcggguggacagcaggcgcggcugcuuacuacgugggcuaccugcagccccggaccuuccugcugaaguacaacgagaacggcaccaucaccgacgccguggacugcgcccuggacccucugagcgagaccaagugcacccugaagagcuucaccguggagaagggcaucuaccagaccagcaacuuccgggugcagcccaccgagagcaucgugcgguuccccaacaucaccaaccugugccccuucggcgagguguucaacgccacccgguucgccagcguguacgccuggaaccggaagcggaucagcaacugcguggccgacuacagcgugcuguacaacagcgccagcuucagcaccuucaagugcuacggcgugagccccaccaagcugaacgaccugugcuucaccaacguguacgccgacagcuucgugauccguggcgacgaggugcggcagaucgcacccggccagacaggcaagaucgccgacuacaacuacaagcugcccgacgacuucaccggcugcgugaucgccuggaacagcaacaaccucgacagcaaggugggcggcaacuacaacuaccuguaccggcuguuccggaagagcaaccugaagcccuucgagcgggacaucagcaccgagaucuaccaagccggcuccaccccuugcaacggcguggagggcuucaacugcuacuucccucugcagagcuacggcuuccagcccaccaacggcgugggcuaccagcccuaccgggugguggugcugagcuucgagcugcugcacgccccagccaccguguguggccccaagaagagcaccaaccuggugaagaacaagugcgugaacuucaacuucaacggccuuaccggcaccggcgugcugaccgagagcaacaagaaauuccugcccuuucagcaguucggccgggacaucgccgacaccaccgacgcugugcgggauccccagacccuggagauccuggacaucaccccuugcagcuucggcggcgugagcgugaucaccccaggcaccaacaccagcaaccagguggccgugcuguaccagggcgugaacugcaccgaggugcccguggccauccacgccgaccagcugacacccaccuggcgggucuacagcaccggcagcaacguguuccagacccgggccgguugccugaucggcgccgagcacgugaacaacagcuacgagugcgacauccccaucggcgccggcaucugugccagcuaccagacccagaccaauucaccccggagggcaaggagcguggccagccagagcaucaucgccuacaccaugagccugggcgccgagaacagcguggccuacagcaacaacagcaucgccauccccaccaacuucaccaucagcgugaccaccgagauucugcccgugagcaugaccaagaccagcguggacugcaccauguacaucugcggcgacagcaccgagugcagcaaccugcugcugcaguacggcagcuucugcacccagcugaaccgggcccugaccggcaucgccguggagcaggacaagaacacccaggagguguucgcccaggugaagcagaucuacaagaccccucccaucaaggacuucggcggcuucaacuucagccagauccugcccgaccccagcaagcccagcaagcggagcuucaucgaggaccugcuguucaacaaggugacccuagccgacgccggcuucaucaagcaguacggcgacugccucggcgacauagccgcccgggaccugaucugcgcccagaaguucaacggccugaccgugcugccuccccugcugaccgacgagaugaucgcccaguacaccagcgcccuguuagccggaaccaucaccagcggcuggacuuucggcgcuggagccgcucugcagauccccuucgccaugcagauggccuaccgguucaacggcaucggcgugacccagaacgugcuguacgagaaccagaagcugaucgccaaccaguucaacagcgccaucggcaagauccaggacagccugagcagcaccgcuagcgcccugggcaagcugcaggacguggugaaccagaacgcccaggcccugaacacccuggugaagcagcugagcagcaacuucggcgccaucagcagcgugcugaacgacauccugagccggcuggacccucccgaggccgaggugcagaucgaccggcugaucacuggccggcugcagagccugcagaccuacgugacccagcagcugauccgggccgccgagauucgggccagcgccaaccuggccgccaccaagaugagcgagugcgugcugggccagagcaagcggguggacuucugcggcaagggcuaccaccugaugagcuuuccccagagcgcaccccacggagugguguuccugcacgugaccuacgugcccgcccaggagaagaacuucaccaccgccccagccaucugccacgacggcaaggcccacuuuccccgggagggcguguucgugagcaacggcacccacugguucgugacccagcggaacuucuacgagccccagaucaucaccaccgacaacaccuucgugagcggcaacugcgacguggugaucggcaucgugaacaacaccguguacgauccccugcagcccgagcuggacagcuucaaggaggagcuggacaaguacuucaagaaucacaccagccccgacguggaccugggcgacaucagcggcaucaacgccagcguggugaacauccagaaggagaucgaucggcugaacgagguggccaagaaccugaacgagagccugaucgaccugcaggagcugggcaaguacgagcaguacaucaaguggcccugguacaucuggcugggcuucaucgccggccugaucgccaucgugauggugaccaucaugcugugcugcaugaccagcugcugcagcugccugaagggcuguugcagcugcggcagcugcugcaaguucgacgaggacgacagcgagcccgugcugaagggcgugaagcugcacuacaccuga

SEQ ID NO: 23116 - RNA, 3822 nt, Artificial Sequence
  SARS-CoV-2/Wuhan/WIV05/2019__EPI_ISL_402128 spike protein CDS gc (1-1273)(K986P_V987P_N439K_D614G)
auguucguguuccuggugcugcugccccuggugagcagccagugcgugaaccugaccacccggacccagcugccaccagccuacaccaacagcuucacccggggcgucuacuaccccgacaagguguuccggagcagcguccugcacagcacccaggaccuguuccugcccuucuucagcaacgugaccugguuccacgccauccacgugagcggcaccaacggcaccaagcgguucgacaaccccgugcugcccuucaacgacggcguguacuucgccagcaccgagaagagcaacaucauccggggcuggaucuucggcaccacccuggacagcaagacccagagccugcugaucgugaauaacgccaccaacguggugaucaaggugugcgaguuccaguucugcaacgaccccuuccugggcguguacuaccacaagaacaacaagagcuggauggagagcgaguuccggguguacagcagcgccaacaacugcaccuucgaguacgugagccagcccuuccugauggaccuggagggcaagcagggcaacuucaagaaccugcgggaguucguguucaagaacaucgacggcuacuucaagaucuacagcaagcacaccccaaucaaccuggugcgggaucugccccagggcuucucagcccuggagccccugguggaccugcccaucggcaucaacaucacccgguuccagacccugcuggcccugcaccggagcuaccugaccccaggcgacagcagcagcggguggacagcaggcgcggcugcuuacuacgugggcuaccugcagccccggaccuuccugcugaaguacaacgagaacggcaccaucaccgacgccguggacugcgcccuggacccucugagcgagaccaagugcacccugaagagcuucaccguggagaagggcaucuaccagaccagcaacuuccgggugcagcccaccgagagcaucgugcgguuccccaacaucaccaaccugugccccuucggcgagguguucaacgccacccgguucgccagcguguacgccuggaaccggaagcggaucagcaacugcguggccgacuacagcgugcuguacaacagcgccagcuucagcaccuucaagugcuacggcgugagccccaccaagcugaacgaccugugcuucaccaacguguacgccgacagcuucgugauccguggcgacgaggugcggcagaucgcacccggccagacaggcaagaucgccgacuacaacuacaagcugcccgacgacuucaccggcugcgugaucgccuggaacagcaagaaccucgacagcaaggugggcggcaacuacaacuaccuguaccggcuguuccggaagagcaaccugaagcccuucgagcgggacaucagcaccgagaucuaccaagccggcuccaccccuugcaacggcguggagggcuucaacugcuacuucccucugcagagcuacggcuuccagcccaccaacggcgugggcuaccagcccuaccgggugguggugcugagcuucgagcugcugcacgccccagccaccguguguggccccaagaagagcaccaaccuggugaagaacaagugcgugaacuucaacuucaacggccuuaccggcaccggcgugcugaccgagagcaacaagaaauuccugcccuuucagcaguucggccgggacaucgccgacaccaccgacgcugugcgggauccccagacccuggagauccuggacaucaccccuugcagcuucggcggcgugagcgugaucaccccaggcaccaacaccagcaaccagguggccgugcuguaccagggcgugaacugcaccgaggugcccguggccauccacgccgaccagcugacacccaccuggcgggucuacagcaccggcagcaacguguuccagacccgggccgguugccugaucggcgccgagcacgugaacaacagcuacgagugcgacauccccaucggcgccggcaucugugccagcuaccagacccagaccaauucaccccggagggcaaggagcguggccagccagagcaucaucgccuacaccaugagccugggcgccgagaacagcguggccuacagcaacaacagcaucgccauccccaccaacuucaccaucagcgugaccaccgagauucugcccgugagcaugaccaagaccagcguggacugcaccauguacaucugcggcgacagcaccgagugcagcaaccugcugcugcaguacggcagcuucugcacccagcugaaccgggcccugaccggcaucgccguggagcaggacaagaacacccaggagguguucgcccaggugaagcagaucuacaagaccccucccaucaaggacuucggcggcuucaacuucagccagauccugcccgaccccagcaagcccagcaagcggagcuucaucgaggaccugcuguucaacaaggugacccuagccgacgccggcuucaucaagcaguacggcgacugccucggcgacauagccgcccgggaccugaucugcgcccagaaguucaacggccugaccgugcugccuccccugcugaccgacgagaugaucgcccaguacaccagcgcccuguuagccggaaccaucaccagcggcuggacuuucggcgcuggagccgcucugcagauccccuucgccaugcagauggccuaccgguucaacggcaucggcgugacccagaacgugcuguacgagaaccagaagcugaucgccaaccaguucaacagcgccaucggcaagauccaggacagccugagcagcaccgcuagcgcccugggcaagcugcaggacguggugaaccagaacgcccaggcccugaacacccuggugaagcagcugagcagcaacuucggcgccaucagcagcgugcugaacgacauccugagccggcuggacccucccgaggccgaggugcagaucgaccggcugaucacuggccggcugcagagccugcagaccuacgugacccagcagcugauccgggccgccgagauucgggccagcgccaaccuggccgccaccaagaugagcgagugcgugcugggccagagcaagcggguggacuucugcggcaagggcuaccaccugaugagcuuuccccagagcgcaccccacggagugguguuccugcacgugaccuacgugcccgcccaggagaagaacuucaccaccgccccagccaucugccacgacggcaaggcccacuuuccccgggagggcguguucgugagcaacggcacccacugguucgugacccagcggaacuucuacgagccccagaucaucaccaccgacaacaccuucgugagcggcaacugcgacguggugaucggcaucgugaacaacaccguguacgauccccugcagcccgagcuggacagcuucaaggaggagcuggacaaguacuucaagaaucacaccagccccgacguggaccugggcgacaucagcggcaucaacgccagcguggugaacauccagaaggagaucgaucggcugaacgagguggccaagaaccugaacgagagccugaucgaccugcaggagcugggcaaguacgagcaguacaucaaguggcccugguacaucuggcugggcuucaucgccggccugaucgccaucgugauggugaccaucaugcugugcugcaugaccagcugcugcagcugccugaagggcuguugcagcugcggcagcugcugcaaguucgacgaggacgacagcgagcccgugcugaagggcgugaagcugcacuacaccuga

SEQ ID NO: 23117 - RNA, 3822 nt, Artificial Sequence
  SARS-CoV-2/Wuhan/WIV05/2019__EPI_ISL_402128 spike protein CDS gc (1-1273)(K986P_V987P_S477N_D614G)
auguucguguuccuggugcugcugccccuggugagcagccagugcgugaaccugaccacccggacccagcugccaccagccuacaccaacagcuucacccggggcgucuacuaccccgacaagguguuccggagcagcguccugcacagcacccaggaccuguuccugcccuucuucagcaacgugaccugguuccacgccauccacgugagcggcaccaacggcaccaagcgguucgacaaccccgugcugcccuucaacgacggcguguacuucgccagcaccgagaagagcaacaucauccggggcuggaucuucggcaccacccuggacagcaagacccagagccugcugaucgugaauaacgccaccaacguggugaucaaggugugcgaguuccaguucugcaacgaccccuuccugggcguguacuaccacaagaacaacaagagcuggauggagagcgaguuccggguguacagcagcgccaacaacugcaccuucgaguacgugagccagcccuuccugauggaccuggagggcaagcagggcaacuucaagaaccugcgggaguucguguucaagaacaucgacggcuacuucaagaucuacagcaagcacaccccaaucaaccuggugcgggaucugccccagggcuucucagcccuggagccccugguggaccugcccaucggcaucaacaucacccgguuccagacccugcuggcccugcaccggagcuaccugaccccaggcgacagcagcagcggguggacagcaggcgcggcugcuuacuacgugggcuaccugcagccccggaccuuccugcugaaguacaacgagaacggcaccaucaccgacgccguggacugcgcccuggacccucugagcgagaccaagugcacccugaagagcuucaccguggagaagggcaucuaccagaccagcaacuuccgggugcagcccaccgagagcaucgugcgguuccccaacaucaccaaccugugccccuucggcgagguguucaacgccacccgguucgccagcguguacgccuggaaccggaagcggaucagcaacugcguggccgacuacagcgugcuguacaacagcgccagcuucagcaccuucaagugcuacggcgugagccccaccaagcugaacgaccugugcuucaccaacguguacgccgacagcuucgugauccguggcgacgaggugcggcagaucgcacccggccagacaggcaagaucgccgacuacaacuacaagcugcccgacgacuucaccggcugcgugaucgccuggaacagcaacaaccucgacagcaaggugggcggcaacuacaacuaccuguaccggcuguuccggaagagcaaccugaagcccuucgagcgggacaucagcaccgagaucuaccaagccggcaacaccccuugcaacggcguggagggcuucaacugcuacuucccucugcagagcuacggcuuccagcccaccaacggcgugggcuaccagcccuaccgggugguggugcugagcuucgagcugcugcacgccccagccaccguguguggccccaagaagagcaccaaccuggugaagaacaagugcgugaacuucaacuucaacggccuuaccggcaccggcgugcugaccgagagcaacaagaaauuccugcccuuucagcaguucggccgggacaucgccgacaccaccgacgcugugcgggauccccagacccuggagauccuggacaucaccccuugcagcuucggcggcgugagcgugaucaccccaggcaccaacaccagcaaccagguggccgugcuguaccagggcgugaacugcaccgaggugcccguggccauccacgccgaccagcugacacccaccuggcgggucuacagcaccggcagcaacguguuccagacccgggccgguugccugaucggcgccgagcacgugaacaacagcuacgagugcgacauccccaucggcgccggcaucugugccagcuaccagacccagaccaauucaccccggagggcaaggagcguggccagccagagcaucaucgccuacaccaugagccugggcgccgagaacagcguggccuacagcaacaacagcaucgccauccccaccaacuucaccaucagcgugaccaccgagauucugcccgugagcaugaccaagaccagcguggacugcaccauguacaucugcggcgacagcaccgagugcagcaaccugcugcugcaguacggcagcuucugcacccagcugaaccgggcccugaccggcaucgccguggagcaggacaagaacacccaggagguguucgcccaggugaagcagaucuacaagaccccucccaucaaggacuucggcggcuucaacuucagccagauccugcccgaccccagcaagcccagcaagcggagcuucaucgaggaccugcuguucaacaaggugacccuagccgacgccggcuucaucaagcaguacggcgacugccucggcgacauagccgcccgggaccugaucugcgcccagaaguucaacggccugaccgugcugccuccccugcugaccgacgagaugaucgcccaguacaccagcgcccuguuagccggaaccaucaccagcggcuggacuuucggcgcuggagccgcucugcagauccccuucgccaugcagauggccuaccgguucaacggcaucggcgugacccagaacgugcuguacgagaaccagaagcugaucgccaaccaguucaacagcgccaucggcaagauccaggacagccugagcagcaccgcuagcgcccugggcaagcugcaggacguggugaaccagaacgcccaggcccugaacacccuggugaagcagcugagcagcaacuucggcgccaucagcagcgugcugaacgacauccugagccggcuggacccucccgaggccgaggugcagaucgaccggcugaucacuggccggcugcagagccugcagaccuacgugacccagcagcugauccgggccgccgagauucgggccagcgccaaccuggccgccaccaagaugagcgagugcgugcugggccagagcaagcggguggacuucugcggcaagggcuaccaccugaugagcuuuccccagagcgcaccccacggagugguguuccugcacgugaccuacgugcccgcccaggagaagaacuucaccaccgccccagccaucugccacgacggcaaggcccacuuuccccgggagggcguguucgugagcaacggcacccacugguucgugacccagcggaacuucuacgagccccagaucaucaccaccgacaacaccuucgugagcggcaacugcgacguggugaucggcaucgugaacaacaccguguacgauccccugcagcccgagcuggacagcuucaaggaggagcuggacaaguacuucaagaaucacaccagccccgacguggaccugggcgacaucagcggcaucaacgccagcguggugaacauccagaaggagaucgaucggcugaacgagguggccaagaaccugaacgagagccugaucgaccugcaggagcugggcaaguacgagcaguacaucaaguggcccugguacaucuggcugggcuucaucgccggccugaucgccaucgugauggugaccaucaugcugugcugcaugaccagcugcugcagcugccugaagggcuguugcagcugcggcagcugcugcaaguucgacgaggacgacagcgagcccgugcugaagggcgugaagcugcacuacaccuga

SEQ ID NO: 23118 - RNA, 3822 nt, Artificial Sequence
  SARS-CoV-2/Wuhan/WIV05/2019__EPI_ISL_402128 spike protein CDS gc (1-1273)(K986P_V987P_N501Y_D614G)
auguucguguuccuggugcugcugccccuggugagcagccagugcgugaaccugaccacccggacccagcugccaccagccuacaccaacagcuucacccggggcgucuacuaccccgacaagguguuccggagcagcguccugcacagcacccaggaccuguuccugcccuucuucagcaacgugaccugguuccacgccauccacgugagcggcaccaacggcaccaagcgguucgacaaccccgugcugcccuucaacgacggcguguacuucgccagcaccgagaagagcaacaucauccggggcuggaucuucggcaccacccuggacagcaagacccagagccugcugaucgugaauaacgccaccaacguggugaucaaggugugcgaguuccaguucugcaacgaccccuuccugggcguguacuaccacaagaacaacaagagcuggauggagagcgaguuccggguguacagcagcgccaacaacugcaccuucgaguacgugagccagcccuuccugauggaccuggagggcaagcagggcaacuucaagaaccugcgggaguucguguucaagaacaucgacggcuacuucaagaucuacagcaagcacaccccaaucaaccuggugcgggaucugccccagggcuucucagcccuggagccccugguggaccugcccaucggcaucaacaucacccgguuccagacccugcuggcccugcaccggagcuaccugaccccaggcgacagcagcagcggguggacagcaggcgcggcugcuuacuacgugggcuaccugcagccccggaccuuccugcugaaguacaacgagaacggcaccaucaccgacgccguggacugcgcccuggacccucugagcgagaccaagugcacccugaagagcuucaccguggagaagggcaucuaccagaccagcaacuuccgggugcagcccaccgagagcaucgugcgguuccccaacaucaccaaccugugccccuucggcgagguguucaacgccacccgguucgccagcguguacgccuggaaccggaagcggaucagcaacugcguggccgacuacagcgugcuguacaacagcgccagcuucagcaccuucaagugcuacggcgugagccccaccaagcugaacgaccugugcuucaccaacguguacgccgacagcuucgugauccguggcgacgaggugcggcagaucgcacccggccagacaggcaagaucgccgacuacaacuacaagcugcccgacgacuucaccggcugcgugaucgccuggaacagcaacaaccucgacagcaaggugggcggcaacuacaacuaccuguaccggcuguuccggaagagcaaccugaagcccuucgagcgggacaucagcaccgagaucuaccaagccggcuccaccccuugcaacggcguggagggcuucaacugcuacuucccucugcagagcuacggcuuccagcccaccuacggcgugggcuaccagcccuaccgggugguggugcugagcuucgagcugcugcacgccccagccaccguguguggccccaagaagagcaccaaccuggugaagaacaagugcgugaacuucaacuucaacggccuuaccggcaccggcgugcugaccgagagcaacaagaaauuccugcccuuucagcaguucggccgggacaucgccgacaccaccgacgcugugcgggauccccagacccuggagauccuggacaucaccccuugcagcuucggcggcgugagcgugaucaccccaggcaccaacaccagcaaccagguggccgugcuguaccagggcgugaacugcaccgaggugcccguggccauccacgccgaccagcugacacccaccuggcgggucuacagcaccggcagcaacguguuccagacccgggccgguugccugaucggcgccgagcacgugaacaacagcuacgagugcgacauccccaucggcgccggcaucugugccagcuaccagacccagaccaauucaccccggagggcaaggagcguggccagccagagcaucaucgccuacaccaugagccugggcgccgagaacagcguggccuacagcaacaacagcaucgccauccccaccaacuucaccaucagcgugaccaccgagauucugcccgugagcaugaccaagaccagcguggacugcaccauguacaucugcggcgacagcaccgagugcagcaaccugcugcugcaguacggcagcuucugcacccagcugaaccgggcccugaccggcaucgccguggagcaggacaagaacacccaggagguguucgcccaggugaagcagaucuacaagaccccucccaucaaggacuucggcggcuucaacuucagccagauccugcccgaccccagcaagcccagcaagcggagcuucaucgaggaccugcuguucaacaaggugacccuagccgacgccggcuucaucaagcaguacggcgacugccucggcgacauagccgcccgggaccugaucugcgcccagaaguucaacggccugaccgugcugccuccccugcugaccgacgagaugaucgcccaguacaccagcgcccuguuagccggaaccaucaccagcggcuggacuuucggcgcuggagccgcucugcagauccccuucgccaugcagauggccuaccgguucaacggcaucggcgugacccagaacgugcuguacgagaaccagaagcugaucgccaaccaguucaacagcgccaucggcaagauccaggacagccugagcagcaccgcuagcgcccugggcaagcugcaggacguggugaaccagaacgcccaggcccugaacacccuggugaagcagcugagcagcaacuucggcgccaucagcagcgugcugaacgacauccugagccggcuggacccucccgaggccgaggugcagaucgaccggcugaucacuggccggcugcagagccugcagaccuacgugacccagcagcugauccgggccgccgagauucgggccagcgccaaccuggccgccaccaagaugagcgagugcgugcugggccagagcaagcggguggacuucugcggcaagggcuaccaccugaugagcuuuccccagagcgcaccccacggagugguguuccugcacgugaccuacgugcccgcccaggagaagaacuucaccaccgccccagccaucugccacgacggcaaggcccacuuuccccgggagggcguguucgugagcaacggcacccacugguucgugacccagcggaacuucuacgagccccagaucaucaccaccgacaacaccuucgugagcggcaacugcgacguggugaucggcaucgugaacaacaccguguacgauccccugcagcccgagcuggacagcuucaaggaggagcuggacaaguacuucaagaaucacaccagccccgacguggaccugggcgacaucagcggcaucaacgccagcguggugaacauccagaaggagaucgaucggcugaacgagguggccaagaaccugaacgagagccugaucgaccugcaggagcugggcaaguacgagcaguacaucaaguggcccugguacaucuggcugggcuucaucgccggccugaucgccaucgugauggugaccaucaugcugugcugcaugaccagcugcugcagcugccugaagggcuguugcagcugcggcagcugcugcaaguucgacgaggacgacagcgagcccgugcugaagggcgugaagcugcacuacaccuga

SEQ ID NO: 23119 - RNA, 3816 nt, Artificial Sequence
  SARS-CoV-2/Wuhan/WIV05/2019__EPI_ISL_402128 spike protein CDS gc (1-1273)(K986P_V987P_H69del_V70del_D614G)
auguucguguuccuggugcugcugccccuggugagcagccagugcgugaaccugaccacccggacccagcugccaccagccuacaccaacagcuucacccggggcgucuacuaccccgacaagguguuccggagcagcguccugcacagcacccaggaccuguuccugcccuucuucagcaacgugaccugguuccacgccaucagcggcaccaacggcaccaagcgguucgacaaccccgugcugcccuucaacgacggcguguacuucgccagcaccgagaagagcaacaucauccggggcuggaucuucggcaccacccuggacagcaagacccagagccugcugaucgugaauaacgccaccaacguggugaucaaggugugcgaguuccaguucugcaacgaccccuuccugggcguguacuaccacaagaacaacaagagcuggauggagagcgaguuccggguguacagcagcgccaacaacugcaccuucgaguacgugagccagcccuuccugauggaccuggagggcaagcagggcaacuucaagaaccugcgggaguucguguucaagaacaucgacggcuacuucaagaucuacagcaagcacaccccaaucaaccuggugcgggaucugccccagggcuucucagcccuggagccccugguggaccugcccaucggcaucaacaucacccgguuccagacccugcuggcccugcaccggagcuaccugaccccaggcgacagcagcagcggguggacagcaggcgcggcugcuuacuacgugggcuaccugcagccccggaccuuccugcugaaguacaacgagaacggcaccaucaccgacgccguggacugcgcccuggacccucugagcgagaccaagugcacccugaagagcuucaccguggagaagggcaucuaccagaccagcaacuuccgggugcagcccaccgagagcaucgugcgguuccccaacaucaccaaccugugccccuucggcgagguguucaacgccacccgguucgccagcguguacgccuggaaccggaagcggaucagcaacugcguggccgacuacagcgugcuguacaacagcgccagcuucagcaccuucaagugcuacggcgugagccccaccaagcugaacgaccugugcuucaccaacguguacgccgacagcuucgugauccguggcgacgaggugcggcagaucgcacccggccagacaggcaagaucgccgacuacaacuacaagcugcccgacgacuucaccggcugcgugaucgccuggaacagcaacaaccucgacagcaaggugggcggcaacuacaacuaccuguaccggcuguuccggaagagcaaccugaagcccuucgagcgggacaucagcaccgagaucuaccaagccggcuccaccccuugcaacggcguggagggcuucaacugcuacuucccucugcagagcuacggcuuccagcccaccaacggcgugggcuaccagcccuaccgggugguggugcugagcuucgagcugcugcacgccccagccaccguguguggccccaagaagagcaccaaccuggugaagaacaagugcgugaacuucaacuucaacggccuuaccggcaccggcgugcugaccgagagcaacaagaaauuccugcccuuucagcaguucggccgggacaucgccgacaccaccgacgcugugcgggauccccagacccuggagauccuggacaucaccccuugcagcuucggcggcgugagcgugaucaccccaggcaccaacaccagcaaccagguggccgugcuguaccagggcgugaacugcaccgaggugcccguggccauccacgccgaccagcugacacccaccuggcgggucuacagcaccggcagcaacguguuccagacccgggccgguugccugaucggcgccgagcacgugaacaacagcuacgagugcgacauccccaucggcgccggcaucugugccagcuaccagacccagaccaauucaccccggagggcaaggagcguggccagccagagcaucaucgccuacaccaugagccugggcgccgagaacagcguggccuacagcaacaacagcaucgccauccccaccaacuucaccaucagcgugaccaccgagauucugcccgugagcaugaccaagaccagcguggacugcaccauguacaucugcggcgacagcaccgagugcagcaaccugcugcugcaguacggcagcuucugcacccagcugaaccgggcccugaccggcaucgccguggagcaggacaagaacacccaggagguguucgcccaggugaagcagaucuacaagaccccucccaucaaggacuucggcggcuucaacuucagccagauccugcccgaccccagcaagcccagcaagcggagcuucaucgaggaccugcuguucaacaaggugacccuagccgacgccggcuucaucaagcaguacggcgacugccucggcgacauagccgcccgggaccugaucugcgcccagaaguucaacggccugaccgugcugccuccccugcugaccgacgagaugaucgcccaguacaccagcgcccuguuagccggaaccaucaccagcggcuggacuuucggcgcuggagccgcucugcagauccccuucgccaugcagauggccuaccgguucaacggcaucggcgugacccagaacgugcuguacgagaaccagaagcugaucgccaaccaguucaacagcgccaucggcaagauccaggacagccugagcagcaccgcuagcgcccugggcaagcugcaggacguggugaaccagaacgcccaggcccugaacacccuggugaagcagcugagcagcaacuucggcgccaucagcagcgugcugaacgacauccugagccggcuggacccucccgaggccgaggugcagaucgaccggcugaucacuggccggcugcagagccugcagaccuacgugacccagcagcugauccgggccgccgagauucgggccagcgccaaccuggccgccaccaagaugagcgagugcgugcugggccagagcaagcggguggacuucugcggcaagggcuaccaccugaugagcuuuccccagagcgcaccccacggagugguguuccugcacgugaccuacgugcccgcccaggagaagaacuucaccaccgccccagccaucugccacgacggcaaggcccacuuuccccgggagggcguguucgugagcaacggcacccacugguucgugacccagcggaacuucuacgagccccagaucaucaccaccgacaacaccuucgugagcggcaacugcgacguggugaucggcaucgugaacaacaccguguacgauccccugcagcccgagcuggacagcuucaaggaggagcuggacaaguacuucaagaaucacaccagccccgacguggaccugggcgacaucagcggcaucaacgccagcguggugaacauccagaaggagaucgaucggcugaacgagguggccaagaaccugaacgagagccugaucgaccugcaggagcugggcaaguacgagcaguacaucaaguggcccugguacaucuggcugggcuucaucgccggccugaucgccaucgugauggugaccaucaugcugugcugcaugaccagcugcugcagcugccugaagggcuguugcagcugcggcagcugcugcaaguucgacgaggacgacagcgagcccgugcugaagggcgugaagcugcacuacaccuga

SEQ ID NO: 23120 - RNA, 3822 nt, Artificial Sequence
  SARS-CoV-2/Wuhan/WIV05/2019__EPI_ISL_402128 spike protein CDS gc (1-1273)(K986P_V987P_Y453F_D614G)
auguucguguuccuggugcugcugccccuggugagcagccagugcgugaaccugaccacccggacccagcugccaccagccuacaccaacagcuucacccggggcgucuacuaccccgacaagguguuccggagcagcguccugcacagcacccaggaccuguuccugcccuucuucagcaacgugaccugguuccacgccauccacgugagcggcaccaacggcaccaagcgguucgacaaccccgugcugcccuucaacgacggcguguacuucgccagcaccgagaagagcaacaucauccggggcuggaucuucggcaccacccuggacagcaagacccagagccugcugaucgugaauaacgccaccaacguggugaucaaggugugcgaguuccaguucugcaacgaccccuuccugggcguguacuaccacaagaacaacaagagcuggauggagagcgaguuccggguguacagcagcgccaacaacugcaccuucgaguacgugagccagcccuuccugauggaccuggagggcaagcagggcaacuucaagaaccugcgggaguucguguucaagaacaucgacggcuacuucaagaucuacagcaagcacaccccaaucaaccuggugcgggaucugccccagggcuucucagcccuggagccccugguggaccugcccaucggcaucaacaucacccgguuccagacccugcuggcccugcaccggagcuaccugaccccaggcgacagcagcagcggguggacagcaggcgcggcugcuuacuacgugggcuaccugcagccccggaccuuccugcugaaguacaacgagaacggcaccaucaccgacgccguggacugcgcccuggacccucugagcgagaccaagugcacccugaagagcuucaccguggagaagggcaucuaccagaccagcaacuuccgggugcagcccaccgagagcaucgugcgguuccccaacaucaccaaccugugccccuucggcgagguguucaacgccacccgguucgccagcguguacgccuggaaccggaagcggaucagcaacugcguggccgacuacagcgugcuguacaacagcgccagcuucagcaccuucaagugcuacggcgugagccccaccaagcugaacgaccugugcuucaccaacguguacgccgacagcuucgugauccguggcgacgaggugcggcagaucgcacccggccagacaggcaagaucgccgacuacaacuacaagcugcccgacgacuucaccggcugcgugaucgccuggaacagcaacaaccucgacagcaaggugggcggcaacuacaacuaccuguuccggcuguuccggaagagcaaccugaagcccuucgagcgggacaucagcaccgagaucuaccaagccggcuccaccccuugcaacggcguggagggcuucaacugcuacuucccucugcagagcuacggcuuccagcccaccaacggcgugggcuaccagcccuaccgggugguggugcugagcuucgagcugcugcacgccccagccaccguguguggccccaagaagagcaccaaccuggugaagaacaagugcgugaacuucaacuucaacggccuuaccggcaccggcgugcugaccgagagcaacaagaaauuccugcccuuucagcaguucggccgggacaucgccgacaccaccgacgcugugcgggauccccagacccuggagauccuggacaucaccccuugcagcuucggcggcgugagcgugaucaccccaggcaccaacaccagcaaccagguggccgugcuguaccagggcgugaacugcaccgaggugcccguggccauccacgccgaccagcugacacccaccuggcgggucuacagcaccggcagcaacguguuccagacccgggccgguugccugaucggcgccgagcacgugaacaacagcuacgagugcgacauccccaucggcgccggcaucugugccagcuaccagacccagaccaauucaccccggagggcaaggagcguggccagccagagcaucaucgccuacaccaugagccugggcgccgagaacagcguggccuacagcaacaacagcaucgccauccccaccaacuucaccaucagcgugaccaccgagauucugcccgugagcaugaccaagaccagcguggacugcaccauguacaucugcggcgacagcaccgagugcagcaaccugcugcugcaguacggcagcuucugcacccagcugaaccgggcccugaccggcaucgccguggagcaggacaagaacacccaggagguguucgcccaggugaagcagaucuacaagaccccucccaucaaggacuucggcggcuucaacuucagccagauccugcccgaccccagcaagcccagcaagcggagcuucaucgaggaccugcuguucaacaaggugacccuagccgacgccggcuucaucaagcaguacggcgacugccucggcgacauagccgcccgggaccugaucugcgcccagaaguucaacggccugaccgugcugccuccccugcugaccgacgagaugaucgcccaguacaccagcgcccuguuagccggaaccaucaccagcggcuggacuuucggcgcuggagccgcucugcagauccccuucgccaugcagauggccuaccgguucaacggcaucggcgugacccagaacgugcuguacgagaaccagaagcugaucgccaaccaguucaacagcgccaucggcaagauccaggacagccugagcagcaccgcuagcgcccugggcaagcugcaggacguggugaaccagaacgcccaggcccugaacacccuggugaagcagcugagcagcaacuucggcgccaucagcagcgugcugaacgacauccugagccggcuggacccucccgaggccgaggugcagaucgaccggcugaucacuggccggcugcagagccugcagaccuacgugacccagcagcugauccgggccgccgagauucgggccagcgccaaccuggccgccaccaagaugagcgagugcgugcugggccagagcaagcggguggacuucugcggcaagggcuaccaccugaugagcuuuccccagagcgcaccccacggagugguguuccugcacgugaccuacgugcccgcccaggagaagaacuucaccaccgccccagccaucugccacgacggcaaggcccacuuuccccgggagggcguguucgugagcaacggcacccacugguucgugacccagcggaacuucuacgagccccagaucaucaccaccgacaacaccuucgugagcggcaacugcgacguggugaucggcaucgugaacaacaccguguacgauccccugcagcccgagcuggacagcuucaaggaggagcuggacaaguacuucaagaaucacaccagccccgacguggaccugggcgacaucagcggcaucaacgccagcguggugaacauccagaaggagaucgaucggcugaacgagguggccaagaaccugaacgagagccugaucgaccugcaggagcugggcaaguacgagcaguacaucaaguggcccugguacaucuggcugggcuucaucgccggccugaucgccaucgugauggugaccaucaugcugugcugcaugaccagcugcugcagcugccugaagggcuguugcagcugcggcagcugcugcaaguucgacgaggacgacagcgagcccgugcugaagggcgugaagcugcacuacaccuga

SEQ ID NO: 23121 - RNA, 3822 nt, Artificial Sequence
  SARS-CoV-2/Wuhan/WIV05/2019__EPI_ISL_402128 spike protein CDS gc (1-1273)(K986P_V987P_D614G_I692V)
auguucguguuccuggugcugcugccccuggugagcagccagugcgugaaccugaccacccggacccagcugccaccagccuacaccaacagcuucacccggggcgucuacuaccccgacaagguguuccggagcagcguccugcacagcacccaggaccuguuccugcccuucuucagcaacgugaccugguuccacgccauccacgugagcggcaccaacggcaccaagcgguucgacaaccccgugcugcccuucaacgacggcguguacuucgccagcaccgagaagagcaacaucauccggggcuggaucuucggcaccacccuggacagcaagacccagagccugcugaucgugaauaacgccaccaacguggugaucaaggugugcgaguuccaguucugcaacgaccccuuccugggcguguacuaccacaagaacaacaagagcuggauggagagcgaguuccggguguacagcagcgccaacaacugcaccuucgaguacgugagccagcccuuccugauggaccuggagggcaagcagggcaacuucaagaaccugcgggaguucguguucaagaacaucgacggcuacuucaagaucuacagcaagcacaccccaaucaaccuggugcgggaucugccccagggcuucucagcccuggagccccugguggaccugcccaucggcaucaacaucacccgguuccagacccugcuggcccugcaccggagcuaccugaccccaggcgacagcagcagcggguggacagcaggcgcggcugcuuacuacgugggcuaccugcagccccggaccuuccugcugaaguacaacgagaacggcaccaucaccgacgccguggacugcgcccuggacccucugagcgagaccaagugcacccugaagagcuucaccguggagaagggcaucuaccagaccagcaacuuccgggugcagcccaccgagagcaucgugcgguuccccaacaucaccaaccugugccccuucggcgagguguucaacgccacccgguucgccagcguguacgccuggaaccggaagcggaucagcaacugcguggccgacuacagcgugcuguacaacagcgccagcuucagcaccuucaagugcuacggcgugagccccaccaagcugaacgaccugugcuucaccaacguguacgccgacagcuucgugauccguggcgacgaggugcggcagaucgcacccggccagacaggcaagaucgccgacuacaacuacaagcugcccgacgacuucaccggcugcgugaucgccuggaacagcaacaaccucgacagcaaggugggcggcaacuacaacuaccuguaccggcuguuccggaagagcaaccugaagcccuucgagcgggacaucagcaccgagaucuaccaagccggcuccaccccuugcaacggcguggagggcuucaacugcuacuucccucugcagagcuacggcuuccagcccaccaacggcgugggcuaccagcccuaccgggugguggugcugagcuucgagcugcugcacgccccagccaccguguguggccccaagaagagcaccaaccuggugaagaacaagugcgugaacuucaacuucaacggccuuaccggcaccggcgugcugaccgagagcaacaagaaauuccugcccuuucagcaguucggccgggacaucgccgacaccaccgacgcugugcgggauccccagacccuggagauccuggacaucaccccuugcagcuucggcggcgugagcgugaucaccccaggcaccaacaccagcaaccagguggccgugcuguaccagggcgugaacugcaccgaggugcccguggccauccacgccgaccagcugacacccaccuggcgggucuacagcaccggcagcaacguguuccagacccgggccgguugccugaucggcgccgagcacgugaacaacagcuacgagugcgacauccccaucggcgccggcaucugugccagcuaccagacccagaccaauucaccccggagggcaaggagcguggccagccagagcgugaucgccuacaccaugagccugggcgccgagaacagcguggccuacagcaacaacagcaucgccauccccaccaacuucaccaucagcgugaccaccgagauucugcccgugagcaugaccaagaccagcguggacugcaccauguacaucugcggcgacagcaccgagugcagcaaccugcugcugcaguacggcagcuucugcacccagcugaaccgggcccugaccggcaucgccguggagcaggacaagaacacccaggagguguucgcccaggugaagcagaucuacaagaccccucccaucaaggacuucggcggcuucaacuucagccagauccugcccgaccccagcaagcccagcaagcggagcuucaucgaggaccugcuguucaacaaggugacccuagccgacgccggcuucaucaagcaguacggcgacugccucggcgacauagccgcccgggaccugaucugcgcccagaaguucaacggccugaccgugcugccuccccugcugaccgacgagaugaucgcccaguacaccagcgcccuguuagccggaaccaucaccagcggcuggacuuucggcgcuggagccgcucugcagauccccuucgccaugcagauggccuaccgguucaacggcaucggcgugacccagaacgugcuguacgagaaccagaagcugaucgccaaccaguucaacagcgccaucggcaagauccaggacagccugagcagcaccgcuagcgcccugggcaagcugcaggacguggugaaccagaacgcccaggcccugaacacccuggugaagcagcugagcagcaacuucggcgccaucagcagcgugcugaacgacauccugagccggcuggacccucccgaggccgaggugcagaucgaccggcugaucacuggccggcugcagagccugcagaccuacgugacccagcagcugauccgggccgccgagauucgggccagcgccaaccuggccgccaccaagaugagcgagugcgugcugggccagagcaagcggguggacuucugcggcaagggcuaccaccugaugagcuuuccccagagcgcaccccacggagugguguuccugcacgugaccuacgugcccgcccaggagaagaacuucaccaccgccccagccaucugccacgacggcaaggcccacuuuccccgggagggcguguucgugagcaacggcacccacugguucgugacccagcggaacuucuacgagccccagaucaucaccaccgacaacaccuucgugagcggcaacugcgacguggugaucggcaucgugaacaacaccguguacgauccccugcagcccgagcuggacagcuucaaggaggagcuggacaaguacuucaagaaucacaccagccccgacguggaccugggcgacaucagcggcaucaacgccagcguggugaacauccagaaggagaucgaucggcugaacgagguggccaagaaccugaacgagagccugaucgaccugcaggagcugggcaaguacgagcaguacaucaaguggcccugguacaucuggcugggcuucaucgccggccugaucgccaucgugauggugaccaucaugcugugcugcaugaccagcugcugcagcugccugaagggcuguugcagcugcggcagcugcugcaaguucgacgaggacgacagcgagcccgugcugaagggcgugaagcugcacuacaccuga

SEQ ID NO: 23122 - RNA, 3822 nt, Artificial Sequence
  SARS-CoV-2/Wuhan/WIV05/2019__EPI_ISL_402128 spike protein CDS gc (1-1273)(K986P_V987P_D614G_M1229I)
auguucguguuccuggugcugcugccccuggugagcagccagugcgugaaccugaccacccggacccagcugccaccagccuacaccaacagcuucacccggggcgucuacuaccccgacaagguguuccggagcagcguccugcacagcacccaggaccuguuccugcccuucuucagcaacgugaccugguuccacgccauccacgugagcggcaccaacggcaccaagcgguucgacaaccccgugcugcccuucaacgacggcguguacuucgccagcaccgagaagagcaacaucauccggggcuggaucuucggcaccacccuggacagcaagacccagagccugcugaucgugaauaacgccaccaacguggugaucaaggugugcgaguuccaguucugcaacgaccccuuccugggcguguacuaccacaagaacaacaagagcuggauggagagcgaguuccggguguacagcagcgccaacaacugcaccuucgaguacgugagccagcccuuccugauggaccuggagggcaagcagggcaacuucaagaaccugcgggaguucguguucaagaacaucgacggcuacuucaagaucuacagcaagcacaccccaaucaaccuggugcgggaucugccccagggcuucucagcccuggagccccugguggaccugcccaucggcaucaacaucacccgguuccagacccugcuggcccugcaccggagcuaccugaccccaggcgacagcagcagcggguggacagcaggcgcggcugcuuacuacgugggcuaccugcagccccggaccuuccugcugaaguacaacgagaacggcaccaucaccgacgccguggacugcgcccuggacccucugagcgagaccaagugcacccugaagagcuucaccguggagaagggcaucuaccagaccagcaacuuccgggugcagcccaccgagagcaucgugcgguuccccaacaucaccaaccugugccccuucggcgagguguucaacgccacccgguucgccagcguguacgccuggaaccggaagcggaucagcaacugcguggccgacuacagcgugcuguacaacagcgccagcuucagcaccuucaagugcuacggcgugagccccaccaagcugaacgaccugugcuucaccaacguguacgccgacagcuucgugauccguggcgacgaggugcggcagaucgcacccggccagacaggcaagaucgccgacuacaacuacaagcugcccgacgacuucaccggcugcgugaucgccuggaacagcaacaaccucgacagcaaggugggcggcaacuacaacuaccuguaccggcuguuccggaagagcaaccugaagcccuucgagcgggacaucagcaccgagaucuaccaagccggcuccaccccuugcaacggcguggagggcuucaacugcuacuucccucugcagagcuacggcuuccagcccaccaacggcgugggcuaccagcccuaccgggugguggugcugagcuucgagcugcugcacgccccagccaccguguguggccccaagaagagcaccaaccuggugaagaacaagugcgugaacuucaacuucaacggccuuaccggcaccggcgugcugaccgagagcaacaagaaauuccugcccuuucagcaguucggccgggacaucgccgacaccaccgacgcugugcgggauccccagacccuggagauccuggacaucaccccuugcagcuucggcggcgugagcgugaucaccccaggcaccaacaccagcaaccagguggccgugcuguaccagggcgugaacugcaccgaggugcccguggccauccacgccgaccagcugacacccaccuggcgggucuacagcaccggcagcaacguguuccagacccgggccgguugccugaucggcgccgagcacgugaacaacagcuacgagugcgacauccccaucggcgccggcaucugugccagcuaccagacccagaccaauucaccccggagggcaaggagcguggccagccagagcaucaucgccuacaccaugagccugggcgccgagaacagcguggccuacagcaacaacagcaucgccauccccaccaacuucaccaucagcgugaccaccgagauucugcccgugagcaugaccaagaccagcguggacugcaccauguacaucugcggcgacagcaccgagugcagcaaccugcugcugcaguacggcagcuucugcacccagcugaaccgggcccugaccggcaucgccguggagcaggacaagaacacccaggagguguucgcccaggugaagcagaucuacaagaccccucccaucaaggacuucggcggcuucaacuucagccagauccugcccgaccccagcaagcccagcaagcggagcuucaucgaggaccugcuguucaacaaggugacccuagccgacgccggcuucaucaagcaguacggcgacugccucggcgacauagccgcccgggaccugaucugcgcccagaaguucaacggccugaccgugcugccuccccugcugaccgacgagaugaucgcccaguacaccagcgcccuguuagccggaaccaucaccagcggcuggacuuucggcgcuggagccgcucugcagauccccuucgccaugcagauggccuaccgguucaacggcaucggcgugacccagaacgugcuguacgagaaccagaagcugaucgccaaccaguucaacagcgccaucggcaagauccaggacagccugagcagcaccgcuagcgcccugggcaagcugcaggacguggugaaccagaacgcccaggcccugaacacccuggugaagcagcugagcagcaacuucggcgccaucagcagcgugcugaacgacauccugagccggcuggacccucccgaggccgaggugcagaucgaccggcugaucacuggccggcugcagagccugcagaccuacgugacccagcagcugauccgggccgccgagauucgggccagcgccaaccuggccgccaccaagaugagcgagugcgugcugggccagagcaagcggguggacuucugcggcaagggcuaccaccugaugagcuuuccccagagcgcaccccacggagugguguuccugcacgugaccuacgugcccgcccaggagaagaacuucaccaccgccccagccaucugccacgacggcaaggcccacuuuccccgggagggcguguucgugagcaacggcacccacugguucgugacccagcggaacuucuacgagccccagaucaucaccaccgacaacaccuucgugagcggcaacugcgacguggugaucggcaucgugaacaacaccguguacgauccccugcagcccgagcuggacagcuucaaggaggagcuggacaaguacuucaagaaucacaccagccccgacguggaccugggcgacaucagcggcaucaacgccagcguggugaacauccagaaggagaucgaucggcugaacgagguggccaagaaccugaacgagagccugaucgaccugcaggagcugggcaaguacgagcaguacaucaaguggcccugguacaucuggcugggcuucaucgccggccugaucgccaucgugaucgugaccaucaugcugugcugcaugaccagcugcugcagcugccugaagggcuguugcagcugcggcagcugcugcaaguucgacgaggacgacagcgagcccgugcugaagggcgugaagcugcacuacaccuga

SEQ ID NO: 23123 - RNA, 3816 nt, Artificial Sequence
  SARS-CoV-2/Wuhan/WIV05/2019__EPI_ISL_402128 spike protein CDS gc (1-1273)(K986P_V987P_H69del_V70del_A222V_Y453F_S477N_D614G_I692V)
auguucguguuccuggugcugcugccccuggugagcagccagugcgugaaccugaccacccggacccagcugccaccagccuacaccaacagcuucacccggggcgucuacuaccccgacaagguguuccggagcagcguccugcacagcacccaggaccuguuccugcccuucuucagcaacgugaccugguuccacgccaucagcggcaccaacggcaccaagcgguucgacaaccccgugcugcccuucaacgacggcguguacuucgccagcaccgagaagagcaacaucauccggggcuggaucuucggcaccacccuggacagcaagacccagagccugcugaucgugaauaacgccaccaacguggugaucaaggugugcgaguuccaguucugcaacgaccccuuccugggcguguacuaccacaagaacaacaagagcuggauggagagcgaguuccggguguacagcagcgccaacaacugcaccuucgaguacgugagccagcccuuccugauggaccuggagggcaagcagggcaacuucaagaaccugcgggaguucguguucaagaacaucgacggcuacuucaagaucuacagcaagcacaccccaaucaaccuggugcgggaucugccccagggcuucucagugcuggagccccugguggaccugcccaucggcaucaacaucacccgguuccagacccugcuggcccugcaccggagcuaccugaccccaggcgacagcagcagcggguggacagcaggcgcggcugcuuacuacgugggcuaccugcagccccggaccuuccugcugaaguacaacgagaacggcaccaucaccgacgccguggacugcgcccuggacccucugagcgagaccaagugcacccugaagagcuucaccguggagaagggcaucuaccagaccagcaacuuccgggugcagcccaccgagagcaucgugcgguuccccaacaucaccaaccugugccccuucggcgagguguucaacgccacccgguucgccagcguguacgccuggaaccggaagcggaucagcaacugcguggccgacuacagcgugcuguacaacagcgccagcuucagcaccuucaagugcuacggcgugagccccaccaagcugaacgaccugugcuucaccaacguguacgccgacagcuucgugauccguggcgacgaggugcggcagaucgcacccggccagacaggcaagaucgccgacuacaacuacaagcugcccgacgacuucaccggcugcgugaucgccuggaacagcaacaaccucgacagcaaggugggcggcaacuacaacuaccuguuccggcuguuccggaagagcaaccugaagcccuucgagcgggacaucagcaccgagaucuaccaagccggcaacaccccuugcaacggcguggagggcuucaacugcuacuucccucugcagagcuacggcuuccagcccaccaacggcgugggcuaccagcccuaccgggugguggugcugagcuucgagcugcugcacgccccagccaccguguguggccccaagaagagcaccaaccuggugaagaacaagugcgugaacuucaacuucaacggccuuaccggcaccggcgugcugaccgagagcaacaagaaauuccugcccuuucagcaguucggccgggacaucgccgacaccaccgacgcugugcgggauccccagacccuggagauccuggacaucaccccuugcagcuucggcggcgugagcgugaucaccccaggcaccaacaccagcaaccagguggccgugcuguaccagggcgugaacugcaccgaggugcccguggccauccacgccgaccagcugacacccaccuggcgggucuacagcaccggcagcaacguguuccagacccgggccgguugccugaucggcgccgagcacgugaacaacagcuacgagugcgacauccccaucggcgccggcaucugugccagcuaccagacccagaccaauucaccccggagggcaaggagcguggccagccagagcgugaucgccuacaccaugagccugggcgccgagaacagcguggccuacagcaacaacagcaucgccauccccaccaacuucaccaucagcgugaccaccgagauucugcccgugagcaugaccaagaccagcguggacugcaccauguacaucugcggcgacagcaccgagugcagcaaccugcugcugcaguacggcagcuucugcacccagcugaaccgggcccugaccggcaucgccguggagcaggacaagaacacccaggagguguucgcccaggugaagcagaucuacaagaccccucccaucaaggacuucggcggcuucaacuucagccagauccugcccgaccccagcaagcccagcaagcggagcuucaucgaggaccugcuguucaacaaggugacccuagccgacgccggcuucaucaagcaguacggcgacugccucggcgacauagccgcccgggaccugaucugcgcccagaaguucaacggccugaccgugcugccuccccugcugaccgacgagaugaucgcccaguacaccagcgcccuguuagccggaaccaucaccagcggcuggacuuucggcgcuggagccgcucugcagauccccuucgccaugcagauggccuaccgguucaacggcaucggcgugacccagaacgugcuguacgagaaccagaagcugaucgccaaccaguucaacagcgccaucggcaagauccaggacagccugagcagcaccgcuagcgcccugggcaagcugcaggacguggugaaccagaacgcccaggcccugaacacccuggugaagcagcugagcagcaacuucggcgccaucagcagcgugcugaacgacauccugagccggcuggacccucccgaggccgaggugcagaucgaccggcugaucacuggccggcugcagagccugcagaccuacgugacccagcagcugauccgggccgccgagauucgggccagcgccaaccuggccgccaccaagaugagcgagugcgugcugggccagagcaagcggguggacuucugcggcaagggcuaccaccugaugagcuuuccccagagcgcaccccacggagugguguuccugcacgugaccuacgugcccgcccaggagaagaacuucaccaccgccccagccaucugccacgacggcaaggcccacuuuccccgggagggcguguucgugagcaacggcacccacugguucgugacccagcggaacuucuacgagccccagaucaucaccaccgacaacaccuucgugagcggcaacugcgacguggugaucggcaucgugaacaacaccguguacgauccccugcagcccgagcuggacagcuucaaggaggagcuggacaaguacuucaagaaucacaccagccccgacguggaccugggcgacaucagcggcaucaacgccagcguggugaacauccagaaggagaucgaucggcugaacgagguggccaagaaccugaacgagagccugaucgaccugcaggagcugggcaaguacgagcaguacaucaaguggcccugguacaucuggcugggcuucaucgccggccugaucgccaucgugauggugaccaucaugcugugcugcaugaccagcugcugcagcugccugaagggcuguugcagcugcggcagcugcugcaaguucgacgaggacgacagcgagcccgugcugaagggcgugaagcugcacuacaccuga

SEQ ID NO: 23124 - RNA, 3816 nt, Artificial Sequence
  SARS-CoV-2/Wuhan/WIV05/2019__EPI_ISL_402128 spike protein CDS gc (1-1273)(K986P_V987P_H69del_V70del_Y453F_D614G_I692V_M1229I)
auguucguguuccuggugcugcugccccuggugagcagccagugcgugaaccugaccacccggacccagcugccaccagccuacaccaacagcuucacccggggcgucuacuaccccgacaagguguuccggagcagcguccugcacagcacccaggaccuguuccugcccuucuucagcaacgugaccugguuccacgccaucagcggcaccaacggcaccaagcgguucgacaaccccgugcugcccuucaacgacggcguguacuucgccagcaccgagaagagcaacaucauccggggcuggaucuucggcaccacccuggacagcaagacccagagccugcugaucgugaauaacgccaccaacguggugaucaaggugugcgaguuccaguucugcaacgaccccuuccugggcguguacuaccacaagaacaacaagagcuggauggagagcgaguuccggguguacagcagcgccaacaacugcaccuucgaguacgugagccagcccuuccugauggaccuggagggcaagcagggcaacuucaagaaccugcgggaguucguguucaagaacaucgacggcuacuucaagaucuacagcaagcacaccccaaucaaccuggugcgggaucugccccagggcuucucagcccuggagccccugguggaccugcccaucggcaucaacaucacccgguuccagacccugcuggcccugcaccggagcuaccugaccccaggcgacagcagcagcggguggacagcaggcgcggcugcuuacuacgugggcuaccugcagccccggaccuuccugcugaaguacaacgagaacggcaccaucaccgacgccguggacugcgcccuggacccucugagcgagaccaagugcacccugaagagcuucaccguggagaagggcaucuaccagaccagcaacuuccgggugcagcccaccgagagcaucgugcgguuccccaacaucaccaaccugugccccuucggcgagguguucaacgccacccgguucgccagcguguacgccuggaaccggaagcggaucagcaacugcguggccgacuacagcgugcuguacaacagcgccagcuucagcaccuucaagugcuacggcgugagccccaccaagcugaacgaccugugcuucaccaacguguacgccgacagcuucgugauccguggcgacgaggugcggcagaucgcacccggccagacaggcaagaucgccgacuacaacuacaagcugcccgacgacuucaccggcugcgugaucgccuggaacagcaacaaccucgacagcaaggugggcggcaacuacaacuaccuguuccggcuguuccggaagagcaaccugaagcccuucgagcgggacaucagcaccgagaucuaccaagccggcuccaccccuugcaacggcguggagggcuucaacugcuacuucccucugcagagcuacggcuuccagcccaccaacggcgugggcuaccagcccuaccgggugguggugcugagcuucgagcugcugcacgccccagccaccguguguggccccaagaagagcaccaaccuggugaagaacaagugcgugaacuucaacuucaacggccuuaccggcaccggcgugcugaccgagagcaacaagaaauuccugcccuuucagcaguucggccgggacaucgccgacaccaccgacgcugugcgggauccccagacccuggagauccuggacaucaccccuugcagcuucggcggcgugagcgugaucaccccaggcaccaacaccagcaaccagguggccgugcuguaccagggcgugaacugcaccgaggugcccguggccauccacgccgaccagcugacacccaccuggcgggucuacagcaccggcagcaacguguuccagacccgggccgguugccugaucggcgccgagcacgugaacaacagcuacgagugcgacauccccaucggcgccggcaucugugccagcuaccagacccagaccaauucaccccggagggcaaggagcguggccagccagagcgugaucgccuacaccaugagccugggcgccgagaacagcguggccuacagcaacaacagcaucgccauccccaccaacuucaccaucagcgugaccaccgagauucugcccgugagcaugaccaagaccagcguggacugcaccauguacaucugcggcgacagcaccgagugcagcaaccugcugcugcaguacggcagcuucugcacccagcugaaccgggcccugaccggcaucgccguggagcaggacaagaacacccaggagguguucgcccaggugaagcagaucuacaagaccccucccaucaaggacuucggcggcuucaacuucagccagauccugcccgaccccagcaagcccagcaagcggagcuucaucgaggaccugcuguucaacaaggugacccuagccgacgccggcuucaucaagcaguacggcgacugccucggcgacauagccgcccgggaccugaucugcgcccagaaguucaacggccugaccgugcugccuccccugcugaccgacgagaugaucgcccaguacaccagcgcccuguuagccggaaccaucaccagcggcuggacuuucggcgcuggagccgcucugcagauccccuucgccaugcagauggccuaccgguucaacggcaucggcgugacccagaacgugcuguacgagaaccagaagcugaucgccaaccaguucaacagcgccaucggcaagauccaggacagccugagcagcaccgcuagcgcccugggcaagcugcaggacguggugaaccagaacgcccaggcccugaacacccuggugaagcagcugagcagcaacuucggcgccaucagcagcgugcugaacgacauccugagccggcuggacccucccgaggccgaggugcagaucgaccggcugaucacuggccggcugcagagccugcagaccuacgugacccagcagcugauccgggccgccgagauucgggccagcgccaaccuggccgccaccaagaugagcgagugcgugcugggccagagcaagcggguggacuucugcggcaagggcuaccaccugaugagcuuuccccagagcgcaccccacggagugguguuccugcacgugaccuacgugcccgcccaggagaagaacuucaccaccgccccagccaucugccacgacggcaaggcccacuuuccccgggagggcguguucgugagcaacggcacccacugguucgugacccagcggaacuucuacgagccccagaucaucaccaccgacaacaccuucgugagcggcaacugcgacguggugaucggcaucgugaacaacaccguguacgauccccugcagcccgagcuggacagcuucaaggaggagcuggacaaguacuucaagaaucacaccagccccgacguggaccugggcgacaucagcggcaucaacgccagcguggugaacauccagaaggagaucgaucggcugaacgagguggccaagaaccugaacgagagccugaucgaccugcaggagcugggcaaguacgagcaguacaucaaguggcccugguacaucuggcugggcuucaucgccggccugaucgccaucgugaucgugaccaucaugcugugcugcaugaccagcugcugcagcugccugaagggcuguugcagcugcggcagcugcugcaaguucgacgaggacgacagcgagcccgugcugaagggcgugaagcugcacuacaccuga

SEQ ID NO: 23125 - RNA, 3813 nt, Artificial Sequence
  SARS-CoV-2/Wuhan/WIV05/2019__EPI_ISL_402128 spike protein CDS gc (1-1273)(K986P_V987P_K986P_V987P_H69del_V70del_Y144del_N501Y_A570 D_D614G_P681H_T716I_S982A_D1118H)
auguucguguuccuggugcugcugccccuggugagcagccagugcgugaaccugaccacccggacccagcugccaccagccuacaccaacagcuucacccggggcgucuacuaccccgacaagguguuccggagcagcguccugcacagcacccaggaccuguuccugcccuucuucagcaacgugaccugguuccacgccaucagcggcaccaacggcaccaagcgguucgacaaccccgugcugcccuucaacgacggcguguacuucgccagcaccgagaagagcaacaucauccggggcuggaucuucggcaccacccuggacagcaagacccagagccugcugaucgugaauaacgccaccaacguggugaucaaggugugcgaguuccaguucugcaacgaccccuuccugggcguguaccacaagaacaacaagagcuggauggagagcgaguuccggguguacagcagcgccaacaacugcaccuucgaguacgugagccagcccuuccugauggaccuggagggcaagcagggcaacuucaagaaccugcgggaguucguguucaagaacaucgacggcuacuucaagaucuacagcaagcacaccccaaucaaccuggugcgggaucugccccagggcuucucagcccuggagccccugguggaccugcccaucggcaucaacaucacccgguuccagacccugcuggcccugcaccggagcuaccugaccccaggcgacagcagcagcggguggacagcaggcgcggcugcuuacuacgugggcuaccugcagccccggaccuuccugcugaaguacaacgagaacggcaccaucaccgacgccguggacugcgcccuggacccucugagcgagaccaagugcacccugaagagcuucaccguggagaagggcaucuaccagaccagcaacuuccgggugcagcccaccgagagcaucgugcgguuccccaacaucaccaaccugugccccuucggcgagguguucaacgccacccgguucgccagcguguacgccuggaaccggaagcggaucagcaacugcguggccgacuacagcgugcuguacaacagcgccagcuucagcaccuucaagugcuacggcgugagccccaccaagcugaacgaccugugcuucaccaacguguacgccgacagcuucgugauccguggcgacgaggugcggcagaucgcacccggccagacaggcaagaucgccgacuacaacuacaagcugcccgacgacuucaccggcugcgugaucgccuggaacagcaacaaccucgacagcaaggugggcggcaacuacaacuaccuguaccggcuguuccggaagagcaaccugaagcccuucgagcgggacaucagcaccgagaucuaccaagccggcuccaccccuugcaacggcguggagggcuucaacugcuacuucccucugcagagcuacggcuuccagcccaccuacggcgugggcuaccagcccuaccgggugguggugcugagcuucgagcugcugcacgccccagccaccguguguggccccaagaagagcaccaaccuggugaagaacaagugcgugaacuucaacuucaacggccuuaccggcaccggcgugcugaccgagagcaacaagaaauuccugcccuuucagcaguucggccgggacaucgacgacaccaccgacgcugugcgggauccccagacccuggagauccuggacaucaccccuugcagcuucggcggcgugagcgugaucaccccaggcaccaacaccagcaaccagguggccgugcuguaccagggcgugaacugcaccgaggugcccguggccauccacgccgaccagcugacacccaccuggcgggucuacagcaccggcagcaacguguuccagacccgggccgguugccugaucggcgccgagcacgugaacaacagcuacgagugcgacauccccaucggcgccggcaucugugccagcuaccagacccagaccaauucacaccggagggcaaggagcguggccagccagagcaucaucgccuacaccaugagccugggcgccgagaacagcguggccuacagcaacaacagcaucgccauccccaucaacuucaccaucagcgugaccaccgagauucugcccgugagcaugaccaagaccagcguggacugcaccauguacaucugcggcgacagcaccgagugcagcaaccugcugcugcaguacggcagcuucugcacccagcugaaccgggcccugaccggcaucgccguggagcaggacaagaacacccaggagguguucgcccaggugaagcagaucuacaagaccccucccaucaaggacuucggcggcuucaacuucagccagauccugcccgaccccagcaagcccagcaagcggagcuucaucgaggaccugcuguucaacaaggugacccuagccgacgccggcuucaucaagcaguacggcgacugccucggcgacauagccgcccgggaccugaucugcgcccagaaguucaacggccugaccgugcugccuccccugcugaccgacgagaugaucgcccaguacaccagcgcccuguuagccggaaccaucaccagcggcuggacuuucggcgcuggagccgcucugcagauccccuucgccaugcagauggccuaccgguucaacggcaucggcgugacccagaacgugcuguacgagaaccagaagcugaucgccaaccaguucaacagcgccaucggcaagauccaggacagccugagcagcaccgcuagcgcccugggcaagcugcaggacguggugaaccagaacgcccaggcccugaacacccuggugaagcagcugagcagcaacuucggcgccaucagcagcgugcugaacgacauccuggcccggcuggacccucccgaggccgaggugcagaucgaccggcugaucacuggccggcugcagagccugcagaccuacgugacccagcagcugauccgggccgccgagauucgggccagcgccaaccuggccgccaccaagaugagcgagugcgugcugggccagagcaagcggguggacuucugcggcaagggcuaccaccugaugagcuuuccccagagcgcaccccacggagugguguuccugcacgugaccuacgugcccgcccaggagaagaacuucaccaccgccccagccaucugccacgacggcaaggcccacuuuccccgggagggcguguucgugagcaacggcacccacugguucgugacccagcggaacuucuacgagccccagaucaucaccacccacaacaccuucgugagcggcaacugcgacguggugaucggcaucgugaacaacaccguguacgauccccugcagcccgagcuggacagcuucaaggaggagcuggacaaguacuucaagaaucacaccagccccgacguggaccugggcgacaucagcggcaucaacgccagcguggugaacauccagaaggagaucgaucggcugaacgagguggccaagaaccugaacgagagccugaucgaccugcaggagcugggcaaguacgagcaguacaucaaguggcccugguacaucuggcugggcuucaucgccggccugaucgccaucgugauggugaccaucaugcugugcugcaugaccagcugcugcagcugccugaagggcuguugcagcugcggcagcugcugcaaguucgacgaggacgacagcgagcccgugcugaagggcgugaagcugcacuacaccuga

SEQ ID NO: 23126 - RNA, 3822 nt, Artificial Sequence
  SARS-CoV-2/Wuhan/WIV05/2019__EPI_ISL_402128 spike protein CDS gc (1-1273)(K986P_V987P_K986P_V987P_K417N_E484K_N501Y_D614G)
auguucguguuccuggugcugcugccccuggugagcagccagugcgugaaccugaccacccggacccagcugccaccagccuacaccaacagcuucacccggggcgucuacuaccccgacaagguguuccggagcagcguccugcacagcacccaggaccuguuccugcccuucuucagcaacgugaccugguuccacgccauccacgugagcggcaccaacggcaccaagcgguucgacaaccccgugcugcccuucaacgacggcguguacuucgccagcaccgagaagagcaacaucauccggggcuggaucuucggcaccacccuggacagcaagacccagagccugcugaucgugaauaacgccaccaacguggugaucaaggugugcgaguuccaguucugcaacgaccccuuccugggcguguacuaccacaagaacaacaagagcuggauggagagcgaguuccggguguacagcagcgccaacaacugcaccuucgaguacgugagccagcccuuccugauggaccuggagggcaagcagggcaacuucaagaaccugcgggaguucguguucaagaacaucgacggcuacuucaagaucuacagcaagcacaccccaaucaaccuggugcgggaucugccccagggcuucucagcccuggagccccugguggaccugcccaucggcaucaacaucacccgguuccagacccugcuggcccugcaccggagcuaccugaccccaggcgacagcagcagcggguggacagcaggcgcggcugcuuacuacgugggcuaccugcagccccggaccuuccugcugaaguacaacgagaacggcaccaucaccgacgccguggacugcgcccuggacccucugagcgagaccaagugcacccugaagagcuucaccguggagaagggcaucuaccagaccagcaacuuccgggugcagcccaccgagagcaucgugcgguuccccaacaucaccaaccugugccccuucggcgagguguucaacgccacccgguucgccagcguguacgccuggaaccggaagcggaucagcaacugcguggccgacuacagcgugcuguacaacagcgccagcuucagcaccuucaagugcuacggcgugagccccaccaagcugaacgaccugugcuucaccaacguguacgccgacagcuucgugauccguggcgacgaggugcggcagaucgcacccggccagacaggcaacaucgccgacuacaacuacaagcugcccgacgacuucaccggcugcgugaucgccuggaacagcaacaaccucgacagcaaggugggcggcaacuacaacuaccuguaccggcuguuccggaagagcaaccugaagcccuucgagcgggacaucagcaccgagaucuaccaagccggcuccaccccuugcaacggcgugaagggcuucaacugcuacuucccucugcagagcuacggcuuccagcccaccuacggcgugggcuaccagcccuaccgggugguggugcugagcuucgagcugcugcacgccccagccaccguguguggccccaagaagagcaccaaccuggugaagaacaagugcgugaacuucaacuucaacggccuuaccggcaccggcgugcugaccgagagcaacaagaaauuccugcccuuucagcaguucggccgggacaucgccgacaccaccgacgcugugcgggauccccagacccuggagauccuggacaucaccccuugcagcuucggcggcgugagcgugaucaccccaggcaccaacaccagcaaccagguggccgugcuguaccagggcgugaacugcaccgaggugcccguggccauccacgccgaccagcugacacccaccuggcgggucuacagcaccggcagcaacguguuccagacccgggccgguugccugaucggcgccgagcacgugaacaacagcuacgagugcgacauccccaucggcgccggcaucugugccagcuaccagacccagaccaauucaccccggagggcaaggagcguggccagccagagcaucaucgccuacaccaugagccugggcgccgagaacagcguggccuacagcaacaacagcaucgccauccccaccaacuucaccaucagcgugaccaccgagauucugcccgugagcaugaccaagaccagcguggacugcaccauguacaucugcggcgacagcaccgagugcagcaaccugcugcugcaguacggcagcuucugcacccagcugaaccgggcccugaccggcaucgccguggagcaggacaagaacacccaggagguguucgcccaggugaagcagaucuacaagaccccucccaucaaggacuucggcggcuucaacuucagccagauccugcccgaccccagcaagcccagcaagcggagcuucaucgaggaccugcuguucaacaaggugacccuagccgacgccggcuucaucaagcaguacggcgacugccucggcgacauagccgcccgggaccugaucugcgcccagaaguucaacggccugaccgugcugccuccccugcugaccgacgagaugaucgcccaguacaccagcgcccuguuagccggaaccaucaccagcggcuggacuuucggcgcuggagccgcucugcagauccccuucgccaugcagauggccuaccgguucaacggcaucggcgugacccagaacgugcuguacgagaaccagaagcugaucgccaaccaguucaacagcgccaucggcaagauccaggacagccugagcagcaccgcuagcgcccugggcaagcugcaggacguggugaaccagaacgcccaggcccugaacacccuggugaagcagcugagcagcaacuucggcgccaucagcagcgugcugaacgacauccugagccggcuggacccucccgaggccgaggugcagaucgaccggcugaucacuggccggcugcagagccugcagaccuacgugacccagcagcugauccgggccgccgagauucgggccagcgccaaccuggccgccaccaagaugagcgagugcgugcugggccagagcaagcggguggacuucugcggcaagggcuaccaccugaugagcuuuccccagagcgcaccccacggagugguguuccugcacgugaccuacgugcccgcccaggagaagaacuucaccaccgccccagccaucugccacgacggcaaggcccacuuuccccgggagggcguguucgugagcaacggcacccacugguucgugacccagcggaacuucuacgagccccagaucaucaccaccgacaacaccuucgugagcggcaacugcgacguggugaucggcaucgugaacaacaccguguacgauccccugcagcccgagcuggacagcuucaaggaggagcuggacaaguacuucaagaaucacaccagccccgacguggaccugggcgacaucagcggcaucaacgccagcguggugaacauccagaaggagaucgaucggcugaacgagguggccaagaaccugaacgagagccugaucgaccugcaggagcugggcaaguacgagcaguacaucaaguggcccugguacaucuggcugggcuucaucgccggccugaucgccaucgugauggugaccaucaugcugugcugcaugaccagcugcugcagcugccugaagggcuguugcagcugcggcagcugcugcaaguucgacgaggacgacagcgagcccgugcugaagggcgugaagcugcacuacaccuga

SEQ ID NO: 23127 - RNA, 3813 nt, Artificial Sequence
  SARS-CoV-2/Wuhan/WIV05/2019__EPI_ISL_402128 spike protein CDS gc (1-1273)(K986P_V987P_K986P_V987P_L18F_D80A_D215G_L242del_A243del_ L244del_R246I_K417N_E484K_N501Y_D614G_A701V)
auguucguguuccuggugcugcugccccuggugagcagccagugcgugaacuucaccacccggacccagcugccaccagccuacaccaacagcuucacccggggcgucuacuaccccgacaagguguuccggagcagcguccugcacagcacccaggaccuguuccugcccuucuucagcaacgugaccugguuccacgccauccacgugagcggcaccaacggcaccaagcgguucgccaaccccgugcugcccuucaacgacggcguguacuucgccagcaccgagaagagcaacaucauccggggcuggaucuucggcaccacccuggacagcaagacccagagccugcugaucgugaauaacgccaccaacguggugaucaaggugugcgaguuccaguucugcaacgaccccuuccugggcguguacuaccacaagaacaacaagagcuggauggagagcgaguuccggguguacagcagcgccaacaacugcaccuucgaguacgugagccagcccuuccugauggaccuggagggcaagcagggcaacuucaagaaccugcgggaguucguguucaagaacaucgacggcuacuucaagaucuacagcaagcacaccccaaucaaccuggugcggggccugccccagggcuucucagcccuggagccccugguggaccugcccaucggcaucaacaucacccgguuccagacccugcacaucagcuaccugaccccaggcgacagcagcagcggguggacagcaggcgcggcugcuuacuacgugggcuaccugcagccccggaccuuccugcugaaguacaacgagaacggcaccaucaccgacgccguggacugcgcccuggacccucugagcgagaccaagugcacccugaagagcuucaccguggagaagggcaucuaccagaccagcaacuuccgggugcagcccaccgagagcaucgugcgguuccccaacaucaccaaccugugccccuucggcgagguguucaacgccacccgguucgccagcguguacgccuggaaccggaagcggaucagcaacugcguggccgacuacagcgugcuguacaacagcgccagcuucagcaccuucaagugcuacggcgugagccccaccaagcugaacgaccugugcuucaccaacguguacgccgacagcuucgugauccguggcgacgaggugcggcagaucgcacccggccagacaggcaacaucgccgacuacaacuacaagcugcccgacgacuucaccggcugcgugaucgccuggaacagcaacaaccucgacagcaaggugggcggcaacuacaacuaccuguaccggcuguuccggaagagcaaccugaagcccuucgagcgggacaucagcaccgagaucuaccaagccggcuccaccccuugcaacggcgugaagggcuucaacugcuacuucccucugcagagcuacggcuuccagcccaccuacggcgugggcuaccagcccuaccgggugguggugcugagcuucgagcugcugcacgccccagccaccguguguggccccaagaagagcaccaaccuggugaagaacaagugcgugaacuucaacuucaacggccuuaccggcaccggcgugcugaccgagagcaacaagaaauuccugcccuuucagcaguucggccgggacaucgccgacaccaccgacgcugugcgggauccccagacccuggagauccuggacaucaccccuugcagcuucggcggcgugagcgugaucaccccaggcaccaacaccagcaaccagguggccgugcuguaccagggcgugaacugcaccgaggugcccguggccauccacgccgaccagcugacacccaccuggcgggucuacagcaccggcagcaacguguuccagacccgggccgguugccugaucggcgccgagcacgugaacaacagcuacgagugcgacauccccaucggcgccggcaucugugccagcuaccagacccagaccaauucaccccggagggcaaggagcguggccagccagagcaucaucgccuacaccaugagccugggcguggagaacagcguggccuacagcaacaacagcaucgccauccccaccaacuucaccaucagcgugaccaccgagauucugcccgugagcaugaccaagaccagcguggacugcaccauguacaucugcggcgacagcaccgagugcagcaaccugcugcugcaguacggcagcuucugcacccagcugaaccgggcccugaccggcaucgccguggagcaggacaagaacacccaggagguguucgcccaggugaagcagaucuacaagaccccucccaucaaggacuucggcggcuucaacuucagccagauccugcccgaccccagcaagcccagcaagcggagcuucaucgaggaccugcuguucaacaaggugacccuagccgacgccggcuucaucaagcaguacggcgacugccucggcgacauagccgcccgggaccugaucugcgcccagaaguucaacggccugaccgugcugccuccccugcugaccgacgagaugaucgcccaguacaccagcgcccuguuagccggaaccaucaccagcggcuggacuuucggcgcuggagccgcucugcagauccccuucgccaugcagauggccuaccgguucaacggcaucggcgugacccagaacgugcuguacgagaaccagaagcugaucgccaaccaguucaacagcgccaucggcaagauccaggacagccugagcagcaccgcuagcgcccugggcaagcugcaggacguggugaaccagaacgcccaggcccugaacacccuggugaagcagcugagcagcaacuucggcgccaucagcagcgugcugaacgacauccugagccggcuggacccucccgaggccgaggugcagaucgaccggcugaucacuggccggcugcagagccugcagaccuacgugacccagcagcugauccgggccgccgagauucgggccagcgccaaccuggccgccaccaagaugagcgagugcgugcugggccagagcaagcggguggacuucugcggcaagggcuaccaccugaugagcuuuccccagagcgcaccccacggagugguguuccugcacgugaccuacgugcccgcccaggagaagaacuucaccaccgccccagccaucugccacgacggcaaggcccacuuuccccgggagggcguguucgugagcaacggcacccacugguucgugacccagcggaacuucuacgagccccagaucaucaccaccgacaacaccuucgugagcggcaacugcgacguggugaucggcaucgugaacaacaccguguacgauccccugcagcccgagcuggacagcuucaaggaggagcuggacaaguacuucaagaaucacaccagccccgacguggaccugggcgacaucagcggcaucaacgccagcguggugaacauccagaaggagaucgaucggcugaacgagguggccaagaaccugaacgagagccugaucgaccugcaggagcugggcaaguacgagcaguacaucaaguggcccugguacaucuggcugggcuucaucgccggccugaucgccaucgugauggugaccaucaugcugugcugcaugaccagcugcugcagcugccugaagggcuguugcagcugcggcagcugcugcaaguucgacgaggacgacagcgagcccgugcugaagggcgugaagcugcacuacaccuga

SEQ ID NO: 23128 - RNA, 3822 nt, Artificial Sequence
  SARS-CoV-2/Wuhan/WIV05/2019__EPI_ISL_402128 spike protein CDS gc (1-1273)(K986P_V987P_K986P_V987P_E484K_D614G)
auguucguguuccuggugcugcugccccuggugagcagccagugcgugaaccugaccacccggacccagcugccaccagccuacaccaacagcuucacccggggcgucuacuaccccgacaagguguuccggagcagcguccugcacagcacccaggaccuguuccugcccuucuucagcaacgugaccugguuccacgccauccacgugagcggcaccaacggcaccaagcgguucgacaaccccgugcugcccuucaacgacggcguguacuucgccagcaccgagaagagcaacaucauccggggcuggaucuucggcaccacccuggacagcaagacccagagccugcugaucgugaauaacgccaccaacguggugaucaaggugugcgaguuccaguucugcaacgaccccuuccugggcguguacuaccacaagaacaacaagagcuggauggagagcgaguuccggguguacagcagcgccaacaacugcaccuucgaguacgugagccagcccuuccugauggaccuggagggcaagcagggcaacuucaagaaccugcgggaguucguguucaagaacaucgacggcuacuucaagaucuacagcaagcacaccccaaucaaccuggugcgggaucugccccagggcuucucagcccuggagccccugguggaccugcccaucggcaucaacaucacccgguuccagacccugcuggcccugcaccggagcuaccugaccccaggcgacagcagcagcggguggacagcaggcgcggcugcuuacuacgugggcuaccugcagccccggaccuuccugcugaaguacaacgagaacggcaccaucaccgacgccguggacugcgcccuggacccucugagcgagaccaagugcacccugaagagcuucaccguggagaagggcaucuaccagaccagcaacuuccgggugcagcccaccgagagcaucgugcgguuccccaacaucaccaaccugugccccuucggcgagguguucaacgccacccgguucgccagcguguacgccuggaaccggaagcggaucagcaacugcguggccgacuacagcgugcuguacaacagcgccagcuucagcaccuucaagugcuacggcgugagccccaccaagcugaacgaccugugcuucaccaacguguacgccgacagcuucgugauccguggcgacgaggugcggcagaucgcacccggccagacaggcaagaucgccgacuacaacuacaagcugcccgacgacuucaccggcugcgugaucgccuggaacagcaacaaccucgacagcaaggugggcggcaacuacaacuaccuguaccggcuguuccggaagagcaaccugaagcccuucgagcgggacaucagcaccgagaucuaccaagccggcuccaccccuugcaacggcgugaagggcuucaacugcuacuucccucugcagagcuacggcuuccagcccaccaacggcgugggcuaccagcccuaccgggugguggugcugagcuucgagcugcugcacgccccagccaccguguguggccccaagaagagcaccaaccuggugaagaacaagugcgugaacuucaacuucaacggccuuaccggcaccggcgugcugaccgagagcaacaagaaauuccugcccuuucagcaguucggccgggacaucgccgacaccaccgacgcugugcgggauccccagacccuggagauccuggacaucaccccuugcagcuucggcggcgugagcgugaucaccccaggcaccaacaccagcaaccagguggccgugcuguaccagggcgugaacugcaccgaggugcccguggccauccacgccgaccagcugacacccaccuggcgggucuacagcaccggcagcaacguguuccagacccgggccgguugccugaucggcgccgagcacgugaacaacagcuacgagugcgacauccccaucggcgccggcaucugugccagcuaccagacccagaccaauucaccccggagggcaaggagcguggccagccagagcaucaucgccuacaccaugagccugggcgccgagaacagcguggccuacagcaacaacagcaucgccauccccaccaacuucaccaucagcgugaccaccgagauucugcccgugagcaugaccaagaccagcguggacugcaccauguacaucugcggcgacagcaccgagugcagcaaccugcugcugcaguacggcagcuucugcacccagcugaaccgggcccugaccggcaucgccguggagcaggacaagaacacccaggagguguucgcccaggugaagcagaucuacaagaccccucccaucaaggacuucggcggcuucaacuucagccagauccugcccgaccccagcaagcccagcaagcggagcuucaucgaggaccugcuguucaacaaggugacccuagccgacgccggcuucaucaagcaguacggcgacugccucggcgacauagccgcccgggaccugaucugcgcccagaaguucaacggccugaccgugcugccuccccugcugaccgacgagaugaucgcccaguacaccagcgcccuguuagccggaaccaucaccagcggcuggacuuucggcgcuggagccgcucugcagauccccuucgccaugcagauggccuaccgguucaacggcaucggcgugacccagaacgugcuguacgagaaccagaagcugaucgccaaccaguucaacagcgccaucggcaagauccaggacagccugagcagcaccgcuagcgcccugggcaagcugcaggacguggugaaccagaacgcccaggcccugaacacccuggugaagcagcugagcagcaacuucggcgccaucagcagcgugcugaacgacauccugagccggcuggacccucccgaggccgaggugcagaucgaccggcugaucacuggccggcugcagagccugcagaccuacgugacccagcagcugauccgggccgccgagauucgggccagcgccaaccuggccgccaccaagaugagcgagugcgugcugggccagagcaagcggguggacuucugcggcaagggcuaccaccugaugagcuuuccccagagcgcaccccacggagugguguuccugcacgugaccuacgugcccgcccaggagaagaacuucaccaccgccccagccaucugccacgacggcaaggcccacuuuccccgggagggcguguucgugagcaacggcacccacugguucgugacccagcggaacuucuacgagccccagaucaucaccaccgacaacaccuucgugagcggcaacugcgacguggugaucggcaucgugaacaacaccguguacgauccccugcagcccgagcuggacagcuucaaggaggagcuggacaaguacuucaagaaucacaccagccccgacguggaccugggcgacaucagcggcaucaacgccagcguggugaacauccagaaggagaucgaucggcugaacgagguggccaagaaccugaacgagagccugaucgaccugcaggagcugggcaaguacgagcaguacaucaaguggcccugguacaucuggcugggcuucaucgccggccugaucgccaucgugauggugaccaucaugcugugcugcaugaccagcugcugcagcugccugaagggcuguugcagcugcggcagcugcugcaaguucgacgaggacgacagcgagcccgugcugaagggcgugaagcugcacuacaccuga

SEQ ID NO: 23129 - RNA, 3822 nt, Artificial Sequence
  SARS-CoV-2/Wuhan/WIV05/2019__EPI_ISL_402128 spike protein CDS gc (1-1273)(K986P_V987P_K986P_V987P_L18F_T20N_P26S_D138Y_R190S_K417T _E484K_N501Y_D614G_H655Y_T1027I)
auguucguguuccuggugcugcugccccuggugagcagccagugcgugaacuucaccaaccggacccagcugccaagcgccuacaccaacagcuucacccggggcgucuacuaccccgacaagguguuccggagcagcguccugcacagcacccaggaccuguuccugcccuucuucagcaacgugaccugguuccacgccauccacgugagcggcaccaacggcaccaagcgguucgacaaccccgugcugcccuucaacgacggcguguacuucgccagcaccgagaagagcaacaucauccggggcuggaucuucggcaccacccuggacagcaagacccagagccugcugaucgugaauaacgccaccaacguggugaucaaggugugcgaguuccaguucugcaacuaccccuuccugggcguguacuaccacaagaacaacaagagcuggauggagagcgaguuccggguguacagcagcgccaacaacugcaccuucgaguacgugagccagcccuuccugauggaccuggagggcaagcagggcaacuucaagaaccugagcgaguucguguucaagaacaucgacggcuacuucaagaucuacagcaagcacaccccaaucaaccuggugcgggaucugccccagggcuucucagcccuggagccccugguggaccugcccaucggcaucaacaucacccgguuccagacccugcuggcccugcaccggagcuaccugaccccaggcgacagcagcagcggguggacagcaggcgcggcugcuuacuacgugggcuaccugcagccccggaccuuccugcugaaguacaacgagaacggcaccaucaccgacgccguggacugcgcccuggacccucugagcgagaccaagugcacccugaagagcuucaccguggagaagggcaucuaccagaccagcaacuuccgggugcagcccaccgagagcaucgugcgguuccccaacaucaccaaccugugccccuucggcgagguguucaacgccacccgguucgccagcguguacgccuggaaccggaagcggaucagcaacugcguggccgacuacagcgugcuguacaacagcgccagcuucagcaccuucaagugcuacggcgugagccccaccaagcugaacgaccugugcuucaccaacguguacgccgacagcuucgugauccguggcgacgaggugcggcagaucgcacccggccagacaggcaccaucgccgacuacaacuacaagcugcccgacgacuucaccggcugcgugaucgccuggaacagcaacaaccucgacagcaaggugggcggcaacuacaacuaccuguaccggcuguuccggaagagcaaccugaagcccuucgagcgggacaucagcaccgagaucuaccaagccggcuccaccccuugcaacggcgugaagggcuucaacugcuacuucccucugcagagcuacggcuuccagcccaccuacggcgugggcuaccagcccuaccgggugguggugcugagcuucgagcugcugcacgccccagccaccguguguggccccaagaagagcaccaaccuggugaagaacaagugcgugaacuucaacuucaacggccuuaccggcaccggcgugcugaccgagagcaacaagaaauuccugcccuuucagcaguucggccgggacaucgccgacaccaccgacgcugugcgggauccccagacccuggagauccuggacaucaccccuugcagcuucggcggcgugagcgugaucaccccaggcaccaacaccagcaaccagguggccgugcuguaccagggcgugaacugcaccgaggugcccguggccauccacgccgaccagcugacacccaccuggcgggucuacagcaccggcagcaacguguuccagacccgggccgguugccugaucggcgccgaguacgugaacaacagcuacgagugcgacauccccaucggcgccggcaucugugccagcuaccagacccagaccaauucaccccggagggcaaggagcguggccagccagagcaucaucgccuacaccaugagccugggcgccgagaacagcguggccuacagcaacaacagcaucgccauccccaccaacuucaccaucagcgugaccaccgagauucugcccgugagcaugaccaagaccagcguggacugcaccauguacaucugcggcgacagcaccgagugcagcaaccugcugcugcaguacggcagcuucugcacccagcugaaccgggcccugaccggcaucgccguggagcaggacaagaacacccaggagguguucgcccaggugaagcagaucuacaagaccccucccaucaaggacuucggcggcuucaacuucagccagauccugcccgaccccagcaagcccagcaagcggagcuucaucgaggaccugcuguucaacaaggugacccuagccgacgccggcuucaucaagcaguacggcgacugccucggcgacauagccgcccgggaccugaucugcgcccagaaguucaacggccugaccgugcugccuccccugcugaccgacgagaugaucgcccaguacaccagcgcccuguuagccggaaccaucaccagcggcuggacuuucggcgcuggagccgcucugcagauccccuucgccaugcagauggccuaccgguucaacggcaucggcgugacccagaacgugcuguacgagaaccagaagcugaucgccaaccaguucaacagcgccaucggcaagauccaggacagccugagcagcaccgcuagcgcccugggcaagcugcaggacguggugaaccagaacgcccaggcccugaacacccuggugaagcagcugagcagcaacuucggcgccaucagcagcgugcugaacgacauccugagccggcuggacccucccgaggccgaggugcagaucgaccggcugaucacuggccggcugcagagccugcagaccuacgugacccagcagcugauccgggccgccgagauucgggccagcgccaaccuggccgccaucaagaugagcgagugcgugcugggccagagcaagcggguggacuucugcggcaagggcuaccaccugaugagcuuuccccagagcgcaccccacggagugguguuccugcacgugaccuacgugcccgcccaggagaagaacuucaccaccgccccagccaucugccacgacggcaaggcccacuuuccccgggagggcguguucgugagcaacggcacccacugguucgugacccagcggaacuucuacgagccccagaucaucaccaccgacaacaccuucgugagcggcaacugcgacguggugaucggcaucgugaacaacaccguguacgauccccugcagcccgagcuggacagcuucaaggaggagcuggacaaguacuucaagaaucacaccagccccgacguggaccugggcgacaucagcggcaucaacgccagcguggugaacauccagaaggagaucgaucggcugaacgagguggccaagaaccugaacgagagccugaucgaccugcaggagcugggcaaguacgagcaguacaucaaguggcccugguacaucuggcugggcuucaucgccggccugaucgccaucgugauggugaccaucaugcugugcugcaugaccagcugcugcagcugccugaagggcuguugcagcugcggcagcugcugcaaguucgacgaggacgacagcgagcccgugcugaagggcgugaagcugcacuacaccuga

SEQ ID NO: 23130 - RNA, 3822 nt, Artificial Sequence
  SARS-CoV-2/Wuhan/WIV05/2019__EPI_ISL_402128 spike protein CDS gc (1-1273)(K986P_V987P_K986P_V987P_S13I_W152C_L452R_D614G)
auguucguguuccuggugcugcugccccuggugagcauccagugcgugaaccugaccacccggacccagcugccaccagccuacaccaacagcuucacccggggcgucuacuaccccgacaagguguuccggagcagcguccugcacagcacccaggaccuguuccugcccuucuucagcaacgugaccugguuccacgccauccacgugagcggcaccaacggcaccaagcgguucgacaaccccgugcugcccuucaacgacggcguguacuucgccagcaccgagaagagcaacaucauccggggcuggaucuucggcaccacccuggacagcaagacccagagccugcugaucgugaauaacgccaccaacguggugaucaaggugugcgaguuccaguucugcaacgaccccuuccugggcguguacuaccacaagaacaacaagagcugcauggagagcgaguuccggguguacagcagcgccaacaacugcaccuucgaguacgugagccagcccuuccugauggaccuggagggcaagcagggcaacuucaagaaccugcgggaguucguguucaagaacaucgacggcuacuucaagaucuacagcaagcacaccccaaucaaccuggugcgggaucugccccagggcuucucagcccuggagccccugguggaccugcccaucggcaucaacaucacccgguuccagacccugcuggcccugcaccggagcuaccugaccccaggcgacagcagcagcggguggacagcaggcgcggcugcuuacuacgugggcuaccugcagccccggaccuuccugcugaaguacaacgagaacggcaccaucaccgacgccguggacugcgcccuggacccucugagcgagaccaagugcacccugaagagcuucaccguggagaagggcaucuaccagaccagcaacuuccgggugcagcccaccgagagcaucgugcgguuccccaacaucaccaaccugugccccuucggcgagguguucaacgccacccgguucgccagcguguacgccuggaaccggaagcggaucagcaacugcguggccgacuacagcgugcuguacaacagcgccagcuucagcaccuucaagugcuacggcgugagccccaccaagcugaacgaccugugcuucaccaacguguacgccgacagcuucgugauccguggcgacgaggugcggcagaucgcacccggccagacaggcaagaucgccgacuacaacuacaagcugcccgacgacuucaccggcugcgugaucgccuggaacagcaacaaccucgacagcaaggugggcggcaacuacaacuaccgcuaccggcuguuccggaagagcaaccugaagcccuucgagcgggacaucagcaccgagaucuaccaagccggcuccaccccuugcaacggcguggagggcuucaacugcuacuucccucugcagagcuacggcuuccagcccaccaacggcgugggcuaccagcccuaccgggugguggugcugagcuucgagcugcugcacgccccagccaccguguguggccccaagaagagcaccaaccuggugaagaacaagugcgugaacuucaacuucaacggccuuaccggcaccggcgugcugaccgagagcaacaagaaauuccugcccuuucagcaguucggccgggacaucgccgacaccaccgacgcugugcgggauccccagacccuggagauccuggacaucaccccuugcagcuucggcggcgugagcgugaucaccccaggcaccaacaccagcaaccagguggccgugcuguaccagggcgugaacugcaccgaggugcccguggccauccacgccgaccagcugacacccaccuggcgggucuacagcaccggcagcaacguguuccagacccgggccgguugccugaucggcgccgagcacgugaacaacagcuacgagugcgacauccccaucggcgccggcaucugugccagcuaccagacccagaccaauucaccccggagggcaaggagcguggccagccagagcaucaucgccuacaccaugagccugggcgccgagaacagcguggccuacagcaacaacagcaucgccauccccaccaacuucaccaucagcgugaccaccgagauucugcccgugagcaugaccaagaccagcguggacugcaccauguacaucugcggcgacagcaccgagugcagcaaccugcugcugcaguacggcagcuucugcacccagcugaaccgggcccugaccggcaucgccguggagcaggacaagaacacccaggagguguucgcccaggugaagcagaucuacaagaccccucccaucaaggacuucggcggcuucaacuucagccagauccugcccgaccccagcaagcccagcaagcggagcuucaucgaggaccugcuguucaacaaggugacccuagccgacgccggcuucaucaagcaguacggcgacugccucggcgacauagccgcccgggaccugaucugcgcccagaaguucaacggccugaccgugcugccuccccugcugaccgacgagaugaucgcccaguacaccagcgcccuguuagccggaaccaucaccagcggcuggacuuucggcgcuggagccgcucugcagauccccuucgccaugcagauggccuaccgguucaacggcaucggcgugacccagaacgugcuguacgagaaccagaagcugaucgccaaccaguucaacagcgccaucggcaagauccaggacagccugagcagcaccgcuagcgcccugggcaagcugcaggacguggugaaccagaacgcccaggcccugaacacccuggugaagcagcugagcagcaacuucggcgccaucagcagcgugcugaacgacauccugagccggcuggacccucccgaggccgaggugcagaucgaccggcugaucacuggccggcugcagagccugcagaccuacgugacccagcagcugauccgggccgccgagauucgggccagcgccaaccuggccgccaccaagaugagcgagugcgugcugggccagagcaagcggguggacuucugcggcaagggcuaccaccugaugagcuuuccccagagcgcaccccacggagugguguuccugcacgugaccuacgugcccgcccaggagaagaacuucaccaccgccccagccaucugccacgacggcaaggcccacuuuccccgggagggcguguucgugagcaacggcacccacugguucgugacccagcggaacuucuacgagccccagaucaucaccaccgacaacaccuucgugagcggcaacugcgacguggugaucggcaucgugaacaacaccguguacgauccccugcagcccgagcuggacagcuucaaggaggagcuggacaaguacuucaagaaucacaccagccccgacguggaccugggcgacaucagcggcaucaacgccagcguggugaacauccagaaggagaucgaucggcugaacgagguggccaagaaccugaacgagagccugaucgaccugcaggagcugggcaaguacgagcaguacaucaaguggcccugguacaucuggcugggcuucaucgccggccugaucgccaucgugauggugaccaucaugcugugcugcaugaccagcugcugcagcugccugaagggcuguugcagcugcggcagcugcugcaaguucgacgaggacgacagcgagcccgugcugaagggcgugaagcugcacuacaccuga

SEQ ID NO: 23131 - RNA, 3822 nt, Artificial Sequence
  SARS-CoV-2/Wuhan/WIV05/2019__EPI_ISL_402128 spike protein CDS gc (1-1273)(K986P_V987P)
auguucguguuccuggugcugcugccccuggugagcagccagugcgugaaccugaccacccggacccagcugcccccugccuacaccaacagcuucacccggggcguguacuaccccgacaagguguuccggagcagcgugcugcacagcacccaggaccuguuccugcccuucuucagcaacgugaccugguuccacgccauccacgugagcggcaccaacggcaccaagcgguucgacaacccagugcugcccuucaacgacggcguguacuucgccagcaccgagaagucaaacaucauccggggcuggaucuucggcaccacccuggacagcaagacacagagccugcugaucgugaacaacgccaccaacguggugaucaaggugugcgaguuucaguucugcaacgaccccuuccugggcguguacuaccacaagaacaacaagagcuggauggagagcgaguuccgggucuacagcagcgcuaacaauugcaccuucgaguacgugagccagcccuuccugauggaccucgagggcaagcagggcaacuucaagaaccugcgggaguucguguucaagaacaucgauggcuacuucaagaucuacagcaagcacacccccaucaaccuggugcgggaccugccccagggauucagcgcccuggagccucugguggaccugcccaucggcaucaacaucaccagguuccagacccugcuggcccugcaccggagcuaccugacccccggcgacagcagcagcggcuggaccgccggcgccgccgcauacuacgugggcuaccugcagccacggaccuuccugcugaaguacaacgagaacggcaccaucaccgacgccguggacugcgcccuggacccccugagcgagaccaagugcacccuaaagagcuucaccguggagaagggcaucuaccagaccagcaacuuccgggugcagcccacugagagcaucgugcgguuccccaacauuaccaaccugugucccuucggcgagguguucaacgccacccgguucgccagcguguacgccuggaaccggaagcggaucagcaacugcguggccgacuacagcgugcuguacaacagcgccagcuucagcaccuucaagugcuacggcgugagcccuaccaagcugaacgaccugugcuucaccaacguguacgcugacagcuucgugauccggggcgacgaggugcggcagaucgcccccggccagaccggcaagaucgccgacuacaacuacaagcugcccgacgacuucaccggcugcgugaucgccuggaacagcaacaaccuggacagcaaggugggcggcaacuacaacuaccuguaccggcuguuccguaagagcaaccugaagccauucgagcgggacaucagcaccgagaucuaccaggccggcagcacccccugcaacgguguggagggcuuuaacugcuacuucccccugcagagcuacggcuuccagcccaccaacggcgugggcuaccagcccuaccgggugguggugcugagcuucgagcugcugcacgcccccgccaccgugugcggcccuaaaaagagcaccaaccuggugaagaacaagugcgugaacuucaauuucaacggccugaccggcaccggcgugcugaccgagagcaacaagaaguuccugcccuuccagcaguucggccgggauaucgccgacaccaccgacgcagugcgggacccccagacccuggagauccuggacaucaccccaugcagcuucggcggcgugagcgucaucacccccggcacaaacaccagcaaccagguggccgugcuguaccaggacgugaacugcaccgaggugcccguggccauccacgccgaccagcugacccccaccuggcggguguacagcaccggaagcaacguguuccagacccgggccggcugccugaucggcgccgagcacgugaacaacuccuacgagugcgacauccccaucggcgcuggcaucugcgccagcuaccagacccagaccaacagcccccggcgggcccggagcguggccagccagagcaucaucgccuacaccaugagcuuaggcgccgagaacagcguggccuacagcaacaacagcaucgcgaucccuaccaacuucaccaucagcgugaccaccgagauacugcccgugagcaugaccaagaccagcguggacuguaccauguacaucugcggcgacagcaccgagugcagcaaccugcugcugcaguacggcagcuucugcacccagcugaaccgggcccugaccggcaucgccguggagcaggacaagaacacccaagagguguucgcccaggugaagcagaucuacaagacucccccaaucaaggacuucggcggcuucaacuucagccagauccugcccgaccccagcaagcccagcaagcggagcuucaucgaggaccugcuguucaacaaggugacccuggccgacgccggcuucaucaagcaguacggcgauugccugggcgacaucgccgcucgggaccugaucugcgcccagaaguucaacgggcugaccgugcugcccccucugcugaccgacgagaugaucgcccaguacaccagcgcccugcuugccggcaccaucaccagcggcuggaccuucggcgccggcgcagcccugcagauccccuucgccaugcagauggccuaccgguucaacggcaucggcgugacccagaacgugcuguacgagaaccagaagcugaucgccaaccaguucaacagcgccaucggcaagauccaggacagccugagcagcaccgccagcgcccugggcaagcugcaggacguggugaaccagaacgcucaggcccugaacacccuggugaagcagcugagcagcaacuucggcgccaucagcucagugcugaaugacauccugagcaggcuggaucccccagaggccgaggugcagaucgaccggcugaucaccggccggcugcagagccugcagaccuacgugacccagcagcugauccgggccgccgagauccgggccagcgccaaccuggcagccaccaagaugagcgagugcgugcugggccagagcaagcggguggacuuuugcggcaagggcuaccaccugaugagcuucccccagagcgcuccccacggcgugguguuccuccacgugacauacguccccgcccaggagaagaacuucaccaccgcccccgccauuugccacgacggcaaggcccacuucccccgggagggcguguucgugagcaacggaacccacugguucgugacccagcggaacuucuacgagccucagaucaucaccaccgacaacaccuucgugagcggcaacugcgacguggugaucggcaucgugaacaacaccguguacgacccccugcagcccgagcuggacagcuucaaggaggagcuggacaaguacuucaagaaccacaccagcccagacguggaccugggcgacaucagcggcaucaacgccagcguggugaacauccagaaggagaucgaccggcugaacgagguggccaagaaccugaacgagagccugaucgaccugcaggagcugggcaaguacgagcaguacaucaaguggcccugguacaucuggcugggcuucaucgccggccugaucgccaucgugauggugaccaucaugcugugcugcaugaccagcugcuguagcugccugaagggcugcugcagcugcggcagcugcugcaaguucgacgaggacgacagcgagcccgugcugaagggcgugaagcugcacuacaccuga

SEQ ID NO: 23132 - RNA, 3822 nt, Artificial Sequence
  SARS-CoV-2/Wuhan/WIV05/2019__EPI_ISL_402128 spike protein CDS gc (1-1273)(K986P_V987P_ D614G)
auguucguguuccuggugcugcugccccuggugagcagccagugcgugaaccugaccacccggacccagcugcccccugccuacaccaacagcuucacccggggcguguacuaccccgacaagguguuccggagcagcgugcugcacagcacccaggaccuguuccugcccuucuucagcaacgugaccugguuccacgccauccacgugagcggcaccaacggcaccaagcgguucgacaacccagugcugcccuucaacgacggcguguacuucgccagcaccgagaagucaaacaucauccggggcuggaucuucggcaccacccuggacagcaagacacagagccugcugaucgugaacaacgccaccaacguggugaucaaggugugcgaguuucaguucugcaacgaccccuuccugggcguguacuaccacaagaacaacaagagcuggauggagagcgaguuccgggucuacagcagcgcuaacaauugcaccuucgaguacgugagccagcccuuccugauggaccucgagggcaagcagggcaacuucaagaaccugcgggaguucguguucaagaacaucgauggcuacuucaagaucuacagcaagcacacccccaucaaccuggugcgggaccugccccagggauucagcgcccuggagccucugguggaccugcccaucggcaucaacaucaccagguuccagacccugcuggcccugcaccggagcuaccugacccccggcgacagcagcagcggcuggaccgccggcgccgccgcauacuacgugggcuaccugcagccacggaccuuccugcugaaguacaacgagaacggcaccaucaccgacgccguggacugcgcccuggacccccugagcgagaccaagugcacccuaaagagcuucaccguggagaagggcaucuaccagaccagcaacuuccgggugcagcccacugagagcaucgugcgguuccccaacauuaccaaccugugucccuucggcgagguguucaacgccacccgguucgccagcguguacgccuggaaccggaagcggaucagcaacugcguggccgacuacagcgugcuguacaacagcgccagcuucagcaccuucaagugcuacggcgugagcccuaccaagcugaacgaccugugcuucaccaacguguacgcugacagcuucgugauccggggcgacgaggugcggcagaucgcccccggccagaccggcaagaucgccgacuacaacuacaagcugcccgacgacuucaccggcugcgugaucgccuggaacagcaacaaccuggacagcaaggugggcggcaacuacaacuaccuguaccggcuguuccguaagagcaaccugaagccauucgagcgggacaucagcaccgagaucuaccaggccggcagcacccccugcaacgguguggagggcuuuaacugcuacuucccccugcagagcuacggcuuccagcccaccaacggcgugggcuaccagcccuaccgggugguggugcugagcuucgagcugcugcacgcccccgccaccgugugcggcccuaaaaagagcaccaaccuggugaagaacaagugcgugaacuucaauuucaacggccugaccggcaccggcgugcugaccgagagcaacaagaaguuccugcccuuccagcaguucggccgggauaucgccgacaccaccgacgcagugcgggacccccagacccuggagauccuggacaucaccccaugcagcuucggcggcgugagcgucaucacccccggcacaaacaccagcaaccagguggccgugcuguaccagggagugaacugcaccgaggugcccguggccauccacgccgaccagcugacccccaccuggcggguguacagcaccggcagcaacguguuccagacccgggccggcugccugaucggcgccgagcacgugaacaacuccuacgagugcgacauccccaucggcgcuggcaucugcgccagcuaccagacccagaccaacagcccccggcgggcccggagcguggccagccagagcaucaucgccuacaccaugagcuuaggcgccgagaacagcguggccuacagcaacaacagcaucgcgaucccuaccaacuucaccaucagcgugaccaccgagauacugcccgugagcaugaccaagaccagcguggacuguaccauguacaucugcggcgacagcaccgagugcagcaaccugcugcugcaguacggcagcuucugcacccagcugaaccgggcccugaccggcaucgccguggagcaggacaagaacacccaagagguguucgcccaggugaagcagaucuacaagacucccccaaucaaggacuucggcggcuucaacuucagccagauccugcccgaccccagcaagcccagcaagcggagcuucaucgaggaccugcuguucaacaaggugacccuggccgacgccggcuucaucaagcaguacggcgacugccugggggauaucgccgcucgggaccugaucugcgcccagaaguucaacggccugaccgugcugcccccucugcugaccgacgagaugaucgcccaguacaccagcgcccugcuugccggcaccaucaccagcggcuggaccuucggcgccggcgcagcccugcagauccccuucgccaugcagauggccuaccgguucaacggcaucggcgugacccagaacgugcuguacgagaaccagaagcugaucgccaaccaguucaacagcgccaucggcaagauccaggacagccugagcagcaccgccagcgcccugggcaagcugcaggacguggugaaccagaacgcucaggcccugaacacccuggugaagcagcugagcagcaacuucggcgccaucagcucagugcugaaugacauccugagcaggcuggaucccccagaggccgaggugcagaucgaccggcugaucaccggccggcugcagagccugcagaccuacgugacccagcagcugauccgggccgccgagauccgggccagcgccaaccuggcagccaccaagaugagcgagugcgugcugggccagagcaagcggguggacuuuugcggcaagggcuaccaccugaugagcuucccccagagcgcuccccacggcgugguguuccuccacgugacauacguccccgcccaggagaagaacuucaccaccgcccccgccauuugccacgacggcaaggcccacuucccccgggagggaguguucgugagcaacggcacccacugguucgugacccagcggaacuucuacgagccucagaucaucaccaccgacaacaccuucgugagcggcaacugcgacguggugaucggcaucgugaacaacaccguguacgacccccugcagcccgagcuggacagcuucaaggaggagcuggacaaguacuucaagaaccacaccagcccagacguggaccugggcgacaucagcggcaucaacgccagcguggugaacauccagaaggagaucgaccggcugaacgagguggccaagaaccugaacgagagccugaucgaccugcaggagcugggcaaguacgagcaguacaucaaguggcccugguacaucuggcugggcuucaucgccggccugaucgccaucgugauggugaccaucaugcugugcugcaugaccagcugcuguagcugccugaagggcugcugcagcugcggcagcugcugcaaguucgacgaggacgacagcgagcccgugcugaagggcgugaagcugcacuacaccuga

SEQ ID NO: 23133 - RNA, 3822 nt, Artificial Sequence
  SARS-CoV-2/Wuhan/WIV05/2019__EPI_ISL_402128 spike protein CDS gc (1-1273)(K986P_V987P_A222V_D614G)
auguucguguuccuggugcugcugccccuggugagcagccagugcgugaaccugaccacccggacccagcugcccccugccuacaccaacagcuucacccggggcguguacuaccccgacaagguguuccggagcagcgugcugcacagcacccaggaccuguuccugcccuucuucagcaacgugaccugguuccacgccauccacgugagcggcaccaacggcaccaagcgguucgacaacccagugcugcccuucaacgacggcguguacuucgccagcaccgagaagucaaacaucauccggggcuggaucuucggcaccacccuggacagcaagacacagagccugcugaucgugaacaacgccaccaacguggugaucaaggugugcgaguuucaguucugcaacgaccccuuccugggcguguacuaccacaagaacaacaagagcuggauggagagcgaguuccgggucuacagcagcgcuaacaauugcaccuucgaguacgugagccagcccuuccugauggaccucgagggcaagcagggcaacuucaagaaccugcgggaguucguguucaagaacaucgauggcuacuucaagaucuacagcaagcacacccccaucaaccuggugcgggaccugccccagggauucagcgugcuggagccucugguggaccugcccaucggcaucaacaucaccagguuccagacccugcuggcccugcaccggagcuaccugacccccggcgacagcagcagcggcuggaccgccggcgccgccgccuacuacgugggcuaccugcagccacggaccuuccugcugaaguacaacgagaacggcaccaucaccgacgcaguggacugcgcccuggacccccugagcgagaccaagugcacccuaaagagcuucaccguggagaagggcaucuaccagaccagcaacuuccgggugcagcccacugagagcaucgugcgguuccccaacauuaccaaccugugucccuucggcgagguguucaacgccacccgguucgccagcguguacgccuggaaccggaagcggaucagcaacugcguggccgacuacagcgugcuguacaacagcgccagcuucagcaccuucaagugcuacggcgugagcccuaccaagcugaacgaccugugcuucaccaacguguacgccgacagcuucgugauccggggcgacgaggugcggcagaucgcucccggccagaccggcaagaucgccgacuacaacuacaagcugcccgacgacuucaccggcugcgugaucgccuggaacagcaacaaccuggacagcaaggugggcggcaacuacaacuaccuguaccggcuguuccguaagagcaaccugaagccauucgagcgggacaucagcaccgagaucuaccaggccggcagcacccccugcaacgguguggagggcuuuaacugcuacuucccccugcagagcuacggcuuccagcccaccaacggcgugggcuaccagcccuaccgggugguggugcugagcuucgagcugcugcacgcccccgccaccgugugcggcccuaaaaagagcaccaaccuggugaagaacaagugcgugaacuucaauuucaacggccugaccggcaccggcgugcugaccgagagcaacaagaaguuccugcccuuccagcaguucggccgggauaucgccgacaccaccgacgccgugcgggacccccagacccuggagauccuggacaucaccccaugcagcuucggcggcgucagcgugaucacccccggcacaaacaccagcaaccagguggcagugcuguaccagggagugaacugcaccgaggugcccguggccauccacgccgaccagcugacccccaccuggcggguguacagcaccggcagcaacguguuccagacccgggccggcugccugaucggcgccgagcacgugaacaacuccuacgagugcgacauccccaucggcgccggcaucugcgcuagcuaccagacccagaccaacagcccccggcgggcccggagcguggccagccagagcaucaucgccuacaccaugagcuuaggcgccgagaacagcguggccuacagcaacaacagcaucgccaucccuaccaacuucaccaucagcgugaccaccgagauacugcccgugagcaugaccaagaccagcguggacuguaccauguacaucugcggcgacagcaccgagugcagcaaccugcugcugcaguacggcagcuucugcacccagcugaaccgggcgcugaccggcaucgccguggagcaggacaagaacacccaagagguguucgcccaggugaagcagaucuacaagacucccccaaucaaggacuucggcggcuucaacuucagccagauccugcccgaccccagcaagcccagcaagcggagcuucaucgaggaccugcuguucaacaaggugacccuggccgacgccggcuucaucaagcaguacggcgacugccugggggauaucgccgcccgggaccugaucugcgcucagaaguucaacggccugaccgugcugcccccucugcugaccgacgagaugaucgcccaguacaccagcgcccugcuugccggcaccaucaccagcggcuggaccuucggcgccggcgccgcacugcagauccccuucgccaugcagauggccuaccgguucaacggcaucggcgugacccagaacgugcuguacgagaaccagaagcugaucgccaaccaguucaacagcgccaucggcaagauccaggacagccugagcagcaccgccagcgcccugggcaagcugcaggacguggugaaccagaacgcccaggcucugaacacccuggugaagcagcugagcagcaacuucggcgccaucagcucagugcugaaugacauccugagcaggcuggaucccccagaggccgaggugcagaucgaccggcugaucaccggccggcugcagagccugcagaccuacgugacccagcagcugauccgggccgccgagauccgggccagcgccaaccuggccgcaaccaagaugagcgagugcgugcugggccagagcaagcggguggacuuuugcggcaagggcuaccaccugaugagcuucccccagagcgcuccccacggcgugguguuccuccacgucacauacgugcccgcccaggagaagaacuucaccaccgcccccgccauuugccacgacggcaaggcccacuucccccgggagggaguguucgugagcaacggcacccacugguucgugacccagcggaacuucuacgagccucagaucaucaccaccgacaacaccuucgugagcggcaacugcgacguggugaucggcaucgugaacaacaccguguacgacccccugcagcccgagcuggacagcuucaaggaggagcuggacaaguacuucaagaaccacaccagcccagacguggaccugggcgacaucagcggcaucaacgccagcguggugaacauccagaaggagaucgaccggcugaacgagguggccaagaaccugaacgagagccugaucgaccugcaggagcugggcaaguacgagcaguacaucaaguggcccugguacaucuggcugggcuucaucgccggccugaucgccaucgugauggugaccaucaugcugugcugcaugaccagcugcuguagcugccugaagggcugcugcagcugcggcagcugcugcaaguucgacgaggacgacagcgagcccgugcugaagggcgugaagcugcacuacaccuga

SEQ ID NO: 23134 - RNA, 3822 nt, Artificial Sequence
  SARS-CoV-2/Wuhan/WIV05/2019__EPI_ISL_402128 spike protein CDS gc (1-1273)(K986P_V987P_N439K_D614G)
auguucguguuccuggugcugcugccccuggugagcagccagugcgugaaccugaccacccggacccagcugcccccugccuacaccaacagcuucacccggggcguguacuaccccgacaagguguuccggagcagcgugcugcacagcacccaggaccuguuccugcccuucuucagcaacgugaccugguuccacgccauccacgugagcggcaccaacggcaccaagcgguucgacaacccagugcugcccuucaacgacggcguguacuucgccagcaccgagaagucaaacaucauccggggcuggaucuucggcaccacccuggacagcaagacacagagccugcugaucgugaacaacgccaccaacguggugaucaaggugugcgaguuucaguucugcaacgaccccuuccugggcguguacuaccacaagaacaacaagagcuggauggagagcgaguuccgggucuacagcagcgcuaacaauugcaccuucgaguacgugagccagcccuuccugauggaccucgagggcaagcagggcaacuucaagaaccugcgggaguucguguucaagaacaucgauggcuacuucaagaucuacagcaagcacacccccaucaaccuggugcgggaccugccccagggauucagcgcccuggagccucugguggaccugcccaucggcaucaacaucaccagguuccagacccugcuggcccugcaccggagcuaccugacccccggcgacagcagcagcggcuggaccgccggcgccgccgcauacuacgugggcuaccugcagccacggaccuuccugcugaaguacaacgagaacggcaccaucaccgacgccguggacugcgcccuggacccccugagcgagaccaagugcacccuaaagagcuucaccguggagaagggcaucuaccagaccagcaacuuccgggugcagcccacugagagcaucgugcgguuccccaacauuaccaaccugugucccuucggcgagguguucaacgccacccgguucgccagcguguacgccuggaaccggaagcggaucagcaacugcguggccgacuacagcgugcuguacaacagcgccagcuucagcaccuucaagugcuacggcgugagcccuaccaagcugaacgaccugugcuucaccaacguguacgcugacagcuucgugauccggggcgacgaggugcggcagaucgcccccggccagaccggcaagaucgccgacuacaacuacaagcugcccgacgacuucaccggcugcgugaucgccuggaacagcaagaaccuggacagcaaggugggcggcaacuacaacuaccuguaccggcuguuccguaagagcaaccugaagccauucgagcgggacaucagcaccgagaucuaccaggccggcagcacccccugcaacgguguggagggcuuuaacugcuacuucccccugcagagcuacggcuuccagcccaccaacggcgugggcuaccagcccuaccgggugguggugcugagcuucgagcugcugcacgcccccgccaccgugugcggcccuaaaaagagcaccaaccuggugaagaacaagugcgugaacuucaacuucaauggccugaccggcaccggcgugcugaccgagagcaacaagaaguuccugcccuuccagcaguucggccgggauaucgccgacaccaccgacgcagugcgggacccccagacccuggagauccuggacaucaccccaugcagcuucggcggcgugagcgucaucacccccggcacaaacaccagcaaccagguggccgugcuguaccagggagugaacugcaccgaggugcccguggccauccacgccgaccagcugacccccaccuggcggguguacagcaccggcagcaacguguuccagacccgggccggcugccugaucggcgccgagcacgugaacaacuccuacgagugcgacauccccaucggcgcuggcaucugcgccagcuaccagacccagaccaacagcccccggcgggcccggagcguggccagccagagcaucaucgccuacaccaugagcuuaggcgccgagaacagcguggccuacagcaacaacagcaucgcgaucccuaccaacuucaccaucagcgugaccaccgagauacugcccgugagcaugaccaagaccagcguggacuguaccauguacaucugcggcgacagcaccgagugcagcaaccugcugcugcaguacggcagcuucugcacccagcugaaccgggcccugaccggcaucgccguggagcaggacaagaacacccaagagguguucgcccaggugaagcagaucuacaagacucccccaaucaaggacuucggcggcuucaacuucagccagauccugcccgaccccagcaagcccagcaagcggagcuucaucgaggaccugcuguucaacaaggugacccuggccgacgccggcuucaucaagcaguacggcgacugccugggggauaucgccgcucgggaccugaucugcgcccagaaguucaacggccugaccgugcugcccccucugcugaccgacgagaugaucgcccaguacaccagcgcccugcuugccggcaccaucaccagcggcuggaccuucggcgccggcgcagcccugcagauccccuucgccaugcagauggccuaccgguucaacggcaucggcgugacccagaacgugcuguacgagaaccagaagcugaucgccaaccaguucaacagcgccaucggcaagauccaggacagccugagcagcaccgccagcgcccugggcaagcugcaggacguggugaaccagaacgcucaggcccugaacacccuggugaagcagcugagcagcaacuucggcgccaucagcucagugcugaacgacauccugagcaggcuggaucccccagaggccgaggugcagaucgaccggcugaucaccggccggcugcagagccugcagaccuacgugacccagcagcugauccgggccgccgagauccgggccagcgccaaucuggcagccaccaagaugagcgagugcgugcugggccagagcaagcggguggacuuuugcggcaagggcuaccaccugaugagcuucccccagagcgcuccccacggcgugguguuccuccacgugacauacguccccgcccaggagaagaacuucaccaccgcccccgccauuugccacgacggcaaggcccacuucccccgggagggaguguucgugagcaacggcacccacugguucgugacccagcggaacuucuacgagccucagaucaucaccaccgacaacaccuucgugagcggcaacugcgacguggugaucggcaucgugaacaacaccguguacgacccccugcagcccgagcuggacagcuucaaggaggagcuggacaaguacuucaagaaccacaccagcccagacguggaccugggcgacaucagcggcaucaacgccagcguggugaacauccagaaggagaucgaccggcugaacgagguggccaagaaccugaacgagagccugaucgaccugcaggagcugggcaaguacgagcaguacaucaaguggcccugguacaucuggcugggcuucaucgccggccugaucgccaucgugauggugaccaucaugcugugcugcaugaccagcugcuguagcugccugaagggcugcugcagcugcggcagcugcugcaaguucgacgaggacgacagcgagcccgugcugaagggcgugaagcugcacuacaccuga

SEQ ID NO: 23135 - RNA, 3822 nt, Artificial Sequence
  SARS-CoV-2/Wuhan/WIV05/2019__EPI_ISL_402128 spike protein CDS gc (1-1273)(K986P_V987P_S477N_D614G)
auguucguguuccuggugcugcugccccuggugagcagccagugcgugaaccugaccacccggacccagcugcccccugccuacaccaacagcuucacccggggcguguacuaccccgacaagguguuccggagcagcgugcugcacagcacccaggaccuguuccugcccuucuucagcaacgugaccugguuccacgccauccacgugagcggcaccaacggcaccaagcgguucgacaacccagugcugcccuucaacgacggcguguacuucgccagcaccgagaagucaaacaucauccggggcuggaucuucggcaccacccuggacagcaagacacagagccugcugaucgugaacaacgccaccaacguggugaucaaggugugcgaguuucaguucugcaacgaccccuuccugggcguguacuaccacaagaacaacaagagcuggauggagagcgaguuccgggucuacagcagcgcuaacaauugcaccuucgaguacgugagccagcccuuccugauggaccucgagggcaagcagggcaacuucaagaaccugcgggaguucguguucaagaacaucgauggcuacuucaagaucuacagcaagcacacccccaucaaccuggugcgggaccugccccagggauucagcgcccuggagccucugguggaccugcccaucggcaucaacaucaccagguuccagacccugcuggcccugcaccggagcuaccugacccccggcgacagcagcagcggcuggaccgccggcgccgccgcauacuacgugggcuaccugcagccacggaccuuccugcugaaguacaacgagaacggcaccaucaccgacgccguggacugcgcccuggacccccugagcgagaccaagugcacccuaaagagcuucaccguggagaagggcaucuaccagaccagcaacuuccgggugcagcccacugagagcaucgugcgguuccccaacauuaccaaccugugucccuucggcgagguguucaacgccacccgguucgccagcguguacgccuggaaccggaagcggaucagcaacugcguggccgacuacagcgugcuguacaacagcgccagcuucagcaccuucaagugcuacggcgugagcccuaccaagcugaacgaccugugcuucaccaacguguacgcugacagcuucgugauccggggcgacgaggugcggcagaucgcccccggccagaccggcaagaucgccgacuacaacuacaagcugcccgacgacuucaccggcugcgugaucgccuggaacagcaacaaccuggacagcaaggugggcggcaacuacaacuaccuguaccggcuguuccguaagagcaaccugaagccauucgagcgggacaucagcaccgagaucuaccaggccggcaacacccccugcaacgguguggagggcuuuaacugcuacuucccccugcagagcuacggcuuccagcccaccaacggcgugggcuaccagcccuaccgggugguggugcugagcuucgagcugcugcacgcccccgccaccgugugcggcccuaaaaagagcaccaaccuggugaagaacaagugcgugaauuucaacuucaacggccugaccggcaccggcgugcugaccgagagcaacaagaaguuccugcccuuccagcaguucggccgggauaucgccgacaccaccgacgcagugcgggacccccagacccuggagauccuggacaucaccccaugcagcuucggcggcgugagcgucaucacccccggcacaaacaccagcaaccagguggccgugcuguaccagggagugaacugcaccgaggugcccguggccauccacgccgaccagcugacccccaccuggcggguguacagcaccggcagcaacguguuccagacccgggccggcugccugaucggcgccgagcacgugaacaacagcuacgagugcgacauccccaucggcgcuggcaucugcgccuccuaccagacccagaccaacagcccccggcgggcccggagcguggccagccagagcaucaucgccuacaccaugagcuuaggcgccgagaacagcguggccuacagcaacaacagcaucgcgaucccuaccaacuucaccaucagcgugaccaccgagauacugcccgugagcaugaccaagaccagcguggacuguaccauguacaucugcggcgacagcaccgagugcagcaaccugcugcugcaguacggcagcuucugcacccagcugaaccgggcccugaccggcaucgccguggagcaggacaagaacacccaagagguguucgcccaggugaagcagaucuacaagacucccccaaucaaggacuucggcggcuucaacuucagccagauccugcccgaccccagcaagcccagcaagcggagcuucaucgaggaccugcuguucaacaaggugacccuggccgacgccggcuucaucaagcaguacggcgacugccugggggauaucgccgcucgggaccugaucugcgcccagaaguucaacggccugaccgugcugcccccucugcugaccgacgagaugaucgcccaguacaccagcgcccugcuugccggcaccaucaccagcggcuggaccuucggcgccggcgcagcccugcagauccccuucgccaugcagauggccuaccgguucaacggcaucggcgugacccagaacgugcuguacgagaaccagaagcugaucgccaaccaguucaacagcgccaucggcaagauccaggacagccugagcagcaccgccagcgcccugggcaagcugcaggacguggugaaccagaacgcucaggcccugaacacccuggugaagcagcugagcagcaauuucggcgccaucagcagcgugcugaacgacauccugucaaggcuggaucccccagaggccgaggugcagaucgaccggcugaucaccggccggcugcagagccugcagaccuacgugacccagcagcugauccgggccgccgagauccgggccagcgccaaccuggcagccaccaagaugagcgagugcgugcugggccagagcaagcggguggacuuuugcggcaagggcuaccaccugaugagcuucccccagagcgcuccccacggcgugguguuccuccacgugacauacguccccgcccaggagaagaacuucaccaccgcccccgccauuugccacgacggcaaggcccacuucccccgggagggaguguucgugagcaacggcacccacugguucgugacccagcggaacuucuacgagccucagaucaucaccaccgacaacaccuucgugagcggcaacugcgacguggugaucggcaucgugaacaacaccguguacgacccccugcagcccgagcuggacagcuucaaggaggagcuggacaaguacuucaagaaccacaccagcccagacguggaccugggcgacaucagcggcaucaacgccagcguggugaacauccagaaggagaucgaccggcugaacgagguggccaagaaccugaacgagagccugaucgaccugcaggagcugggcaaguacgagcaguacaucaaguggcccugguacaucuggcugggcuucaucgccggccugaucgccaucgugauggugaccaucaugcugugcugcaugaccagcugcuguagcugccugaagggcugcugcagcugcggcagcugcugcaaguucgacgaggacgacagcgagcccgugcugaagggcgugaagcugcacuacaccuga

SEQ ID NO: 23136 - RNA, 3822 nt, Artificial Sequence
  SARS-CoV-2/Wuhan/WIV05/2019__EPI_ISL_402128 spike protein CDS gc (1-1273)(K986P_V987P_N501Y_D614G)
auguucguguuccuggugcugcugccccuggugagcagccagugcgugaaccugaccacccggacccagcugcccccugccuacaccaacagcuucacccggggcguguacuaccccgacaagguguuccggagcagcgugcugcacagcacccaggaccuguuccugcccuucuucagcaacgugaccugguuccacgccauccacgugagcggcaccaacggcaccaagcgguucgacaacccagugcugcccuucaacgacggcguguacuucgccagcaccgagaagucaaacaucauccggggcuggaucuucggcaccacccuggacagcaagacacagagccugcugaucgugaacaacgccaccaacguggugaucaaggugugcgaguuucaguucugcaacgaccccuuccugggcguguacuaccacaagaacaacaagagcuggauggagagcgaguuccgggucuacagcagcgcuaacaauugcaccuucgaguacgugagccagcccuuccugauggaccucgagggcaagcagggcaacuucaagaaccugcgggaguucguguucaagaacaucgauggcuacuucaagaucuacagcaagcacacccccaucaaccuggugcgggaccugccccagggauucagcgcccuggagccucugguggaccugcccaucggcaucaacaucaccagguuccagacccugcuggcccugcaccggagcuaccugacccccggcgacagcagcagcggcuggaccgccggcgccgccgcauacuacgugggcuaccugcagccacggaccuuccugcugaaguacaacgagaacggcaccaucaccgacgccguggacugcgcccuggacccccugagcgagaccaagugcacccuaaagagcuucaccguggagaagggcaucuaccagaccagcaacuuccgggugcagcccacugagagcaucgugcgguuccccaacauuaccaaccugugucccuucggcgagguguucaacgccacccgguucgccagcguguacgccuggaaccggaagcggaucagcaacugcguggccgacuacagcgugcuguacaacagcgccagcuucagcaccuucaagugcuacggcgugagcccuaccaagcugaacgaccugugcuucaccaacguguacgcugacagcuucgugauccggggcgacgaggugcggcagaucgcccccggccagaccggcaagaucgccgacuacaacuacaagcugcccgacgacuucaccggcugcgugaucgccuggaacagcaacaaccuggacagcaaggugggcggcaacuacaacuaccuguaccggcuguuccguaagagcaaccugaagccauucgagcgggacaucagcaccgagaucuaccaggccggcagcacccccugcaacgguguggagggcuuuaacugcuacuucccccugcagagcuacggcuuccagcccaccuacggcgugggcuaccagcccuaccgggugguggugcugagcuucgagcugcugcacgcccccgccaccgugugcggcccuaaaaagagcaccaaccuggugaagaacaagugcgugaacuucaacuucaauggccugaccggcaccggcgugcugaccgagagcaacaagaaguuccugcccuuccagcaguucggccgggauaucgccgacaccaccgacgcagugcgggacccccagacccuggagauccuggacaucaccccaugcagcuucggcggcgugagcgucaucacccccggcacaaacaccagcaaccagguggccgugcuguaccagggagugaacugcaccgaggugcccguggccauccacgccgaccagcugacccccaccuggcggguguacagcaccggcagcaacguguuccagacccgggccggcugccugaucggcgccgagcacgugaacaacuccuacgagugcgacauccccaucggcgcuggcaucugcgccagcuaccagacccagaccaacagcccccggcgggcccggagcguggccagccagagcaucaucgccuacaccaugagcuuaggcgccgagaacagcguggccuacagcaacaacagcaucgcgaucccuaccaacuucaccaucagcgugaccaccgagauacugcccgugagcaugaccaagaccagcguggacuguaccauguacaucugcggcgacagcaccgagugcagcaaccugcugcugcaguacggcagcuucugcacccagcugaaccgggcccugaccggcaucgccguggagcaggacaagaacacccaagagguguucgcccaggugaagcagaucuacaagacucccccaaucaaggacuucggcggcuucaacuucagccagauccugcccgaccccagcaagcccagcaagcggagcuucaucgaggaccugcuguucaacaaggugacccuggccgacgccggcuucaucaagcaguacggcgacugccugggggauaucgccgcucgggaccugaucugcgcccagaaguucaacggccugaccgugcugcccccucugcugaccgacgagaugaucgcccaguacaccagcgcccugcuugccggcaccaucaccagcggcuggaccuucggcgccggcgcagcccugcagauccccuucgccaugcagauggccuaccgguucaacggcaucggcgugacccagaacgugcuguacgagaaccagaagcugaucgccaaccaguucaacagcgccaucggcaagauccaggacagccugagcagcaccgccagcgcccugggcaagcugcaggacguggugaaccagaacgcucaggcccugaacacccuggugaagcagcugagcagcaacuucggcgccaucagcucagugcugaacgacauccugagcaggcuggaucccccagaggccgaggugcagaucgaccggcugaucaccggccggcugcagagccugcagaccuacgugacccagcagcugauccgggccgccgagauccgggccagcgccaaucuggcagccaccaagaugagcgagugcgugcugggccagagcaagcggguggacuuuugcggcaagggcuaccaccugaugagcuucccccagagcgcuccccacggcgugguguuccuccacgugacauacguccccgcccaggagaagaacuucaccaccgcccccgccauuugccacgacggcaaggcccacuucccccgggagggaguguucgugagcaacggcacccacugguucgugacccagcggaacuucuacgagccucagaucaucaccaccgacaacaccuucgugagcggcaacugcgacguggugaucggcaucgugaacaacaccguguacgacccccugcagcccgagcuggacagcuucaaggaggagcuggacaaguacuucaagaaccacaccagcccagacguggaccugggcgacaucagcggcaucaacgccagcguggugaacauccagaaggagaucgaccggcugaacgagguggccaagaaccugaacgagagccugaucgaccugcaggagcugggcaaguacgagcaguacaucaaguggcccugguacaucuggcugggcuucaucgccggccugaucgccaucgugauggugaccaucaugcugugcugcaugaccagcugcuguagcugccugaagggcugcugcagcugcggcagcugcugcaaguucgacgaggacgacagcgagcccgugcugaagggcgugaagcugcacuacaccuga

SEQ ID NO: 23137 - RNA, 3816 nt, Artificial Sequence
  SARS-CoV-2/Wuhan/WIV05/2019__EPI_ISL_402128 spike protein CDS gc (1-1273)(K986P_V987P_H69del_V70del_D614G)
auguucguguuccuggugcugcugccccuggugagcagccagugcgugaaccugaccacccggacccagcugcccccugccuacaccaacagcuucacccggggcguguacuaccccgacaagguguuccggagcagcgugcugcacagcacccaggaccuguuccugcccuucuucagcaacgugaccugguuccacgccaucagcggcaccaacggcaccaagcgguucgacaacccagugcugcccuucaacgacggcguguacuucgccagcaccgagaagucaaacaucauccggggcuggaucuucggcaccacccuggacagcaagacacagagccugcugaucgugaacaacgccaccaacguggugaucaaggugugcgaguuucaguucugcaacgaccccuuccugggcguguacuaccacaagaacaacaagagcuggauggagagcgaguuccggguguacagcagcgcuaacaauugcaccuucgaguacgucagccagcccuuccugauggaccucgagggcaagcagggcaacuucaagaaccugcgggaguucguguucaagaacaucgauggcuacuucaagaucuacagcaagcacacccccaucaaccuggugcgggaccugccccagggauucagcgcccuggagccucugguggaccugcccaucggcaucaacaucaccagguuccagacccugcuggcccugcaccggagcuaccugacccccggcgacagcagcagcggcuggaccgccggcgccgccgcauacuacgugggcuaccugcagccacggaccuuccugcugaaguacaacgagaacggcaccaucaccgacgccguggacugcgcccuggacccccugagcgagaccaagugcacccuaaagagcuucaccguggagaagggcaucuaccagaccagcaacuuccgggugcagcccacugagagcaucgugcgguuccccaacauuaccaaccugugucccuucggcgagguguucaacgccacccgguucgccagcguguacgccuggaaccggaagcggaucagcaacugcguggccgacuacagcgugcuguacaacagcgccagcuucagcaccuucaagugcuacggcgugagcccuaccaagcugaacgaccugugcuucaccaacguguacgcugacagcuucgugauccggggcgacgaggugcggcagaucgcccccggccagaccggcaagaucgccgacuacaacuacaagcugcccgacgacuucaccggcugcgugaucgccuggaacagcaacaaccuggacagcaaggugggcggcaacuacaacuaccuguaccggcuguuccguaagagcaaccugaagccauucgagcgggacaucagcaccgagaucuaccaggccggcagcacccccugcaacgguguggagggcuuuaacugcuacuucccccugcagagcuacggcuuccagcccaccaacggcgugggcuaccagcccuaccgggugguggugcugagcuucgagcugcugcacgcccccgccaccgugugcggcccuaaaaagagcaccaaccuggugaagaacaagugcgugaacuucaauuucaacggccugaccggcaccggcgugcugaccgagagcaacaagaaguuccugcccuuccagcaguucggccgggauaucgccgacaccaccgacgcagugcgggacccccagacccuggagauccuggacaucaccccaugcagcuucggcggcgugagcgugaucacccccggcacaaacaccagcaaccaggucgccgugcuguaccagggagugaacugcaccgaggugcccguggccauccacgccgaccagcugacccccaccuggcggguguacagcaccggcagcaacguguuccagacccgggccggcugccugaucggcgccgagcacgugaacaacuccuacgagugcgacauccccaucggcgcuggcaucugcgccagcuaccagacccagaccaacagcccccggcgggcccggagcguggccagccagagcaucaucgccuacaccaugagcuuaggcgccgagaacagcguggccuacagcaacaacagcaucgcgaucccuaccaacuucaccaucagcgugaccaccgagauacugcccgugagcaugaccaagaccagcguggacuguaccauguacaucugcggcgacagcaccgagugcagcaaccugcugcugcaguacggcagcuucugcacccagcugaaccgggcccugaccggcaucgccguggagcaggacaagaacacccaagagguguucgcccaggugaagcagaucuacaagacucccccaaucaaggacuucggcggcuucaacuucagccagauccugcccgaccccagcaagcccagcaagcggagcuucaucgaggaccugcuguucaacaaggugacccuggccgacgccggcuucaucaagcaguacggcgacugccugggggauaucgccgcucgggaccugaucugcgcccagaaguucaacggccugaccgugcugcccccucugcugaccgacgagaugaucgcccaguacaccagcgcccugcuugccggcaccaucaccagcggcuggaccuucggcgccggcgcagcccugcagauccccuucgccaugcagauggccuaccgguucaacggcaucggcgugacccagaacgugcuguacgagaaccagaagcugaucgccaaccaguucaacagcgccaucggcaagauccaggacagccugagcagcaccgccagcgcccugggcaagcugcaggacguggugaaccagaacgcucaggcccugaacacccuggugaagcagcugagcagcaacuucggcgccaucagcucagugcugaaugacauccugagcaggcuggaucccccagaggccgaggugcagaucgaccggcugaucaccggccggcugcagagccugcagaccuacgugacccagcagcugauccgggccgccgagauccgggccagcgccaaccuggcagccaccaagaugagcgagugcgugcugggccagagcaagcggguggacuuuugcggcaagggcuaccaccugaugagcuucccccagagcgcuccccacggcgugguguuccuccacgugacauacgugcccgcccaggagaagaacuucaccaccgcccccgccauuugccacgacggcaaggcccacuucccccgggagggagucuucgugagcaacggcacccacugguucgugacccagcggaacuucuacgagccucagaucaucaccaccgacaacaccuucgugagcggcaacugcgacguggugaucggcaucgugaacaacaccguguacgacccccugcagcccgagcuggacagcuucaaggaggagcuggacaaguacuucaagaaccacaccagcccagacguggaccugggcgacaucagcggcaucaacgccagcguggugaacauccagaaggagaucgaccggcugaacgagguggccaagaaccugaacgagagccugaucgaccugcaggagcugggcaaguacgagcaguacaucaaguggcccugguacaucuggcugggcuucaucgccggccugaucgccaucgugauggugaccaucaugcugugcugcaugaccagcugcuguagcugccugaagggcugcugcagcugcggcagcugcugcaaguucgacgaggacgacagcgagcccgugcugaagggcgugaagcugcacuacaccuga

SEQ ID NO: 23138 - RNA, 3822 nt, Artificial Sequence
  SARS-CoV-2/Wuhan/WIV05/2019__EPI_ISL_402128 spike protein CDS gc (1-1273)(K986P_V987P_Y453F_D614G)
auguucguguuccuggugcugcugccccuggugagcagccagugcgugaaccugaccacccggacccagcugcccccugccuacaccaacagcuucacccggggcguguacuaccccgacaagguguuccggagcagcgugcugcacagcacccaggaccuguuccugcccuucuucagcaacgugaccugguuccacgccauccacgugagcggcaccaacggcaccaagcgguucgacaacccagugcugcccuucaacgacggcguguacuucgccagcaccgagaagucaaacaucauccggggcuggaucuucggcaccacccuggacagcaagacacagagccugcugaucgugaacaacgccaccaacguggugaucaaggugugcgaguuucaguucugcaacgaccccuuccugggcguguacuaccacaagaacaacaagagcuggauggagagcgaguuccgggucuacagcagcgcuaacaauugcaccuucgaguacgugagccagcccuuccugauggaccucgagggcaagcagggcaacuucaagaaccugcgggaguucguguucaagaacaucgauggcuacuucaagaucuacagcaagcacacccccaucaaccuggugcgggaccugccccagggauucagcgcccuggagccucugguggaccugcccaucggcaucaacaucaccagguuccagacccugcuggcccugcaccggagcuaccugacccccggcgacagcagcagcggcuggaccgccggcgccgccgcauacuacgugggcuaccugcagccacggaccuuccugcugaaguacaacgagaacggcaccaucaccgacgccguggacugcgcccuggacccccugagcgagaccaagugcacccuaaagagcuucaccguggagaagggcaucuaccagaccagcaacuuccgggugcagcccacugagagcaucgugcgguuccccaacauuaccaaccugugucccuucggcgagguguucaacgccacccgguucgccagcguguacgccuggaaccggaagcggaucagcaacugcguggccgacuacagcgugcuguacaacagcgccagcuucagcaccuucaagugcuacggcgugagcccuaccaagcugaacgaccugugcuucaccaacguguacgcugacagcuucgugauccggggcgacgaggugcggcagaucgcccccggccagaccggcaagaucgccgacuacaacuacaagcugcccgacgacuucaccggcugcgugaucgccuggaacagcaacaaccuggacagcaaggugggcggcaacuacaacuaccuguuccggcuguuccguaagagcaaccugaagccauuugagcgggacaucagcaccgagaucuaccaggccggcagcacccccugcaacgguguggagggcuucaacugcuacuucccccugcagagcuacggcuuccagcccaccaacggcgugggcuaccagcccuaccgggugguggugcugagcuucgagcugcugcacgcccccgccaccgugugcggcccuaaaaagagcaccaaccuggugaagaacaagugcgugaacuucaauuucaacggccugaccggcaccggcgugcugaccgagagcaacaagaaguuccugcccuuccagcaguucggccgggauaucgccgacaccaccgacgcagugcgggacccccagacccuggagauccuggacaucaccccaugcagcuucggcggcgugagcgucaucacccccggcacaaacaccagcaaccagguggccgugcuguaccagggagugaacugcaccgaggugcccguggccauccacgccgaccagcugacccccaccuggcggguguacagcaccggcagcaacguguuccagacccgggccggcugccugaucggcgccgagcacgugaacaacuccuacgagugcgacauccccaucggcgcuggcaucugcgccagcuaccagacccagaccaacagcccccggcgggcccggagcguggccagccagagcaucaucgccuacaccaugagcuuaggcgccgagaacagcguggccuacagcaacaacagcaucgcgaucccuaccaacuucaccaucagcgugaccaccgagauacugcccgugagcaugaccaagaccagcguggacuguaccauguacaucugcggcgacagcaccgagugcagcaaccugcugcugcaguacggcagcuucugcacccagcugaaccgggcccugaccggcaucgccguggagcaggacaagaacacccaagagguguucgcccaggugaagcagaucuacaagacucccccaaucaaggacuucggcggcuucaacuucagccagauccugcccgaccccagcaagcccagcaagcggagcuucaucgaggaccugcuguucaacaaggugacccuggccgacgccggcuucaucaagcaguacggcgacugccugggggauaucgccgcucgggaccugaucugcgcccagaaguucaacggccugaccgugcugcccccucugcugaccgacgagaugaucgcccaguacaccagcgcccugcuugccggcaccaucaccagcggcuggaccuucggcgccggcgcagcccugcagauccccuucgccaugcagauggccuaccgguucaacggcaucggcgugacccagaacgugcuguacgagaaccagaagcugaucgccaaccaguucaacagcgccaucggcaagauccaggacagccugagcagcaccgccagcgcccugggcaagcugcaggacguggugaaccagaacgcucaggcccugaacacccuggugaagcagcugagcagcaacuuuggcgccaucagcucagugcugaaugacauccugagcaggcuggaucccccagaggccgaggugcagaucgaccggcugaucaccggccggcugcagagccugcagaccuacgugacccagcagcugauccgggccgccgagauccgggccagcgccaaccuggcagccaccaagaugagcgagugcgugcugggccagagcaagcggguggacuucugcggcaagggcuaccaccugaugagcuucccccagagcgcuccccacggcgugguguuccuccacgugacauacguccccgcccaggagaagaacuucaccaccgcccccgccauuugccacgacggcaaggcccacuucccccgggagggaguguucgugagcaacggcacccacugguucgugacccagcggaacuucuacgagccucagaucaucaccaccgacaacaccuucgugagcggcaacugcgacguggugaucggcaucgugaacaacaccguguacgacccccugcagcccgagcuggacagcuucaaggaggagcuggacaaguacuucaagaaccacaccagcccagacguggaccugggcgacaucagcggcaucaacgccagcguggugaacauccagaaggagaucgaccggcugaacgagguggccaagaaccugaacgagagccugaucgaccugcaggagcugggcaaguacgagcaguacaucaaguggcccugguacaucuggcugggcuucaucgccggccugaucgccaucgugauggugaccaucaugcugugcugcaugaccagcugcuguagcugccugaagggcugcugcagcugcggcagcugcugcaaguucgacgaggacgacagcgagcccgugcugaagggcgugaagcugcacuacaccuga

SEQ ID NO: 23139 - RNA, 3822 nt, Artificial Sequence
  SARS-CoV-2/Wuhan/WIV05/2019__EPI_ISL_402128 spike protein CDS gc (1-1273)(K986P_V987P_D614G_I692V)
auguucguguuccuggugcugcugccccuggugagcagccagugcgugaaccugaccacccggacccagcugcccccugccuacaccaacagcuucacccggggcguguacuaccccgacaagguguuccggagcagcgugcugcacagcacccaggaccuguuccugcccuucuucagcaacgugaccugguuccacgccauccacgugagcggcaccaacggcaccaagcgguucgacaacccagugcugcccuucaacgacggcguguacuucgccagcaccgagaagucaaacaucauccggggcuggaucuucggcaccacccuggacagcaagacacagagccugcugaucgugaacaacgccaccaacguggugaucaaggugugcgaguuucaguucugcaacgaccccuuccugggcguguacuaccacaagaacaacaagagcuggauggagagcgaguuccgggucuacagcagcgcuaacaauugcaccuucgaguacgugagccagcccuuccugauggaccucgagggcaagcagggcaacuucaagaaccugcgggaguucguguucaagaacaucgauggcuacuucaagaucuacagcaagcacacccccaucaaccuggugcgggaccugccccagggauucagcgcccuggagccucugguggaccugcccaucggcaucaacaucaccagguuccagacccugcuggcccugcaccggagcuaccugacccccggcgacagcagcagcggcuggaccgccggcgccgccgcauacuacgugggcuaccugcagccacggaccuuccugcugaaguacaacgagaacggcaccaucaccgacgccguggacugcgcccuggacccccugagcgagaccaagugcacccuaaagagcuucaccguggagaagggcaucuaccagaccagcaacuuccgggugcagcccacugagagcaucgugcgguuccccaacauuaccaaccugugucccuucggcgagguguucaacgccacccgguucgccagcguguacgccuggaaccggaagcggaucagcaacugcguggccgacuacagcgugcuguacaacagcgccagcuucagcaccuucaagugcuacggcgugagcccuaccaagcugaacgaccugugcuucaccaacguguacgcugacagcuucgugauccggggcgacgaggugcggcagaucgcccccggccagaccggcaagaucgccgacuacaacuacaagcugcccgacgacuucaccggcugcgugaucgccuggaacagcaacaaccuggacagcaaggugggcggcaacuacaacuaccuguaccggcuguuccguaagagcaaccugaagccauucgagcgggacaucagcaccgagaucuaccaggccggcagcacccccugcaacgguguggagggcuuuaacugcuacuucccccugcagagcuacggcuuccagcccaccaacggcgugggcuaccagcccuaccgggugguggugcugagcuucgagcugcugcacgcccccgccaccgugugcggcccuaaaaagagcaccaaccuggugaagaacaagugcgugaacuucaauuucaacggccugaccggcaccggcgugcugaccgagagcaacaagaaguuccugcccuuccagcaguucggccgggauaucgccgacaccaccgacgcagugcgggacccccagacccuggagauccuggacaucaccccaugcagcuucggcggcgugagcgucaucacccccggcacaaacaccagcaaccagguggccgugcuguaccagggagugaacugcaccgaggugcccguggccauccacgccgaccagcugacccccaccuggcggguguacagcaccggcagcaacguguuccagacccgggccggcugccugaucggcgccgagcacgugaacaacuccuacgagugcgacauccccaucggcgcuggcaucugcgccagcuaccagacccagaccaacagcccccggcgggcccggagcguggccagccagagcgugaucgccuacaccaugagcuuaggcgccgagaacagcguggccuacagcaacaacagcaucgcgaucccuaccaacuucaccaucagcgugaccaccgagauccugcccgugagcaugaccaagaccagcguggacuguaccauguacauaugcggcgacagcaccgagugcagcaaccugcugcugcaguacggcagcuucugcacccagcugaaccgggcccugaccggcaucgccguggagcaggacaagaacacccaagagguguucgcccaggugaagcagaucuacaagacucccccaaucaaggacuucggcggcuucaacuucagccagauccugcccgaccccagcaagcccagcaagcggagcuucaucgaggaccugcuguucaacaaggugacccuggccgacgccggcuucaucaagcaguacggcgacugccugggggauaucgccgcucgggaccugaucugcgcccagaaguucaacggccugaccgugcugcccccucugcugaccgacgagaugaucgcccaguacaccagcgcccugcuugccggcaccaucaccagcggcuggaccuucggcgccggcgcagcccugcagauccccuucgccaugcagauggccuaccgguucaacggcaucggcgugacccagaacgugcuguacgagaaccagaagcugaucgccaaccaguucaacagcgccaucggcaagauccaggacagccugagcagcaccgccagcgcccugggcaagcugcaggacguggugaaccagaacgcucaggcccugaacacccuggugaagcagcugagcagcaacuucggcgccaucagcucagugcugaaugacauccugagcaggcuggaucccccagaggccgaggugcagaucgaccggcugaucaccggccggcugcagagccugcagaccuacgugacccagcagcugauccgggccgccgagauccgggccagcgccaaccuggcagccaccaagaugagcgagugcgugcugggccagagcaagcggguggacuuuugcggcaagggcuaccaccugaugagcuucccccagagcgcuccccacggcgugguguuccuccacgucacauacgugcccgcccaggagaagaacuucaccaccgcccccgccaucugccacgacggcaaggcccacuucccccgggagggaguguucgugagcaacggcacccacugguucgugacccagcggaacuucuacgagccucagauuaucaccaccgacaacaccuucgugagcggcaacugcgacguggugaucggcaucgugaacaacaccguguacgacccccugcagcccgagcuggacagcuucaaggaggagcuggacaaguacuucaagaaccacaccagcccagacguggaccugggcgacaucagcggcaucaacgccagcguggugaacauccagaaggagaucgaccggcugaacgagguggccaagaaccugaacgagagccugaucgaccugcaggagcugggcaaguacgagcaguacaucaaguggcccugguacaucuggcugggcuucaucgccggccugaucgccaucgugauggugaccaucaugcugugcugcaugaccagcugcuguagcugccugaagggcugcugcagcugcggcagcugcugcaaguucgacgaggacgacagcgagcccgugcugaagggcgugaagcugcacuacaccuga

SEQ ID NO: 23140 - RNA, 3822 nt, Artificial Sequence
  SARS-CoV-2/Wuhan/WIV05/2019__EPI_ISL_402128 spike protein CDS gc (1-1273)(K986P_V987P_D614G_M1229I)
auguucguguuccuggugcugcugccccuggugagcagccagugcgugaaccugaccacccggacccagcugcccccugccuacaccaacagcuucacccggggcguguacuaccccgacaagguguuccggagcagcgugcugcacagcacccaggaccuguuccugcccuucuucagcaacgugaccugguuccacgccauccacgugagcggcaccaacggcaccaagcgguucgacaacccagugcugcccuucaacgacggcguguacuucgccagcaccgagaagucaaacaucauccggggcuggaucuucggcaccacccuggacagcaagacacagagccugcugaucgugaacaacgccaccaacguggugaucaaggugugcgaguuucaguucugcaacgaccccuuccugggcguguacuaccacaagaacaacaagagcuggauggagagcgaguuccgggucuacagcagcgcuaacaauugcaccuucgaguacgugagccagcccuuccugauggaccucgagggcaagcagggcaacuucaagaaccugcgggaguucguguucaagaacaucgauggcuacuucaagaucuacagcaagcacacccccaucaaccuggugcgggaccugccccagggauucagcgcccuggagccucugguggaccugcccaucggcaucaacaucaccagguuccagacccugcuggcccugcaccggagcuaccugacccccggcgacagcagcagcggcuggaccgccggcgccgccgcauacuacgugggcuaccugcagccacggaccuuccugcugaaguacaacgagaacggcaccaucaccgacgccguggacugcgcccuggacccccugagcgagaccaagugcacccuaaagagcuucaccguggagaagggcaucuaccagaccagcaacuuccgggugcagcccacugagagcaucgugcgguuccccaacauuaccaaccugugucccuucggcgagguguucaacgccacccgguucgccagcguguacgccuggaaccggaagcggaucagcaacugcguggccgacuacagcgugcuguacaacagcgccagcuucagcaccuucaagugcuacggcgugagcccuaccaagcugaacgaccugugcuucaccaacguguacgcugacagcuucgugauccggggcgacgaggugcggcagaucgcccccggccagaccggcaagaucgccgacuacaacuacaagcugcccgacgacuucaccggcugcgugaucgccuggaacagcaacaaccuggacagcaaggugggcggcaacuacaacuaccuguaccggcuguuccguaagagcaaccugaagccauucgagcgggacaucagcaccgagaucuaccaggccggcagcacccccugcaacgguguggagggcuuuaacugcuacuucccccugcagagcuacggcuuccagcccaccaacggcgugggcuaccagcccuaccgggugguggugcugagcuucgagcugcugcacgcccccgccaccgugugcggcccuaaaaagagcaccaaccuggugaagaacaagugcgugaacuucaauuucaacggccugaccggcaccggcgugcugaccgagagcaacaagaaguuccugcccuuccagcaguucggccgggauaucgccgacaccaccgacgcagugcgggacccccagacccuggagauccuggacaucaccccaugcagcuucggcggcgugagcgucaucacccccggcacaaacaccagcaaccagguggccgugcuguaccagggagugaacugcaccgaggugcccguggccauccacgccgaccagcugacccccaccuggcggguguacagcaccggcagcaacguguuccagacccgggccggcugccugaucggcgccgagcacgugaacaacuccuacgagugcgacauccccaucggcgcuggcaucugcgccagcuaccagacccagaccaacagcccccggcgggcccggagcguggccagccagagcaucaucgccuacaccaugagcuuaggcgccgagaacagcguggccuacagcaacaacagcaucgcgaucccuaccaacuucaccaucagcgugaccaccgagauacugcccgugagcaugaccaagaccagcguggacuguaccauguacaucugcggcgacagcaccgagugcagcaaccugcugcugcaguacggcagcuucugcacccagcugaaccgggcccugaccggcaucgccguggagcaggacaagaacacccaagagguguucgcccaggugaagcagaucuacaagacucccccaaucaaggacuucggcggcuucaacuucagccagauccugcccgaccccagcaagcccagcaagcggagcuucaucgaggaccugcuguucaacaaggugacccuggccgacgccggcuucaucaagcaguacggcgacugccugggggauaucgccgcucgggaccugaucugcgcccagaaguucaacggccugaccgugcugcccccucugcugaccgacgagaugaucgcccaguacaccagcgcccugcuugccggcaccaucaccagcggcuggaccuucggcgccggcgcagcccugcagauccccuucgccaugcagauggccuaccgguucaacggcaucggcgugacccagaacgugcuguacgagaaccagaagcugaucgccaaccaguucaacagcgccaucggcaagauccaggacagccugagcagcaccgccagcgcccugggcaagcugcaggacguggugaaccagaacgcucaggcccugaacacccuggugaagcagcugagcagcaacuucggcgccaucagcucagugcugaaugacauccugagcaggcuggaucccccagaggccgaggugcagaucgaccggcugaucaccggccggcugcagagccugcagaccuacgugacccagcagcugauccgggccgccgagauccgggccagcgccaaccuggcagccaccaagaugagcgagugcgugcugggccagagcaagcggguggacuuuugcggcaagggcuaccaccugaugagcuucccccagagcgcuccccacggcgugguguuccuccacgugacauacguccccgcccaggagaagaacuucaccaccgcccccgccauuugccacgacggcaaggcccacuucccccgggagggaguguucgugagcaacggcacccacugguucgugacccagcggaacuucuacgagccucagaucaucaccaccgacaacaccuucgugagcggcaacugcgacguggugaucggcaucgugaacaacaccguguacgacccccugcagcccgagcuggacagcuucaaggaggagcuggacaaguacuucaagaaccacaccagcccagacguggaccugggcgacaucagcggcaucaacgccagcguggugaacauccagaaggagaucgaccggcugaacgagguggccaagaaccugaacgagagccugaucgaccugcaggagcugggcaaguacgagcaguacaucaaguggcccugguacaucuggcugggcuucaucgccggccugaucgccaucgugaucgugaccaucaugcugugcugcaugaccagcugcuguagcugccugaagggcugcugcagcugcggcagcugcugcaaguucgacgaggacgacagcgagcccgugcugaagggcgugaagcugcacuacaccuga

SEQ ID NO: 23141 - RNA, 3816 nt, Artificial Sequence
  SARS-CoV-2/Wuhan/WIV05/2019__EPI_ISL_402128 spike protein CDS gc (1-1273)(K986P_V987P_H69del_V70del_A222V_Y453F_S477N_D614G_I692V)
auguucguguuccuggugcugcugccccuggugagcagccagugcgugaaccugaccacccggacccagcugcccccugccuacaccaacagcuucacccggggcguguacuaccccgacaagguguuccggagcagcgugcugcacagcacccaggaccuguuccugcccuucuucagcaacgugaccugguuccacgccaucagcggcaccaacggcaccaagcgguucgacaacccagugcugcccuucaacgacggcguguacuucgccagcaccgagaagucaaacaucauccggggcuggaucuucggcaccacccuggacagcaagacacagagccugcugaucgugaacaacgccaccaacguggugaucaaggugugcgaguuucaguucugcaacgaccccuuccugggcguguacuaccacaagaacaacaagagcuggauggagagcgaguuccggguguacagcagcgcuaacaauugcaccuucgaguacgucagccagcccuuccugauggaccucgagggcaagcagggcaacuucaagaaccugcgggaguucguguucaagaacaucgauggcuacuucaagaucuacagcaagcacacccccaucaaccuggugcgggaccugccccagggauucagcgugcuggagccucugguggaccugcccaucggcaucaacaucaccagguuccagacccugcuggcccugcaccggagcuaccugacccccggcgacagcagcagcggcuggaccgccggcgccgccgccuacuacgugggcuaccugcagccacggaccuuccugcugaaguacaacgagaacggcaccaucaccgacgcaguggacugcgcccuggacccccugagcgagaccaagugcacccuaaagagcuucaccguggagaagggcaucuaccagaccagcaacuuccgggugcagcccacugagagcaucgugcgguuccccaacauuaccaaccugugucccuucggcgagguguucaacgccacccgguucgccagcguguacgccuggaaccggaagcggaucagcaacugcguggccgacuacagcgugcuguacaacagcgccagcuucagcaccuucaagugcuacggcgugagcccuaccaagcugaacgaccugugcuucaccaacguguacgccgacagcuucgugauccggggcgacgaggugcggcagaucgcucccggccagaccggcaagaucgccgacuacaacuacaagcugcccgacgacuucaccggcugcgugaucgccuggaacagcaacaaccuggacagcaaggugggcggcaacuacaacuaccuguuccggcuguuccguaagagcaaccugaagccauuugagcgggacaucagcaccgagaucuaccaggccggcaacacccccugcaacgguguggagggcuucaacugcuacuucccccugcagagcuacggcuuccagcccaccaacggcgugggcuaccagcccuaccgggugguggugcugagcuucgagcugcugcacgcccccgccaccgugugcggcccuaaaaagagcaccaaccuggugaagaacaagugcgugaauuucaacuucaacggccugaccggcaccggcgugcugaccgagagcaacaagaaguuccugcccuuccagcaguucggccgggauaucgccgacaccaccgacgccgugcgggacccccagacccuggagauccuggacaucaccccaugcagcuucggcggcgugagcgucaucacccccggcacaaacaccagcaaccagguggcagugcuguaccagggagugaacugcaccgaggugcccguggccauccacgccgaccagcugacccccaccuggcggguguacagcaccggcagcaacguguuccagacccgggccggcugccugaucggcgccgagcacgugaacaacagcuacgagugcgacauccccaucggcgccggcaucugcgcuuccuaccagacccagaccaacagcccccggcgggcccggagcguggccagccagagcgugaucgccuacaccaugagcuuaggcgccgagaacagcguggccuacagcaacaacagcaucgccaucccuaccaacuucaccaucagcgugaccaccgagauccugcccgugagcaugaccaagaccagcguggacuguaccauguacauaugcggcgacagcaccgagugcagcaaccugcugcugcaguacggcagcuucugcacccagcugaaccgggcgcugaccggcaucgccguggagcaggacaagaacacccaagagguguucgcccaggugaagcagaucuacaagacucccccaaucaaggacuucggcggcuucaacuucagccagauccugcccgaccccagcaagcccagcaagcggagcuucaucgaggaccugcuguucaacaaggugacccuggccgacgccggcuucaucaagcaguacggcgacugccugggggauaucgccgcccgggaccugaucugcgcucagaaguucaacggccugaccgugcugcccccucugcugaccgacgagaugaucgcccaguacaccagcgcccugcuugccggcaccaucaccagcggcuggaccuucggcgccggcgccgcacugcagauccccuucgccaugcagauggccuaccgguucaacggcaucggcgugacccagaacgugcuguacgagaaccagaagcugaucgccaaccaguucaacagcgccaucggcaagauccaggacagccugagcagcaccgccagcgcccugggcaagcugcaggacguggugaaccagaacgcccaggcucugaacacccuggugaagcagcugagcagcaauuuuggcgccaucagcagcgugcugaacgacauccugucaaggcuggaucccccagaggccgaggugcagaucgaccggcugaucaccggccggcugcagagccugcagaccuacgugacccagcagcugauccgggccgccgagauccgggccagcgccaaccuggccgcaaccaagaugagcgagugcgugcugggccagagcaagcggguggacuucugcggcaagggcuaccaccugaugagcuucccccagagcgcuccccacggcgugguguuccuccacgucacauacgugcccgcccaggagaagaacuucaccaccgcccccgccaucugccacgacggcaaggcccacuucccccgggagggaguguucgugagcaacggcacccacugguucgugacccagcggaacuucuacgagccucagauuaucaccaccgacaacaccuucgugagcggcaacugcgacguggugaucggcaucgugaacaacaccguguacgacccccugcagcccgagcuggacagcuucaaggaggagcuggacaaguacuucaagaaccacaccagcccagacguggaccugggcgacaucagcggcaucaacgccagcguggugaacauccagaaggagaucgaccggcugaacgagguggccaagaaccugaacgagagccugaucgaccugcaggagcugggcaaguacgagcaguacaucaaguggcccugguacaucuggcugggcuucaucgccggccugaucgccaucgugauggugaccaucaugcugugcugcaugaccagcugcuguagcugccugaagggcugcugcagcugcggcagcugcugcaaguucgacgaggacgacagcgagcccgugcugaagggcgugaagcugcacuacaccuga

SEQ ID NO: 23142 - RNA, 3816 nt, Artificial Sequence
  SARS-CoV-2/Wuhan/WIV05/2019__EPI_ISL_402128 spike protein CDS gc (1-1273)(K986P_V987P_H69del_V70del_Y453F_D614G_I692V_M1229I)
auguucguguuccuggugcugcugccccuggugagcagccagugcgugaaccugaccacccggacccagcugcccccugccuacaccaacagcuucacccggggcguguacuaccccgacaagguguuccggagcagcgugcugcacagcacccaggaccuguuccugcccuucuucagcaacgugaccugguuccacgccaucagcggcaccaacggcaccaagcgguucgacaacccagugcugcccuucaacgacggcguguacuucgccagcaccgagaagucaaacaucauccggggcuggaucuucggcaccacccuggacagcaagacacagagccugcugaucgugaacaacgccaccaacguggugaucaaggugugcgaguuucaguucugcaacgaccccuuccugggcguguacuaccacaagaacaacaagagcuggauggagagcgaguuccggguguacagcagcgcuaacaauugcaccuucgaguacgucagccagcccuuccugauggaccucgagggcaagcagggcaacuucaagaaccugcgggaguucguguucaagaacaucgauggcuacuucaagaucuacagcaagcacacccccaucaaccuggugcgggaccugccccagggauucagcgcccuggagccucugguggaccugcccaucggcaucaacaucaccagguuccagacccugcuggcccugcaccggagcuaccugacccccggcgacagcagcagcggcuggaccgccggcgccgccgcauacuacgugggcuaccugcagccacggaccuuccugcugaaguacaacgagaacggcaccaucaccgacgccguggacugcgcccuggacccccugagcgagaccaagugcacccuaaagagcuucaccguggagaagggcaucuaccagaccagcaacuuccgggugcagcccacugagagcaucgugcgguuccccaacauuaccaaccugugucccuucggcgagguguucaacgccacccgguucgccagcguguacgccuggaaccggaagcggaucagcaacugcguggccgacuacagcgugcuguacaacagcgccagcuucagcaccuucaagugcuacggcgugagcccuaccaagcugaacgaccugugcuucaccaacguguacgcugacagcuucgugauccggggcgacgaggugcggcagaucgcccccggccagaccggcaagaucgccgacuacaacuacaagcugcccgacgacuucaccggcugcgugaucgccuggaacagcaacaaccuggacagcaaggugggcggcaacuacaacuaccuguuccggcuguuccguaagagcaaccugaagccauuugagcgggacaucagcaccgagaucuaccaggccggcagcacccccugcaacgguguggagggcuucaacugcuacuucccccugcagagcuacggcuuccagcccaccaacggcgugggcuaccagcccuaccgggugguggugcugagcuucgagcugcugcacgcccccgccaccgugugcggcccuaaaaagagcaccaaccuggugaagaacaagugcgugaacuucaauuucaacggccugaccggcaccggcgugcugaccgagagcaacaagaaguuccugcccuuccagcaguucggccgggauaucgccgacaccaccgacgcagugcgggacccccagacccuggagauccuggacaucaccccaugcagcuucggcggcgugagcgugaucacccccggcacaaacaccagcaaccaggucgccgugcuguaccagggagugaacugcaccgaggugcccguggccauccacgccgaccagcugacccccaccuggcggguguacagcaccggcagcaacguguuccagacccgggccggcugccugaucggcgccgagcacgugaacaacuccuacgagugcgacauccccaucggcgcuggcaucugcgccagcuaccagacccagaccaacagcccccggcgggcccggagcguggccagccagagcgugaucgccuacaccaugagcuuaggcgccgagaacagcguggccuacagcaacaacagcaucgcgaucccuaccaacuucaccaucagcgugaccaccgagauccugcccgugagcaugaccaagaccagcguggacuguaccauguacauaugcggcgacagcaccgagugcagcaaccugcugcugcaguacggcagcuucugcacccagcugaaccgggcccugaccggcaucgccguggagcaggacaagaacacccaagagguguucgcccaggugaagcagaucuacaagacucccccaaucaaggacuucggcggcuucaacuucagccagauccugcccgaccccagcaagcccagcaagcggagcuucaucgaggaccugcuguucaacaaggugacccuggccgacgccggcuucaucaagcaguacggcgacugccugggggauaucgccgcucgggaccugaucugcgcccagaaguucaacggccugaccgugcugcccccucugcugaccgacgagaugaucgcccaguacaccagcgcccugcuugccggcaccaucaccagcggcuggaccuucggcgccggcgcagcccugcagauccccuucgccaugcagauggccuaccgguucaacggcaucggcgugacccagaacgugcuguacgagaaccagaagcugaucgccaaccaguucaacagcgccaucggcaagauccaggacagccugagcagcaccgccagcgcccugggcaagcugcaggacguggugaaccagaacgcucaggcccugaacacccuggugaagcagcugagcagcaacuuuggcgccaucagcucagugcugaaugacauccugagcaggcuggaucccccagaggccgaggugcagaucgaccggcugaucaccggccggcugcagagccugcagaccuacgugacccagcagcugauccgggccgccgagauccgggccagcgccaaccuggcagccaccaagaugagcgagugcgugcugggccagagcaagcggguggacuucugcggcaagggcuaccaccugaugagcuucccccagagcgcuccccacggcgugguguuccuccacgugacauacguccccgcccaggagaagaacuucaccaccgcccccgccaucugccacgacggcaaggcccacuucccccgggagggaguguucgugagcaacggcacccacugguucgugacccagcggaacuucuacgagccucagauuaucaccaccgacaacaccuucgugagcggcaacugcgacguggugaucggcaucgugaacaacaccguguacgacccccugcagcccgagcuggacagcuucaaggaggagcuggacaaguacuucaagaaccacaccagcccagacguggaccugggcgacaucagcggcaucaacgccagcguggugaacauccagaaggagaucgaccggcugaacgagguggccaagaaccugaacgagagccugaucgaccugcaggagcugggcaaguacgagcaguacaucaaguggcccugguacaucuggcugggcuucaucgccggccugaucgccaucgugaucgugaccaucaugcugugcugcaugaccagcugcuguagcugccugaagggcugcugcagcugcggcagcugcugcaaguucgacgaggacgacagcgagcccgugcugaagggcgugaagcugcacuacaccuga

SEQ ID NO: 23143 - RNA, 3813 nt, Artificial Sequence
  SARS-CoV-2/Wuhan/WIV05/2019__EPI_ISL_402128 spike protein CDS gc (1-1273)(K986P_V987P_K986P_V987P_H69del_V70del_Y144del_N501Y_A570 D_D614G_P681H_T716I_S982A_D1118H)
auguucguguuccuggugcugcugccccuggugagcagccagugcgugaaccugaccacccggacccagcugcccccugccuacaccaacagcuucacccggggcguguacuaccccgacaagguguuccggagcagcgugcugcacagcacccaggaccuguuccugcccuucuucagcaacgugaccugguuccacgccaucagcggcaccaacggcaccaagcgguucgacaacccagugcugcccuucaacgacggcguguacuucgccagcaccgagaagucaaacaucauccggggcuggaucuucggcaccacccuggacagcaagacacagagccugcugaucgugaacaacgccaccaacguggugaucaaggugugcgaguuucaguucugcaacgaccccuuccugggcguguaccacaagaacaacaagagcuggauggagagcgaguuccggguguacagcagcgcuaacaauugcaccuucgaguacgucagccagcccuuccugauggaccucgagggcaagcagggcaacuucaagaaccugcgggaguucguguucaagaacaucgauggcuacuucaagaucuacagcaagcacacccccaucaaccuggugcgggaccugccccagggauucagcgcccuggagccucugguggaccugcccaucggcaucaacaucaccagguuccagacccugcuggcccugcaccggagcuaccugacccccggcgacagcagcagcggcuggaccgccggcgccgccgcauacuacgugggcuaccugcagccacggaccuuccugcugaaguacaacgagaacggcaccaucaccgacgccguggacugcgcccuggacccccugagcgagaccaagugcacccuaaagagcuucaccguggagaagggcaucuaccagaccagcaacuuccgggugcagcccacugagagcaucgugcgguuccccaacauuaccaaccugugucccuucggcgagguguucaacgccacccgguucgccagcguguacgccuggaaccggaagcggaucagcaacugcguggccgacuacagcgugcuguacaacagcgccagcuucagcaccuucaagugcuacggcgugagcccuaccaagcugaacgaccugugcuucaccaacguguacgcugacagcuucgugauccggggcgacgaggugcggcagaucgcccccggccagaccggcaagaucgccgacuacaacuacaagcugcccgacgacuucaccggcugcgugaucgccuggaacagcaacaaccuggacagcaaggugggcggcaacuacaacuaccuguaccggcuguuccguaagagcaaccugaagccauucgagcgggacaucagcaccgagaucuaccaggccggcagcacccccugcaacgguguggagggcuuuaacugcuacuucccccugcagagcuacggcuuccagcccaccuacggcgugggcuaccagcccuaccgggugguggugcugagcuucgagcugcugcacgcccccgccaccgugugcggcccuaaaaagagcaccaaccuggugaagaacaagugcgugaacuucaacuucaauggccugaccggcaccggcgugcugaccgagagcaacaagaaguuccugcccuuccagcaguucggccgggauaucgacgacaccaccgacgccgugcgggacccccagacccuggagauccuggacaucaccccaugcagcuucggcggcgugagcgugaucacccccggcacaaacaccagcaaccaggucgcagugcuguaccagggagugaacugcaccgaggugcccguggccauccacgccgaccagcugacccccaccuggcggguguacagcaccggcagcaacguguuccagacccgggccggcugccugaucggcgccgagcacgugaacaacuccuacgagugcgacauccccaucggcgccggcaucugcgcuagcuaccagacccagaccaacagccaccggcgggcccggagcguggccagccagagcaucaucgccuacaccaugagcuuaggcgccgagaacagcguggccuacagcaacaacagcaucgccauccccaucaacuucaccauaagcgugaccaccgagauccugccugugagcaugaccaagaccagcguggacuguaccauguacaucugcggcgacagcaccgagugcagcaaccugcugcugcaguacggcagcuucugcacccagcugaaccgggcgcugaccggcaucgccguggagcaggacaagaacacccaagagguguucgcccaggugaagcagaucuacaagaccccacccaucaaggacuucggcggcuucaacuucagccagauccugcccgaccccagcaagcccagcaagcggagcuucaucgaggaccugcuguucaacaaggugacucuggccgacgccggcuucaucaagcaguacggcgauugccugggggacaucgccgcccgggaccugaucugcgcucagaaguucaacggccugaccgugcugccuccccugcugaccgacgagaugaucgcccaguacaccagcgcccugcuugccggcaccaucaccagcggcuggaccuucggcgccggcgccgcacugcagauccccuucgccaugcagauggccuaccgguucaacggcaucggcgugacccagaacgugcuguacgagaaccagaagcugaucgccaaccaguucaacagcgccaucggcaagauccaggacagccugagcagcaccgccagcgcccugggcaagcugcaggacguggugaaccagaacgcccaggcucugaacacccuggugaagcagcugagcagcaacuucggcgccaucagcucagugcugaacgacauccuggccaggcuggacccacccgaggccgaggugcagaucgaccggcugaucaccggccggcugcagagccugcagaccuacgugacccagcagcugauccgggccgccgagauucgggccagcgccaaucuggcagccaccaagaugagcgagugcgugcugggccagagcaagcggguggacuuuugcggcaagggcuaccaccugaugagcuucccccagagcgcuccccacggcgugguguuccuccacgugaccuacgugcccgcccaggagaagaacuucacaaccgcccccgccaucugccacgacggcaaggcccacuucccccgggagggagucuucgugagcaacggcacccacugguucgugacccagcggaacuucuacgagccccagaucaucaccacccacaacaccuucgugagcggcaacugcgacguggugaucggcaucgugaacaacaccguguacgacccucugcagcccgagcuggacagcuucaaggaggagcuggacaaguacuucaagaaccacaccagccccgacguggaucugggcgacaucagcggcaucaacgccagcguggugaacauccagaaggagaucgaccggcugaacgagguggccaagaaccugaacgagagccugaucgaccugcaggagcugggcaaguacgagcaguacaucaaguggccaugguacaucuggcugggcuucaucgccggccugaucgccaucgugauggugaccaucaugcugugcugcaugaccagcugcuguagcugccugaagggcugcugcagcugcggcagcugcugcaaguucgacgaggacgacagcgagcccgugcugaagggcgugaagcugcacuacaccuga

SEQ ID NO: 23144 - RNA, 3822 nt, Artificial Sequence
  SARS-CoV-2/Wuhan/WIV05/2019__EPI_ISL_402128 spike protein CDS gc (1-1273)(K986P_V987P_K986P_V987P_K417N_E484K_N501Y_D614G)
auguucguguuccuggugcugcugccccuggugagcagccagugcgugaaccugaccacccggacccagcugcccccugccuacaccaacagcuucacccggggcguguacuaccccgacaagguguuccggagcagcgugcugcacagcacccaggaccuguuccugcccuucuucagcaacgugaccugguuccacgccauccacgugagcggcaccaacggcaccaagcgguucgacaacccagugcugcccuucaacgacggcguguacuucgccagcaccgagaagucaaacaucauccggggcuggaucuucggcaccacccuggacagcaagacacagagccugcugaucgugaacaacgccaccaacguggugaucaaggugugcgaguuucaguucugcaacgaccccuuccugggcguguacuaccacaagaacaacaagagcuggauggagagcgaguuccgggucuacagcagcgcuaacaauugcaccuucgaguacgugagccagcccuuccugauggaccucgagggcaagcagggcaacuucaagaaccugcgggaguucguguucaagaacaucgauggcuacuucaagaucuacagcaagcacacccccaucaaccuggugcgggaccugccccagggauucagcgcccuggagccucugguggaccugcccaucggcaucaacaucaccagguuccagacccugcuggcccugcaccggagcuaccugacccccggcgacagcagcagcggcuggaccgccggcgccgccgcauacuacgugggcuaccugcagccacggaccuuccugcugaaguacaacgagaacggcaccaucaccgacgccguggacugcgcccuggacccccugagcgagaccaagugcacccuaaagagcuucaccguggagaagggcaucuaccagaccagcaacuuccgggugcagcccacugagagcaucgugcgguuccccaacauuaccaaccugugucccuucggcgagguguucaacgccacccgguucgccagcguguacgccuggaaccggaagcggaucagcaacugcguggccgacuacagcgugcuguacaacagcgccagcuucagcaccuucaagugcuacggcgugagcccuaccaagcugaacgaccugugcuucaccaacguguacgcugacagcuucgugauccggggcgacgaggugcggcagaucgcccccggccagaccggcaacaucgccgacuacaacuacaagcugcccgacgacuucaccggcugcgugaucgccuggaacagcaacaaccuggacagcaaggugggcggcaacuacaacuaccuguaccggcuguuccguaagagcaaccugaagccauucgagcgggacaucagcaccgagaucuaccaggccggcagcacccccugcaacggugugaagggcuuuaacugcuacuucccccugcagagcuacggcuuccagcccaccuacggcgugggcuaccagcccuaccgggugguggugcugagcuucgagcugcugcacgcccccgccaccgugugcggcccuaaaaagagcaccaaccuggugaagaacaagugcgugaacuucaauuucaacggccugaccggcaccggcgugcugaccgagagcaacaagaaguuccugcccuuccagcaguucggccgggauaucgccgacaccaccgacgcagugcgggacccccagacccuggagauccuggacaucaccccaugcagcuucggcggcgugagcgucaucacccccggcacaaacaccagcaaccagguggccgugcuguaccagggagugaacugcaccgaggugcccguggccauccacgccgaccagcugacccccaccuggcggguguacagcaccggcagcaacguguuccagacccgggccggcugccugaucggcgccgagcacgugaacaacuccuacgagugcgacauccccaucggcgcuggcaucugcgccagcuaccagacccagaccaacagcccccggcgggcccggagcguggccagccagagcaucaucgccuacaccaugagcuuaggcgccgagaacagcguggccuacagcaacaacagcaucgcgaucccuaccaacuucaccaucagcgugaccaccgagauacugcccgugagcaugaccaagaccagcguggacuguaccauguacaucugcggcgacagcaccgagugcagcaaccugcugcugcaguacggcagcuucugcacccagcugaaccgggcccugaccggcaucgccguggagcaggacaagaacacccaagagguguucgcccaggugaagcagaucuacaagacucccccaaucaaggacuucggcggcuucaacuucagccagauccugcccgaccccagcaagcccagcaagcggagcuucaucgaggaccugcuguucaacaaggugacccuggccgacgccggcuucaucaagcaguacggcgacugccugggggauaucgccgcucgggaccugaucugcgcccagaaguucaacggccugaccgugcugcccccucugcugaccgacgagaugaucgcccaguacaccagcgcccugcuugccggcaccaucaccagcggcuggaccuucggcgccggcgcagcccugcagauccccuucgccaugcagauggccuaccgguucaacggcaucggcgugacccagaacgugcuguacgagaaccagaagcugaucgccaaccaguucaacagcgccaucggcaagauccaggacagccugagcagcaccgccagcgcccugggcaagcugcaggacguggugaaccagaacgcucaggcccugaacacccuggugaagcagcugagcagcaacuucggcgccaucagcucagugcugaaugacauccugagcaggcuggaucccccagaggccgaggugcagaucgaccggcugaucaccggccggcugcagagccugcagaccuacgugacccagcagcugauccgggccgccgagauccgggccagcgccaaccuggcagccaccaagaugagcgagugcgugcugggccagagcaagcggguggacuuuugcggcaagggcuaccaccugaugagcuucccccagagcgcuccccacggcgugguguuccuccacgugacauacguccccgcccaggagaagaacuucaccaccgcccccgccauuugccacgacggcaaggcccacuucccccgggagggaguguucgugagcaacggcacccacugguucgugacccagcggaacuucuacgagccucagaucaucaccaccgacaacaccuucgugagcggcaacugcgacguggugaucggcaucgugaacaacaccguguacgacccccugcagcccgagcuggacagcuucaaggaggagcuggacaaguacuucaagaaccacaccagcccagacguggaccugggcgacaucagcggcaucaacgccagcguggugaacauccagaaggagaucgaccggcugaacgagguggccaagaaccugaacgagagccugaucgaccugcaggagcugggcaaguacgagcaguacaucaaguggcccugguacaucuggcugggcuucaucgccggccugaucgccaucgugauggugaccaucaugcugugcugcaugaccagcugcuguagcugccugaagggcugcugcagcugcggcagcugcugcaaguucgacgaggacgacagcgagcccgugcugaagggcgugaagcugcacuacaccuga

SEQ ID NO: 23145 - RNA, 3813 nt, Artificial Sequence
  SARS-CoV-2/Wuhan/WIV05/2019__EPI_ISL_402128 spike protein CDS gc (1-1273)(K986P_V987P_K986P_V987P_L18F_D80A_D215G_L242del_A243del_ L244del_R246I_K417N_E484K_N501Y_D614G_A701V)
auguucguguuccuggugcugcugccccuggugagcagccagugcgugaacuucaccacccggacccagcugcccccugccuacaccaacagcuucacccggggcguguacuaccccgacaagguguuccggagcagcgugcugcacagcacccaggaccuguuccugcccuucuucagcaacgugaccugguuccacgccauccacgugagcggcaccaacggcaccaagcgguucgccaacccagugcugcccuucaacgacggcguguacuucgccagcaccgagaagucaaacaucauccggggcuggaucuuuggcaccacccuggacagcaagacacagagccugcugaucgugaacaacgcuaccaacguggugaucaaggugugcgaguuccaguucugcaacgaccccuuccugggcguguacuaccacaagaacaacaagagcuggauggagagcgaguuccgggucuacagcagcgccaacaauugcaccuucgaguacgugagccagcccuuccugauggaccuggagggcaagcagggcaacuucaagaaccuccgggaguucguguucaagaacaucgacggcuacuucaagaucuacagcaagcacacccccaucaaccuggugcggggacugccccagggcuucagcgcccuggagccucugguggaucugcccaucggcaucaacaucaccagguuccagacccugcacaucagcuaccugacccccggcgacagcagcagcggcuggaccgccggcgccgccgcauacuacgugggcuaccugcagccacggaccuuccugcugaaguacaacgagaacggcaccaucaccgacgccguggacugcgcccuggacccccugagcgagaccaagugcacccuuaagagcuucaccguggagaagggcaucuaccagaccagcaacuuccgggugcagcccacugagagcauugugcgguuccccaacaucaccaaccugugucccuucggcgagguguucaacgccacccgguucgccagcguguacgccuggaaccggaagcggaucagcaacugcguggccgacuacagcgugcuguacaacagcgccagcuucagcaccuucaagugcuacggcgugagcccuaccaagcugaacgaccugugcuucaccaacguguacgcugacagcuucgugauccggggcgacgaggugcggcagaucgcccccggccagaccggcaacaucgccgacuacaacuacaagcugcccgacgacuucaccggcugcgugaucgccuggaacagcaacaaccuggacagcaaggugggcggcaacuacaacuaccuguaccggcuauuccguaagagcaaccugaagccauuugagcgggacaucagcaccgagaucuaccaggccgguagcacccccugcaacggcgugaagggcuucaacugcuacuucccccugcagagcuacggcuuccagcccaccuacggcgugggcuaccagcccuaccgggugguggugcugagcuucgagcugcugcacgcccccgccaccgugugcggcccuaaaaagagcaccaaccuggugaagaacaagugcgugaacuucaauuucaacggccugaccggcaccggcgugcugaccgagagcaacaagaaguuccugcccuuccagcaguucggccgggacaucgccgacaccaccgaugcagugcgggacccccagacccuggagauccuggacaucaccccaugcagcuucggcggcgugagcgucaucacccccggaacaaacaccagcaaccagguggccgugcuguaccagggcgugaacugcaccgaggugcccguggccauccacgccgaccagcugacccccaccuggcggguguacagcaccggcagcaacguguuccagacccgggccggcugccugaucggcgccgagcacgugaacaacuccuacgagugcgacauccccaucggcgcuggcaucugcgccagcuaccagacccagaccaacagcccccggcgggcccggagcguggccagccagagcaucaucgccuacaccaugagccugggcguggagaacagcguggccuacagcaacaacagcaucgccaucccuaccaacuucaccauaagcgugaccaccgagauccugcccgugagcaugaccaagaccagcguggacuguaccauguacaucugcggcgacagcaccgagugcagcaaccuguuacugcaguacggcagcuucugcacccagcugaaccgggcgcugaccggcaucgccguggagcaggacaagaacacccaagagguguucgcccaggugaagcagaucuacaagacucccccaaucaaggacuucggcggcuucaacuucagccagauccugcccgaccccagcaagcccagcaagcggagcuucaucgaggaccugcuguucaacaaggugacccuggccgacgccggcuucaucaagcaguacggggacugccugggcgacaucgccgcccgggaccugaucugcgcucagaaguucaacggccugaccgugcugcccccucugcugaccgaugagaugaucgcccaguacaccagcgcccugcuggccggcaccaucaccagcggcuggaccuucggcgccggcgccgcacugcagauccccuucgccaugcagauggccuaccgguucaacggcaucggcgugacccagaacgugcuguacgagaaccagaagcugaucgccaaccaguucaacagcgccaucggcaagauccaggacagccugagcagcaccgccagcgcccugggcaagcugcaggacguggugaaccagaacgcccaggcucugaacacccuggugaagcagcugagcagcaacuuuggcgccaucagcucagugcugaaugacauccugagccggcuggaucccccagaggccgaggugcagaucgacaggcugaucaccggccggcugcagagccugcagaccuacgugacccagcagcugauccgggccgccgagauucgggccagcgccaaccuggccgcaaccaagaugagcgagugcgugcugggccagagcaagcggguggacuucugcggcaagggcuaccaccugaugagcuucccccagagcgcuccccacggcgugguguuccugcacgucacauacgugcccgcccaggagaagaacuucaccaccgcccccgccaucugccacgacggaaaggcccacuucccccgggagggcguguucgugagcaacggcacccacugguucgugacccagcggaacuucuacgagccucagaucaucaccaccgacaacaccuucgugagcggcaacugcgacguggugaucggcaucgugaacaacaccguguacgacccccugcagcccgagcuggacagcuucaaggaggagcucgacaaguacuucaagaaccacaccagcccagacguggaccugggcgacaucagcggcaucaacgccagcguggugaacauccagaaggagaucgaccggcugaacgagguggccaagaaccugaacgagagccugaucgaccugcaggagcugggcaaguacgagcaguacaucaaguggcccugguacaucuggcugggcuucaucgccggccugaucgccaucgugauggugaccaucaugcugugcugcaugaccagcugcuguagcugccugaagggcugcugcagcugcggcagcugcugcaaguucgacgaggacgacagcgagcccgugcugaagggcgugaagcugcacuacaccuga

SEQ ID NO: 23146 - RNA, 3822 nt, Artificial Sequence
  SARS-CoV-2/Wuhan/WIV05/2019__EPI_ISL_402128 spike protein CDS gc (1-1273)(K986P_V987P_K986P_V987P_E484K_D614G)
auguucguguuccuggugcugcugccccuggugagcagccagugcgugaaccugaccacccggacccagcugcccccugccuacaccaacagcuucacccggggcguguacuaccccgacaagguguuccggagcagcgugcugcacagcacccaggaccuguuccugcccuucuucagcaacgugaccugguuccacgccauccacgugagcggcaccaacggcaccaagcgguucgacaacccagugcugcccuucaacgacggcguguacuucgccagcaccgagaagucaaacaucauccggggcuggaucuucggcaccacccuggacagcaagacacagagccugcugaucgugaacaacgccaccaacguggugaucaaggugugcgaguuucaguucugcaacgaccccuuccugggcguguacuaccacaagaacaacaagagcuggauggagagcgaguuccgggucuacagcagcgcuaacaauugcaccuucgaguacgugagccagcccuuccugauggaccucgagggcaagcagggcaacuucaagaaccugcgggaguucguguucaagaacaucgauggcuacuucaagaucuacagcaagcacacccccaucaaccuggugcgggaccugccccagggauucagcgcccuggagccucugguggaccugcccaucggcaucaacaucaccagguuccagacccugcuggcccugcaccggagcuaccugacccccggcgacagcagcagcggcuggaccgccggcgccgccgcauacuacgugggcuaccugcagccacggaccuuccugcugaaguacaacgagaacggcaccaucaccgacgccguggacugcgcccuggacccccugagcgagaccaagugcacccuaaagagcuucaccguggagaagggcaucuaccagaccagcaacuuccgggugcagcccacugagagcaucgugcgguuccccaacauuaccaaccugugucccuucggcgagguguucaacgccacccgguucgccagcguguacgccuggaaccggaagcggaucagcaacugcguggccgacuacagcgugcuguacaacagcgccagcuucagcaccuucaagugcuacggcgugagcccuaccaagcugaacgaccugugcuucaccaacguguacgcugacagcuucgugauccggggcgacgaggugcggcagaucgcccccggccagaccggcaagaucgccgacuacaacuacaagcugcccgacgacuucaccggcugcgugaucgccuggaacagcaacaaccuggacagcaaggugggcggcaacuacaacuaccuguaccggcuguuccguaagagcaaccugaagccauucgagcgggacaucagcaccgagaucuaccaggccggcagcacccccugcaacggugugaagggcuuuaacugcuacuucccccugcagagcuacggcuuccagcccaccaacggcgugggcuaccagcccuaccgggugguggugcugagcuucgagcugcugcacgcccccgccaccgugugcggcccuaaaaagagcaccaaccuggugaagaacaagugcgugaacuucaauuucaacggccugaccggcaccggcgugcugaccgagagcaacaagaaguuccugcccuuccagcaguucggccgggauaucgccgacaccaccgacgcagugcgggacccccagacccuggagauccuggacaucaccccaugcagcuucggcggcgugagcgucaucacccccggcacaaacaccagcaaccagguggccgugcuguaccagggagugaacugcaccgaggugcccguggccauccacgccgaccagcugacccccaccuggcggguguacagcaccggcagcaacguguuccagacccgggccggcugccugaucggcgccgagcacgugaacaacuccuacgagugcgacauccccaucggcgcuggcaucugcgccagcuaccagacccagaccaacagcccccggcgggcccggagcguggccagccagagcaucaucgccuacaccaugagcuuaggcgccgagaacagcguggccuacagcaacaacagcaucgcgaucccuaccaacuucaccaucagcgugaccaccgagauacugcccgugagcaugaccaagaccagcguggacuguaccauguacaucugcggcgacagcaccgagugcagcaaccugcugcugcaguacggcagcuucugcacccagcugaaccgggcccugaccggcaucgccguggagcaggacaagaacacccaagagguguucgcccaggugaagcagaucuacaagacucccccaaucaaggacuucggcggcuucaacuucagccagauccugcccgaccccagcaagcccagcaagcggagcuucaucgaggaccugcuguucaacaaggugacccuggccgacgccggcuucaucaagcaguacggcgacugccugggggauaucgccgcucgggaccugaucugcgcccagaaguucaacggccugaccgugcugcccccucugcugaccgacgagaugaucgcccaguacaccagcgcccugcuugccggcaccaucaccagcggcuggaccuucggcgccggcgcagcccugcagauccccuucgccaugcagauggccuaccgguucaacggcaucggcgugacccagaacgugcuguacgagaaccagaagcugaucgccaaccaguucaacagcgccaucggcaagauccaggacagccugagcagcaccgccagcgcccugggcaagcugcaggacguggugaaccagaacgcucaggcccugaacacccuggugaagcagcugagcagcaacuucggcgccaucagcucagugcugaaugacauccugagcaggcuggaucccccagaggccgaggugcagaucgaccggcugaucaccggccggcugcagagccugcagaccuacgugacccagcagcugauccgggccgccgagauccgggccagcgccaaccuggcagccaccaagaugagcgagugcgugcugggccagagcaagcggguggacuuuugcggcaagggcuaccaccugaugagcuucccccagagcgcuccccacggcgugguguuccuccacgugacauacguccccgcccaggagaagaacuucaccaccgcccccgccauuugccacgacggcaaggcccacuucccccgggagggaguguucgugagcaacggcacccacugguucgugacccagcggaacuucuacgagccucagaucaucaccaccgacaacaccuucgugagcggcaacugcgacguggugaucggcaucgugaacaacaccguguacgacccccugcagcccgagcuggacagcuucaaggaggagcuggacaaguacuucaagaaccacaccagcccagacguggaccugggcgacaucagcggcaucaacgccagcguggugaacauccagaaggagaucgaccggcugaacgagguggccaagaaccugaacgagagccugaucgaccugcaggagcugggcaaguacgagcaguacaucaaguggcccugguacaucuggcugggcuucaucgccggccugaucgccaucgugauggugaccaucaugcugugcugcaugaccagcugcuguagcugccugaagggcugcugcagcugcggcagcugcugcaaguucgacgaggacgacagcgagcccgugcugaagggcgugaagcugcacuacaccuga

SEQ ID NO: 23147 - RNA, 3822 nt, Artificial Sequence
  SARS-CoV-2/Wuhan/WIV05/2019__EPI_ISL_402128 spike protein CDS gc (1-1273)(K986P_V987P_K986P_V987P_L18F_T20N_P26S_D138Y_R190S_K417T _E484K_N501Y_D614G_H655Y_T1027I)
auguucguguuccuggugcugcugccccuggugagcagccagugcgugaacuucaccaaccggacccagcugcccagcgccuacaccaacagcuucacccggggcguguacuacccugacaagguguuccggagcagcgugcugcacagcacccaggaccuguuccugcccuucuucagcaacgugaccugguuccacgccauccacgugagcggcaccaacggcaccaagcgguucgacaaccccgugcugccauucaacgacggcguguacuucgccagcaccgagaagucaaacaucauccggggcuggaucuuuggcaccacccuggacagcaagacccagagccugcugaucgugaacaacgccacaaacguggugaucaaggugugcgaguuccaguucugcaacuaccccuuccugggcguguacuaccacaagaacaacaagagcuggauggagagcgaguuccgggucuacagcagcgcuaauaacugcaccuucgaguacgugagccagcccuuccugauggaccuggagggcaagcagggcaacuucaagaaccucagcgaguucguguucaagaacaucgacggcuacuucaagaucuacagcaagcacacccccaucaaccuggugcgggaucugccccagggauucagcgcccuggagccccugguggaccugccuaucggcaucaacaucacccgguuccagacccugcuggcccugcacaggagcuaccugacccccggcgacagcagcagcggcuggaccgccggcgccgccgcauacuacgugggcuaccugcagccccggaccuuccugcugaaguacaacgagaacggcaccaucaccgacgccguggacugcgcccuggacccacugagcgagaccaagugcacccuaaagagcuucaccguggagaagggcaucuaccagaccagcaacuuccgggugcagcccaccgagagcaucgugcgguuccccaacauuacuaaccugugucccuucggcgagguguucaacgccacccgguucgccagcguguacgccuggaaccggaagcggaucagcaacugcguggccgacuacagcgugcuguacaacagcgccagcuucagcaccuucaagugcuacggcgugagccccaccaagcugaacgaccugugcuucaccaacguguacgcugacagcuucgugauccggggcgacgaggugcggcagaucgccccuggccagaccggcaccaucgccgacuacaacuacaagcugcccgacgacuucaccggcugcgugaucgccuggaacagcaacaaccuggacagcaaggugggcggcaacuacaacuaccuguaccggcuguuccguaagagcaaccugaagcccuuugagcgggacaucagcaccgagaucuaccaggccggcagcaccccaugcaacggugugaagggcuucaacugcuacuucccccugcagagcuacggcuuccagcccaccuacggcgugggcuaccagcccuaccgggugguggugcugagcuucgagcugcugcacgcccccgccaccgugugcggccccaaaaagagcaccaaccuggugaagaacaagugcgugaacuucaauuucaacggccugaccggcaccggcgugcugaccgagagcaacaagaaguuccugccuuuccagcaguucggccgggacaucgccgauaccaccgacgcagugcgggacccccagacccuggagauccuggacaucacccccugcagcuucggcggcgugagcgucaucaccccaggcacaaacaccagcaaccagguggccgugcuguaccagggagugaacugcaccgaggugcccguggccauccacgccgaccagcugacccccaccuggcggguguacuccaccggcagcaacguguuccagacccgggccggcugccugaucggcgccgaguacgugaacaacagcuacgagugcgacauccccaucggcgcuggcaucugcgccagcuaccagacccagaccaacagcccccggcgggcccggagcguggccagccagagcaucaucgccuacaccaugagccugggcgccgagaacagcguggccuacagcaacaacagcaucgcgauccccaccaacuucaccaucagcgugaccaccgagauauuaccugugagcaugaccaagaccagcguggacuguaccauguacaucugcggcgacagcaccgagugcagcaaccugcugcugcaguacggcagcuucugcacccagcugaaccgggcccugaccggcaucgccguggagcaggacaagaacacccaagagguguucgcccaggugaagcagaucuacaagacuccacccaucaaggacuucggcggcuucaacuucagccagauccugcccgaccccagcaagcccagcaagcggagcuucaucgaggaccugcuguucaacaaggugacccuggccgacgccggcuucaucaagcaguacggcgacugccugggggacaucgccgcucgggaucugaucugcgcccagaaguucaacggccugaccgugcugccuccccugcugaccgacgagaugaucgcccaguacaccagcgcccugcuggccggcaccaucaccagcggcuggaccuucggcgccggcgcagcccuucagauccccuucgccaugcagauggccuaccgguucaacggcaucggcgugacccagaacgugcuguacgagaaccagaagcugaucgccaaccaguucaacagcgccaucggcaagauccaggacagccugagcagcaccgccagcgcccugggcaagcugcaggacguggugaaccagaacgcucaggcccugaacacccuggugaagcagcugagcucaaacuuuggcgccaucagcagcgugcugaaugacauccugagccggcuggacccacccgaggccgaggugcagaucgacaggcugaucaccggccggcugcagagccugcagaccuacgugacccagcagcugauccgggccgccgagauccgggccagcgccaaccuggcagccauuaagaugagcgagugcgugcugggccagagcaagcggguggacuucugcggcaagggcuaccaccugaugagcuucccccagagcgcuccccacggcgugguguuccugcacgugaccuacguccccgcccaggagaagaacuucacaaccgcccccgccaucugccacgacggcaaggcccacuucccccgggagggaguguucgugagcaacggcacccacugguucgugacccagcggaacuucuacgagccccagaucaucaccaccgacaacaccuucgugagcggcaacugcgacguggugaucggcaucgugaacaacaccguguacgacccucuccagcccgagcuggacagcuucaaggaggagcuggacaaguacuucaagaaccacaccagccccgacguggaccugggcgauaucagcggcaucaacgccagcguggugaacauccagaaggagaucgaccggcugaacgagguggccaagaaccugaacgagagccugaucgaccugcaggagcugggcaaguacgagcaguacaucaaguggccaugguacaucuggcugggcuucaucgccggccugaucgccaucgugauggugaccaucaugcugugcugcaugaccagcugcuguagcugccugaagggcugcugcagcugcggcagcugcugcaaguucgacgaggacgacagcgagcccgugcugaagggcgugaagcugcacuacaccuga

SEQ ID NO: 23148 - RNA, 3822 nt, Artificial Sequence
  SARS-CoV-2/Wuhan/WIV05/2019__EPI_ISL_402128 spike protein CDS gc (1-1273)(K986P_V987P_K986P_V987P_S13I_W152C_L452R_D614G)
auguucguguuccuggugcugcugccccuggugagcauccagugcgugaaccugaccacccggacccagcugcccccugccuacaccaacagcuucacccggggcguguacuaccccgacaagguguuccggagcagcgugcugcacagcacccaggaccuguuccugcccuucuucagcaacgugaccugguuccacgccauccacgugagcggcaccaacggcaccaagcgguucgacaacccagugcugcccuucaacgacggcguguacuucgccagcaccgagaagucaaacaucauccggggcuggaucuucggcaccacccuggacagcaagacacagagccugcugaucgugaacaacgccaccaacguggugaucaaggugugcgaguuucaguucugcaacgaccccuuccugggcguguacuaccacaagaacaacaagagcugcauggagagcgaguuccgggucuacagcagcgcuaacaauugcaccuucgaguacgugagccagcccuuccugauggaccucgagggcaagcagggcaacuucaagaaccugcgggaguucguguucaagaacaucgauggcuacuucaagaucuacagcaagcacacccccaucaaccuggugcgggaccugccccagggauucagcgcccuggagccucugguggaccugcccaucggcaucaacaucaccagguuccagacccugcuggcccugcaccggagcuaccugacccccggcgacagcagcagcggcuggaccgccggcgccgccgcauacuacgugggcuaccugcagccacggaccuuccugcugaaguacaacgagaacggcaccaucaccgacgccguggacugcgcccuggacccccugagcgagaccaaguguacccuaaagagcuucaccguggagaagggcaucuaccagaccagcaacuuccgggugcagcccacugagagcauugugcgguuccccaacaucaccaaccugugccccuucggcgagguguucaacgccacccgguucgccagcguguacgccuggaaccggaagcggaucagcaacugcguggccgacuacagcgugcuguacaacagcgccagcuucagcaccuucaagugcuacggcgugagcccuaccaagcugaacgaccugugcuucaccaacguguacgcugacagcuucgugauccggggcgacgaggugcggcagaucgcccccggccagaccggcaagaucgccgacuacaacuacaagcugcccgacgacuucaccggcugcgugaucgccuggaacagcaacaaccuggacagcaaggugggcggcaacuacaacuaccgguaccggcuguuccguaagagcaaccugaagccauucgagcgggacaucagcaccgagaucuaccaggccggcagcacccccugcaacgguguggagggcuuuaacugcuacuucccccugcagagcuacggcuuccagcccaccaacggcgugggcuaccagcccuaccgggugguggugcugagcuucgagcugcugcacgcccccgccaccgugugcggcccuaaaaagagcaccaaccuggugaagaacaagugcgugaacuucaauuucaacggccugaccggcaccggcgugcugaccgagagcaacaagaaguuccugcccuuccagcaguucggccgggauaucgccgacaccaccgacgcagugcgggacccccagacccuggagauccuggacaucaccccaugcagcuucggcggcgugagcgucaucacccccggcacaaacaccagcaaccagguggccgugcuguaccagggagugaacugcaccgaggugcccguggccauccacgccgaccagcugacccccaccuggcggguguacagcaccggcagcaacguguuccagacccgggccggcugccugaucggcgccgagcacgugaacaacagcuacgagugcgacauccccaucggcgcuggcaucugugccuccuaccagacccagaccaacagcccccggcgggcccggagcguggccagccagagcaucaucgccuacaccaugagccugggcgccgagaacagcguggccuacagcaacaacagcaucgcgaucccuaccaacuucaccauaagcgugaccaccgagaucuuacccgugagcaugaccaagaccagcguggacugcaccauguacaucugcggcgacagcaccgagugcagcaaccugcugcugcaguacggcagcuucugcacccagcugaaccgggcccugaccggcaucgccguggagcaggacaagaacacccaagagguguucgcccaggugaagcagaucuacaagacucccccaaucaaggacuucggcggcuucaacuucagccagauccugcccgaccccagcaagcccagcaagcggagcuucaucgaggaccugcuguucaacaaggugacccuggccgacgccggcuucaucaagcaguacggcgacugccugggggauaucgccgcucgggaccugaucugcgcccagaaguucaacggccugaccgugcugcccccucugcugaccgacgagaugaucgcccaguacaccagcgcccugcuggccggcaccaucaccagcggcuggaccuucggcgccggcgcagcccuucagauccccuucgccaugcagauggccuacagguucaacggcaucggcgugacccagaacgugcuguacgagaaccagaagcugaucgccaaccaguucaacagcgccaucggcaagauccaggacagccugagcagcaccgccagcgcccugggcaagcugcaggacguggugaaccagaacgcucaggcccugaacacccuggugaagcagcugagcagcaacuucggcgccaucagcagcgugcugaaugacauccugucacggcuggaucccccagaggccgaggugcagaucgaccggcugaucaccggccggcugcagagccugcagaccuacgugacccagcagcugauccgggccgccgagauucgggccagcgccaaccuggcagccaccaagaugagcgagugcgugcugggccagagcaagcggguggacuuuugcggcaagggcuaccaccugaugagcuucccccagagcgcuccccacggcgugguguuccugcacgugacauacguccccgcccaggagaagaacuucaccaccgcccccgccaucugccacgacggcaaggcccacuucccccgggagggaguguucgugagcaacggcacccacugguucgugacccagcggaacuucuacgagccucagaucaucaccaccgacaacaccuucgugagcggcaacugcgacguggugaucggcaucgugaacaacaccguguacgacccccuccagcccgagcuggacagcuucaaggaggagcuggacaaguacuucaagaaccacaccagcccagacguggaccugggcgacaucagcggcaucaacgccagcguggugaacauccagaaggagaucgaccggcugaacgagguggccaagaaccugaacgagagccugaucgaccugcaggagcugggcaaguacgagcaguacaucaaguggcccugguacaucuggcugggcuucaucgccggccugaucgccaucgugauggugaccaucaugcugugcugcaugaccagcuguugcagcugccugaagggcugcugcagcugcggcagcugcugcaaguucgacgaggacgacagcgagcccgugcugaagggcgugaagcugcacuacaccuga

SEQ ID NO: 23149 - RNA, 3822 nt, Artificial Sequence; identical to SEQ ID NO: 146
  SARS-CoV-2/Wuhan/WIV05/2019__EPI_ISL_402128 spike protein CDS gc mod (1-1273)(K986P_V987P)

SEQ ID NO: 23150 - RNA, 3822 nt, Artificial Sequence
  SARS-CoV-2/Wuhan/WIV05/2019__EPI_ISL_402128 spike protein CDS gc mod (1-1273)(K986P_V987P_ D614G)
auguucguguuucuggugcugcugccccugguguccagccagugugugaaccugaccaccagaacacagcugccuccagccuacaccaacagcuucaccagaggcguguacuaccccgacaagguguucagauccagcgugcugcacucuacccaggaccuguuccugccuuucuucagcaacgugaccugguuccacgccauccacguguccggcaccaauggcaccaagagauucgacaaccccgugcugcccuucaacgacgggguguacuuugccagcaccgagaaguccaacaucaucagaggcuggaucuucggcaccacacuggacagcaagacccagagccugcugaucgugaacaacgccaccaacguggucaucaaagugugcgaguuccaguucugcaacgaccccuuccugggcgucuacuaccacaagaacaacaagagcuggauggaaagcgaguuccggguguacagcagcgccaacaacugcaccuucgaguacgugucccagccuuuccugauggaccuggaaggcaagcagggcaacuucaagaaccugcgcgaguucguguucaagaacaucgacggcuacuucaaaaucuacagcaagcacaccccuaucaaccucgugcgggaucugccucagggcuucucugcucuggaaccccugguggaucugcccaucggcaucaacaucacccgguuucagacacugcuggcccugcacagaagcuaccugacaccuggcgauagcagcagcggauggacagcuggugccgccgcuuacuaugugggcuaccugcagccuagaaccuuccugcugaaguacaacgagaacggcaccaucaccgacgccguggauugugcucuggauccucugagcgagacaaagugcacccugaaguccuucaccguggaaaagggcaucuaccagaccagcaacuuccgggugcagcccaccgaauccaucgugcgguuccccaauaucaccaaucugugccccuucggcgagguguucaaugccaccagauucgccucuguguacgccuggaaccggaagcggaucagcaauugcguggccgacuacuccgugcuguacaacuccgccagcuucagcaccuucaagugcuacggcguguccccuaccaagcugaacgaccugugcuucacaaacguguacgccgacagcuucgugauccggggagaugaagugcggcagauugccccuggacagacaggcaagaucgccgacuacaacuacaagcugcccgacgacuucaccggcugugugauugccuggaacagcaacaaccuggacuccaaagucggcggcaacuacaauuaccuguaccggcuguuccggaaguccaaucugaagcccuucgagcgggacaucagcaccgaaaucuaucaggccggcagcaccccuugcaacggcguggaaggcuucaacugcuacuucccacugcaguccuacggcuuucagcccacaaauggcgugggcuaucagcccuacagagugguggugcugagcuucgaacugcugcaugcuccugccacagugugcggcccuaagaaaagcaccaaucucgugaagaacaaaugcgugaacuucaacuucaacggccugaccggcaccggcgugcugacagagagcaacaagaaguuccugccauuccagcaguuuggccgggauaucgccgauaccacagacgccguuagagauccccagacacuggaaauccuggacaucaccccaugcagcuucggcggagugucugugaucaccccuggcaccaacaccagcaaucagguggcagugcuguaccagggcgugaacuguaccgaagugcccguggccauucacgccgaucagcugacaccuacauggcggguguacuccaccggcagcaauguguuucagaccagagccggcugucugaucggagccgagcacgugaacaauagcuacgagugcgacauccccaucggcgcuggcaucugugccagcuaccagacacagacaaacagccccagacgggcuagaagcguggccagccagagcaucauugccuacacaaugucucugggcgccgagaacagcguggccuacuccaacaacucuaucgcuauccccaccaacuucaccaucagcgugaccaccgagauccugccuguguccaugaccaagaccagcguggacugcaccauguacaucugcggcgauuccaccgagugcuccaaccugcugcugcaguacggcagcuucugcacccagcugaauagagcccugacagggaucgccguggaacaggacaagaacacccaagagguguucgcccaagugaagcaaaucuacaagaccccuccuaucaaggacuucggcggcuucaauuucagccagauucugcccgauccuagcaagcccagcaagcggagcuucaucgaggaccugcuguucaacaaagugacacuggccgacgccggcuucaucaagcaguauggcgauugucugggcgacauugccgccagggaucugauuugcgcccagaaguuuaacggacugacagugcugccuccucugcugaccgaugagaugaucgcccaguacacaucugcccugcuggccggcacaaucacaagcggcuggacauuuggagcuggcgccgcucugcagauccccuuugcuaugcagauggccuaccgguucaacggcaucggagugacccagaaugugcuguacgagaaccagaagcugaucgccaaccaguucaacagcgccaucggcaagauccaggacagccugagcagcacagcaagcgcccugggaaagcugcaggacguggucaaccagaaugcccaggcacugaacacccuggucaagcagcuguccuccaacuucggcgccaucagcucugugcugaacgauauccugagcagacuggacccuccugaggccgaggugcagaucgacagacugaucacaggcagacugcagagccuccagacauacgugacccagcagcugaucagagccgccgagauuagagccucugccaaucuggccgccaccaagaugucugagugugugcugggccagagcaagagaguggacuuuugcggcaagggcuaccaccugaugagcuucccucagucugccccucacggcgugguguuucugcacgugacauaugugcccgcucaagagaagaauuucaccaccgcuccagccaucugccacgacggcaaagcccacuuuccuagagaaggcguguucguguccaacggcacccauugguucgugacacagcggaacuucuacgagccccagaucaucaccaccgacaacaccuucgugucuggcaacugcgacguugugaucggcauugugaacaauaccguguacgacccucugcagcccgagcuggacagcuucaaagaggaacuggacaaguacuuuaagaaccacacaagccccgacguggaccugggcgauaucagcggaaucaaugccagcgucgugaacauccagaaagagaucgaccggcugaacgagguggccaagaaucugaacgagagccugaucgaccugcaagaacuggggaaguacgagcaguacaucaaguggcccugguacaucuggcugggcuuuaucgccggacugauugccaucgugauggucacaaucaugcuguguugcaugaccagcugcuguagcugccugaagggcuguuguagcuguggcagcugcugcaaguucgacgaggacgauucugagcccgugcugaagggcgugaaacugcacuacaccuga

SEQ ID NO: 23151 - RNA, 3822 nt, Artificial Sequence
  SARS-CoV-2/Wuhan/WIV05/2019__EPI_ISL_402128 spike protein CDS gc mod (1-1273)(K986P_V987P_A222V_D614G)
auguucguguuucuggugcugcugccccugguguccagccagugugugaaccugaccaccagaacacagcugccuccagccuacaccaacagcuucaccagaggcguguacuaccccgacaagguguucagauccagcgugcugcacucuacccaggaccuguuccugccuuucuucagcaacgugaccugguuccacgccauccacguguccggcaccaauggcaccaagagauucgacaaccccgugcugcccuucaacgacgggguguacuuugccagcaccgagaaguccaacaucaucagaggcuggaucuucggcaccacacuggacagcaagacccagagccugcugaucgugaacaacgccaccaacguggucaucaaagugugcgaguuccaguucugcaacgaccccuuccugggcgucuacuaccacaagaacaacaagagcuggauggaaagcgaguuccggguguacagcagcgccaacaacugcaccuucgaguacgugucccagccuuuccugauggaccuggaaggcaagcagggcaacuucaagaaccugcgcgaguucguguucaagaacaucgacggcuacuucaaaaucuacagcaagcacaccccuaucaaccucgugcgggaucugccucagggcuucucugugcuggaaccccugguggaucugcccaucggcaucaacaucacccgguuucagacacugcuggcccugcacagaagcuaccugacaccuggcgauagcagcagcggauggacagcuggugccgccgcuuacuaugugggcuaccugcagccuagaaccuuccugcugaaguacaacgagaacggcaccaucaccgacgccguggauugugcucuggauccucugagcgagacaaagugcacccugaaguccuucaccguggaaaagggcaucuaccagaccagcaacuuccgggugcagcccaccgaauccaucgugcgguuccccaauaucaccaaucugugccccuucggcgagguguucaaugccaccagauucgccucuguguacgccuggaaccggaagcggaucagcaauugcguggccgacuacuccgugcuguacaacuccgccagcuucagcaccuucaagugcuacggcguguccccuaccaagcugaacgaccugugcuucacaaacguguacgccgacagcuucgugauccggggagaugaagugcggcagauugccccuggacagacaggcaagaucgccgacuacaacuacaagcugcccgacgacuucaccggcugugugauugccuggaacagcaacaaccuggacuccaaagucggcggcaacuacaauuaccuguaccggcuguuccggaaguccaaucugaagcccuucgagcgggacaucagcaccgaaaucuaucaggccggcagcaccccuugcaacggcguggaaggcuucaacugcuacuucccacugcaguccuacggcuuucagcccacaaauggcgugggcuaucagcccuacagagugguggugcugagcuucgaacugcugcaugcuccugccacagugugcggcccuaagaaaagcaccaaucucgugaagaacaaaugcgugaacuucaacuucaacggccugaccggcaccggcgugcugacagagagcaacaagaaguuccugccauuccagcaguuuggccgggauaucgccgauaccacagacgccguuagagauccccagacacuggaaauccuggacaucaccccaugcagcuucggcggagugucugugaucaccccuggcaccaacaccagcaaucagguggcagugcuguaccagggcgugaacuguaccgaagugcccguggccauucacgccgaucagcugacaccuacauggcggguguacuccaccggcagcaauguguuucagaccagagccggcugucugaucggagccgagcacgugaacaauagcuacgagugcgacauccccaucggcgcuggcaucugugccagcuaccagacacagacaaacagccccagacgggcuagaagcguggccagccagagcaucauugccuacacaaugucucugggcgccgagaacagcguggccuacuccaacaacucuaucgcuauccccaccaacuucaccaucagcgugaccaccgagauccugccuguguccaugaccaagaccagcguggacugcaccauguacaucugcggcgauuccaccgagugcuccaaccugcugcugcaguacggcagcuucugcacccagcugaauagagcccugacagggaucgccguggaacaggacaagaacacccaagagguguucgcccaagugaagcaaaucuacaagaccccuccuaucaaggacuucggcggcuucaauuucagccagauucugcccgauccuagcaagcccagcaagcggagcuucaucgaggaccugcuguucaacaaagugacacuggccgacgccggcuucaucaagcaguauggcgauugucugggcgacauugccgccagggaucugauuugcgcccagaaguuuaacggacugacagugcugccuccucugcugaccgaugagaugaucgcccaguacacaucugcccugcuggccggcacaaucacaagcggcuggacauuuggagcuggcgccgcucugcagauccccuuugcuaugcagauggccuaccgguucaacggcaucggagugacccagaaugugcuguacgagaaccagaagcugaucgccaaccaguucaacagcgccaucggcaagauccaggacagccugagcagcacagcaagcgcccugggaaagcugcaggacguggucaaccagaaugcccaggcacugaacacccuggucaagcagcuguccuccaacuucggcgccaucagcucugugcugaacgauauccugagcagacuggacccuccugaggccgaggugcagaucgacagacugaucacaggcagacugcagagccuccagacauacgugacccagcagcugaucagagccgccgagauuagagccucugccaaucuggccgccaccaagaugucugagugugugcugggccagagcaagagaguggacuuuugcggcaagggcuaccaccugaugagcuucccucagucugccccucacggcgugguguuucugcacgugacauaugugcccgcucaagagaagaauuucaccaccgcuccagccaucugccacgacggcaaagcccacuuuccuagagaaggcguguucguguccaacggcacccauugguucgugacacagcggaacuucuacgagccccagaucaucaccaccgacaacaccuucgugucuggcaacugcgacguugugaucggcauugugaacaauaccguguacgacccucugcagcccgagcuggacagcuucaaagaggaacuggacaaguacuuuaagaaccacacaagccccgacguggaccugggcgauaucagcggaaucaaugccagcgucgugaacauccagaaagagaucgaccggcugaacgagguggccaagaaucugaacgagagccugaucgaccugcaagaacuggggaaguacgagcaguacaucaaguggcccugguacaucuggcugggcuuuaucgccggacugauugccaucgugauggucacaaucaugcuguguugcaugaccagcugcuguagcugccugaagggcuguuguagcuguggcagcugcugcaaguucgacgaggacgauucugagcccgugcugaagggcgugaaacugcacuacaccuga

SEQ ID NO: 23152 - RNA, 3822 nt, Artificial Sequence
  SARS-CoV-2/Wuhan/WIV05/2019__EPI_ISL_402128 spike protein CDS gc mod (1-1273)(K986P_V987P_N439K_D614G)
auguucguguuucuggugcugcugccccugguguccagccagugugugaaccugaccaccagaacacagcugccuccagccuacaccaacagcuucaccagaggcguguacuaccccgacaagguguucagauccagcgugcugcacucuacccaggaccuguuccugccuuucuucagcaacgugaccugguuccacgccauccacguguccggcaccaauggcaccaagagauucgacaaccccgugcugcccuucaacgacgggguguacuuugccagcaccgagaaguccaacaucaucagaggcuggaucuucggcaccacacuggacagcaagacccagagccugcugaucgugaacaacgccaccaacguggucaucaaagugugcgaguuccaguucugcaacgaccccuuccugggcgucuacuaccacaagaacaacaagagcuggauggaaagcgaguuccggguguacagcagcgccaacaacugcaccuucgaguacgugucccagccuuuccugauggaccuggaaggcaagcagggcaacuucaagaaccugcgcgaguucguguucaagaacaucgacggcuacuucaaaaucuacagcaagcacaccccuaucaaccucgugcgggaucugccucagggcuucucugcucuggaaccccugguggaucugcccaucggcaucaacaucacccgguuucagacacugcuggcccugcacagaagcuaccugacaccuggcgauagcagcagcggauggacagcuggugccgccgcuuacuaugugggcuaccugcagccuagaaccuuccugcugaaguacaacgagaacggcaccaucaccgacgccguggauugugcucuggauccucugagcgagacaaagugcacccugaaguccuucaccguggaaaagggcaucuaccagaccagcaacuuccgggugcagcccaccgaauccaucgugcgguuccccaauaucaccaaucugugccccuucggcgagguguucaaugccaccagauucgccucuguguacgccuggaaccggaagcggaucagcaauugcguggccgacuacuccgugcuguacaacuccgccagcuucagcaccuucaagugcuacggcguguccccuaccaagcugaacgaccugugcuucacaaacguguacgccgacagcuucgugauccggggagaugaagugcggcagauugccccuggacagacaggcaagaucgccgacuacaacuacaagcugcccgacgacuucaccggcugugugauugccuggaacagcaagaaccuggacuccaaagucggcggcaacuacaauuaccuguaccggcuguuccggaaguccaaucugaagcccuucgagcgggacaucagcaccgaaaucuaucaggccggcagcaccccuugcaacggcguggaaggcuucaacugcuacuucccacugcaguccuacggcuuucagcccacaaauggcgugggcuaucagcccuacagagugguggugcugagcuucgaacugcugcaugcuccugccacagugugcggcccuaagaaaagcaccaaucucgugaagaacaaaugcgugaacuucaacuucaacggccugaccggcaccggcgugcugacagagagcaacaagaaguuccugccauuccagcaguuuggccgggauaucgccgauaccacagacgccguuagagauccccagacacuggaaauccuggacaucaccccaugcagcuucggcggagugucugugaucaccccuggcaccaacaccagcaaucagguggcagugcuguaccagggcgugaacuguaccgaagugcccguggccauucacgccgaucagcugacaccuacauggcggguguacuccaccggcagcaauguguuucagaccagagccggcugucugaucggagccgagcacgugaacaauagcuacgagugcgacauccccaucggcgcuggcaucugugccagcuaccagacacagacaaacagccccagacgggcuagaagcguggccagccagagcaucauugccuacacaaugucucugggcgccgagaacagcguggccuacuccaacaacucuaucgcuauccccaccaacuucaccaucagcgugaccaccgagauccugccuguguccaugaccaagaccagcguggacugcaccauguacaucugcggcgauuccaccgagugcuccaaccugcugcugcaguacggcagcuucugcacccagcugaauagagcccugacagggaucgccguggaacaggacaagaacacccaagagguguucgcccaagugaagcaaaucuacaagaccccuccuaucaaggacuucggcggcuucaauuucagccagauucugcccgauccuagcaagcccagcaagcggagcuucaucgaggaccugcuguucaacaaagugacacuggccgacgccggcuucaucaagcaguauggcgauugucugggcgacauugccgccagggaucugauuugcgcccagaaguuuaacggacugacagugcugccuccucugcugaccgaugagaugaucgcccaguacacaucugcccugcuggccggcacaaucacaagcggcuggacauuuggagcuggcgccgcucugcagauccccuuugcuaugcagauggccuaccgguucaacggcaucggagugacccagaaugugcuguacgagaaccagaagcugaucgccaaccaguucaacagcgccaucggcaagauccaggacagccugagcagcacagcaagcgcccugggaaagcugcaggacguggucaaccagaaugcccaggcacugaacacccuggucaagcagcuguccuccaacuucggcgccaucagcucugugcugaacgauauccugagcagacuggacccuccugaggccgaggugcagaucgacagacugaucacaggcagacugcagagccuccagacauacgugacccagcagcugaucagagccgccgagauuagagccucugccaaucuggccgccaccaagaugucugagugugugcugggccagagcaagagaguggacuuuugcggcaagggcuaccaccugaugagcuucccucagucugccccucacggcgugguguuucugcacgugacauaugugcccgcucaagagaagaauuucaccaccgcuccagccaucugccacgacggcaaagcccacuuuccuagagaaggcguguucguguccaacggcacccauugguucgugacacagcggaacuucuacgagccccagaucaucaccaccgacaacaccuucgugucuggcaacugcgacguugugaucggcauugugaacaauaccguguacgacccucugcagcccgagcuggacagcuucaaagaggaacuggacaaguacuuuaagaaccacacaagccccgacguggaccugggcgauaucagcggaaucaaugccagcgucgugaacauccagaaagagaucgaccggcugaacgagguggccaagaaucugaacgagagccugaucgaccugcaagaacuggggaaguacgagcaguacaucaaguggcccugguacaucuggcugggcuuuaucgccggacugauugccaucgugauggucacaaucaugcuguguugcaugaccagcugcuguagcugccugaagggcuguuguagcuguggcagcugcugcaaguucgacgaggacgauucugagcccgugcugaagggcgugaaacugcacuacaccuga

SEQ ID NO: 23153 - RNA, 3822 nt, Artificial Sequence
  SARS-CoV-2/Wuhan/WIV05/2019__EPI_ISL_402128 spike protein CDS gc mod (1-1273)(K986P_V987P_S477N_D614G)
auguucguguuucuggugcugcugccccugguguccagccagugugugaaccugaccaccagaacacagcugccuccagccuacaccaacagcuucaccagaggcguguacuaccccgacaagguguucagauccagcgugcugcacucuacccaggaccuguuccugccuuucuucagcaacgugaccugguuccacgccauccacguguccggcaccaauggcaccaagagauucgacaaccccgugcugcccuucaacgacgggguguacuuugccagcaccgagaaguccaacaucaucagaggcuggaucuucggcaccacacuggacagcaagacccagagccugcugaucgugaacaacgccaccaacguggucaucaaagugugcgaguuccaguucugcaacgaccccuuccugggcgucuacuaccacaagaacaacaagagcuggauggaaagcgaguuccggguguacagcagcgccaacaacugcaccuucgaguacgugucccagccuuuccugauggaccuggaaggcaagcagggcaacuucaagaaccugcgcgaguucguguucaagaacaucgacggcuacuucaaaaucuacagcaagcacaccccuaucaaccucgugcgggaucugccucagggcuucucugcucuggaaccccugguggaucugcccaucggcaucaacaucacccgguuucagacacugcuggcccugcacagaagcuaccugacaccuggcgauagcagcagcggauggacagcuggugccgccgcuuacuaugugggcuaccugcagccuagaaccuuccugcugaaguacaacgagaacggcaccaucaccgacgccguggauugugcucuggauccucugagcgagacaaagugcacccugaaguccuucaccguggaaaagggcaucuaccagaccagcaacuuccgggugcagcccaccgaauccaucgugcgguuccccaauaucaccaaucugugccccuucggcgagguguucaaugccaccagauucgccucuguguacgccuggaaccggaagcggaucagcaauugcguggccgacuacuccgugcuguacaacuccgccagcuucagcaccuucaagugcuacggcguguccccuaccaagcugaacgaccugugcuucacaaacguguacgccgacagcuucgugauccggggagaugaagugcggcagauugccccuggacagacaggcaagaucgccgacuacaacuacaagcugcccgacgacuucaccggcugugugauugccuggaacagcaacaaccuggacuccaaagucggcggcaacuacaauuaccuguaccggcuguuccggaaguccaaucugaagcccuucgagcgggacaucagcaccgaaaucuaucaggccggcaacaccccuugcaacggcguggaaggcuucaacugcuacuucccacugcaguccuacggcuuucagcccacaaauggcgugggcuaucagcccuacagagugguggugcugagcuucgaacugcugcaugcuccugccacagugugcggcccuaagaaaagcaccaaucucgugaagaacaaaugcgugaacuucaacuucaacggccugaccggcaccggcgugcugacagagagcaacaagaaguuccugccauuccagcaguuuggccgggauaucgccgauaccacagacgccguuagagauccccagacacuggaaauccuggacaucaccccaugcagcuucggcggagugucugugaucaccccuggcaccaacaccagcaaucagguggcagugcuguaccagggcgugaacuguaccgaagugcccguggccauucacgccgaucagcugacaccuacauggcggguguacuccaccggcagcaauguguuucagaccagagccggcugucugaucggagccgagcacgugaacaauagcuacgagugcgacauccccaucggcgcuggcaucugugccagcuaccagacacagacaaacagccccagacgggcuagaagcguggccagccagagcaucauugccuacacaaugucucugggcgccgagaacagcguggccuacuccaacaacucuaucgcuauccccaccaacuucaccaucagcgugaccaccgagauccugccuguguccaugaccaagaccagcguggacugcaccauguacaucugcggcgauuccaccgagugcuccaaccugcugcugcaguacggcagcuucugcacccagcugaauagagcccugacagggaucgccguggaacaggacaagaacacccaagagguguucgcccaagugaagcaaaucuacaagaccccuccuaucaaggacuucggcggcuucaauuucagccagauucugcccgauccuagcaagcccagcaagcggagcuucaucgaggaccugcuguucaacaaagugacacuggccgacgccggcuucaucaagcaguauggcgauugucugggcgacauugccgccagggaucugauuugcgcccagaaguuuaacggacugacagugcugccuccucugcugaccgaugagaugaucgcccaguacacaucugcccugcuggccggcacaaucacaagcggcuggacauuuggagcuggcgccgcucugcagauccccuuugcuaugcagauggccuaccgguucaacggcaucggagugacccagaaugugcuguacgagaaccagaagcugaucgccaaccaguucaacagcgccaucggcaagauccaggacagccugagcagcacagcaagcgcccugggaaagcugcaggacguggucaaccagaaugcccaggcacugaacacccuggucaagcagcuguccuccaacuucggcgccaucagcucugugcugaacgauauccugagcagacuggacccuccugaggccgaggugcagaucgacagacugaucacaggcagacugcagagccuccagacauacgugacccagcagcugaucagagccgccgagauuagagccucugccaaucuggccgccaccaagaugucugagugugugcugggccagagcaagagaguggacuuuugcggcaagggcuaccaccugaugagcuucccucagucugccccucacggcgugguguuucugcacgugacauaugugcccgcucaagagaagaauuucaccaccgcuccagccaucugccacgacggcaaagcccacuuuccuagagaaggcguguucguguccaacggcacccauugguucgugacacagcggaacuucuacgagccccagaucaucaccaccgacaacaccuucgugucuggcaacugcgacguugugaucggcauugugaacaauaccguguacgacccucugcagcccgagcuggacagcuucaaagaggaacuggacaaguacuuuaagaaccacacaagccccgacguggaccugggcgauaucagcggaaucaaugccagcgucgugaacauccagaaagagaucgaccggcugaacgagguggccaagaaucugaacgagagccugaucgaccugcaagaacuggggaaguacgagcaguacaucaaguggcccugguacaucuggcugggcuuuaucgccggacugauugccaucgugauggucacaaucaugcuguguugcaugaccagcugcuguagcugccugaagggcuguuguagcuguggcagcugcugcaaguucgacgaggacgauucugagcccgugcugaagggcgugaaacugcacuacaccuga

SEQ ID NO: 23154 - RNA, 3822 nt, Artificial Sequence
  SARS-CoV-2/Wuhan/WIV05/2019__EPI_ISL_402128 spike protein CDS gc mod (1-1273)(K986P_V987P_N501Y_D614G)
auguucguguuucuggugcugcugccccugguguccagccagugugugaaccugaccaccagaacacagcugccuccagccuacaccaacagcuucaccagaggcguguacuaccccgacaagguguucagauccagcgugcugcacucuacccaggaccuguuccugccuuucuucagcaacgugaccugguuccacgccauccacguguccggcaccaauggcaccaagagauucgacaaccccgugcugcccuucaacgacgggguguacuuugccagcaccgagaaguccaacaucaucagaggcuggaucuucggcaccacacuggacagcaagacccagagccugcugaucgugaacaacgccaccaacguggucaucaaagugugcgaguuccaguucugcaacgaccccuuccugggcgucuacuaccacaagaacaacaagagcuggauggaaagcgaguuccggguguacagcagcgccaacaacugcaccuucgaguacgugucccagccuuuccugauggaccuggaaggcaagcagggcaacuucaagaaccugcgcgaguucguguucaagaacaucgacggcuacuucaaaaucuacagcaagcacaccccuaucaaccucgugcgggaucugccucagggcuucucugcucuggaaccccugguggaucugcccaucggcaucaacaucacccgguuucagacacugcuggcccugcacagaagcuaccugacaccuggcgauagcagcagcggauggacagcuggugccgccgcuuacuaugugggcuaccugcagccuagaaccuuccugcugaaguacaacgagaacggcaccaucaccgacgccguggauugugcucuggauccucugagcgagacaaagugcacccugaaguccuucaccguggaaaagggcaucuaccagaccagcaacuuccgggugcagcccaccgaauccaucgugcgguuccccaauaucaccaaucugugccccuucggcgagguguucaaugccaccagauucgccucuguguacgccuggaaccggaagcggaucagcaauugcguggccgacuacuccgugcuguacaacuccgccagcuucagcaccuucaagugcuacggcguguccccuaccaagcugaacgaccugugcuucacaaacguguacgccgacagcuucgugauccggggagaugaagugcggcagauugccccuggacagacaggcaagaucgccgacuacaacuacaagcugcccgacgacuucaccggcugugugauugccuggaacagcaacaaccuggacuccaaagucggcggcaacuacaauuaccuguaccggcuguuccggaaguccaaucugaagcccuucgagcgggacaucagcaccgaaaucuaucaggccggcagcaccccuugcaacggcguggaaggcuucaacugcuacuucccacugcaguccuacggcuuucagcccacauacggcgugggcuaucagcccuacagagugguggugcugagcuucgaacugcugcaugcuccugccacagugugcggcccuaagaaaagcaccaaucucgugaagaacaaaugcgugaacuucaacuucaacggccugaccggcaccggcgugcugacagagagcaacaagaaguuccugccauuccagcaguuuggccgggauaucgccgauaccacagacgccguuagagauccccagacacuggaaauccuggacaucaccccaugcagcuucggcggagugucugugaucaccccuggcaccaacaccagcaaucagguggcagugcuguaccagggcgugaacuguaccgaagugcccguggccauucacgccgaucagcugacaccuacauggcggguguacuccaccggcagcaauguguuucagaccagagccggcugucugaucggagccgagcacgugaacaauagcuacgagugcgacauccccaucggcgcuggcaucugugccagcuaccagacacagacaaacagccccagacgggcuagaagcguggccagccagagcaucauugccuacacaaugucucugggcgccgagaacagcguggccuacuccaacaacucuaucgcuauccccaccaacuucaccaucagcgugaccaccgagauccugccuguguccaugaccaagaccagcguggacugcaccauguacaucugcggcgauuccaccgagugcuccaaccugcugcugcaguacggcagcuucugcacccagcugaauagagcccugacagggaucgccguggaacaggacaagaacacccaagagguguucgcccaagugaagcaaaucuacaagaccccuccuaucaaggacuucggcggcuucaauuucagccagauucugcccgauccuagcaagcccagcaagcggagcuucaucgaggaccugcuguucaacaaagugacacuggccgacgccggcuucaucaagcaguauggcgauugucugggcgacauugccgccagggaucugauuugcgcccagaaguuuaacggacugacagugcugccuccucugcugaccgaugagaugaucgcccaguacacaucugcccugcuggccggcacaaucacaagcggcuggacauuuggagcuggcgccgcucugcagauccccuuugcuaugcagauggccuaccgguucaacggcaucggagugacccagaaugugcuguacgagaaccagaagcugaucgccaaccaguucaacagcgccaucggcaagauccaggacagccugagcagcacagcaagcgcccugggaaagcugcaggacguggucaaccagaaugcccaggcacugaacacccuggucaagcagcuguccuccaacuucggcgccaucagcucugugcugaacgauauccugagcagacuggacccuccugaggccgaggugcagaucgacagacugaucacaggcagacugcagagccuccagacauacgugacccagcagcugaucagagccgccgagauuagagccucugccaaucuggccgccaccaagaugucugagugugugcugggccagagcaagagaguggacuuuugcggcaagggcuaccaccugaugagcuucccucagucugccccucacggcgugguguuucugcacgugacauaugugcccgcucaagagaagaauuucaccaccgcuccagccaucugccacgacggcaaagcccacuuuccuagagaaggcguguucguguccaacggcacccauugguucgugacacagcggaacuucuacgagccccagaucaucaccaccgacaacaccuucgugucuggcaacugcgacguugugaucggcauugugaacaauaccguguacgacccucugcagcccgagcuggacagcuucaaagaggaacuggacaaguacuuuaagaaccacacaagccccgacguggaccugggcgauaucagcggaaucaaugccagcgucgugaacauccagaaagagaucgaccggcugaacgagguggccaagaaucugaacgagagccugaucgaccugcaagaacuggggaaguacgagcaguacaucaaguggcccugguacaucuggcugggcuuuaucgccggacugauugccaucgugauggucacaaucaugcuguguugcaugaccagcugcuguagcugccugaagggcuguuguagcuguggcagcugcugcaaguucgacgaggacgauucugagcccgugcugaagggcgugaaacugcacuacaccuga

SEQ ID NO: 23155 - RNA, 3816 nt, Artificial Sequence
  SARS-CoV-2/Wuhan/WIV05/2019__EPI_ISL_402128 spike protein CDS gc mod (1-1273)(K986P_V987P_H69del_V70del_D614G)
auguucguguuucuggugcugcugccccugguguccagccagugugugaaccugaccaccagaacacagcugccuccagccuacaccaacagcuucaccagaggcguguacuaccccgacaagguguucagauccagcgugcugcacucuacccaggaccuguuccugccuuucuucagcaacgugaccugguuccacgccaucuccggcaccaauggcaccaagagauucgacaaccccgugcugcccuucaacgacgggguguacuuugccagcaccgagaaguccaacaucaucagaggcuggaucuucggcaccacacuggacagcaagacccagagccugcugaucgugaacaacgccaccaacguggucaucaaagugugcgaguuccaguucugcaacgaccccuuccugggcgucuacuaccacaagaacaacaagagcuggauggaaagcgaguuccggguguacagcagcgccaacaacugcaccuucgaguacgugucccagccuuuccugauggaccuggaaggcaagcagggcaacuucaagaaccugcgcgaguucguguucaagaacaucgacggcuacuucaaaaucuacagcaagcacaccccuaucaaccucgugcgggaucugccucagggcuucucugcucuggaaccccugguggaucugcccaucggcaucaacaucacccgguuucagacacugcuggcccugcacagaagcuaccugacaccuggcgauagcagcagcggauggacagcuggugccgccgcuuacuaugugggcuaccugcagccuagaaccuuccugcugaaguacaacgagaacggcaccaucaccgacgccguggauugugcucuggauccucugagcgagacaaagugcacccugaaguccuucaccguggaaaagggcaucuaccagaccagcaacuuccgggugcagcccaccgaauccaucgugcgguuccccaauaucaccaaucugugccccuucggcgagguguucaaugccaccagauucgccucuguguacgccuggaaccggaagcggaucagcaauugcguggccgacuacuccgugcuguacaacuccgccagcuucagcaccuucaagugcuacggcguguccccuaccaagcugaacgaccugugcuucacaaacguguacgccgacagcuucgugauccggggagaugaagugcggcagauugccccuggacagacaggcaagaucgccgacuacaacuacaagcugcccgacgacuucaccggcugugugauugccuggaacagcaacaaccuggacuccaaagucggcggcaacuacaauuaccuguaccggcuguuccggaaguccaaucugaagcccuucgagcgggacaucagcaccgaaaucuaucaggccggcagcaccccuugcaacggcguggaaggcuucaacugcuacuucccacugcaguccuacggcuuucagcccacaaauggcgugggcuaucagcccuacagagugguggugcugagcuucgaacugcugcaugcuccugccacagugugcggcccuaagaaaagcaccaaucucgugaagaacaaaugcgugaacuucaacuucaacggccugaccggcaccggcgugcugacagagagcaacaagaaguuccugccauuccagcaguuuggccgggauaucgccgauaccacagacgccguuagagauccccagacacuggaaauccuggacaucaccccaugcagcuucggcggagugucugugaucaccccuggcaccaacaccagcaaucagguggcagugcuguaccagggcgugaacuguaccgaagugcccguggccauucacgccgaucagcugacaccuacauggcggguguacuccaccggcagcaauguguuucagaccagagccggcugucugaucggagccgagcacgugaacaauagcuacgagugcgacauccccaucggcgcuggcaucugugccagcuaccagacacagacaaacagccccagacgggcuagaagcguggccagccagagcaucauugccuacacaaugucucugggcgccgagaacagcguggccuacuccaacaacucuaucgcuauccccaccaacuucaccaucagcgugaccaccgagauccugccuguguccaugaccaagaccagcguggacugcaccauguacaucugcggcgauuccaccgagugcuccaaccugcugcugcaguacggcagcuucugcacccagcugaauagagcccugacagggaucgccguggaacaggacaagaacacccaagagguguucgcccaagugaagcaaaucuacaagaccccuccuaucaaggacuucggcggcuucaauuucagccagauucugcccgauccuagcaagcccagcaagcggagcuucaucgaggaccugcuguucaacaaagugacacuggccgacgccggcuucaucaagcaguauggcgauugucugggcgacauugccgccagggaucugauuugcgcccagaaguuuaacggacugacagugcugccuccucugcugaccgaugagaugaucgcccaguacacaucugcccugcuggccggcacaaucacaagcggcuggacauuuggagcuggcgccgcucugcagauccccuuugcuaugcagauggccuaccgguucaacggcaucggagugacccagaaugugcuguacgagaaccagaagcugaucgccaaccaguucaacagcgccaucggcaagauccaggacagccugagcagcacagcaagcgcccugggaaagcugcaggacguggucaaccagaaugcccaggcacugaacacccuggucaagcagcuguccuccaacuucggcgccaucagcucugugcugaacgauauccugagcagacuggacccuccugaggccgaggugcagaucgacagacugaucacaggcagacugcagagccuccagacauacgugacccagcagcugaucagagccgccgagauuagagccucugccaaucuggccgccaccaagaugucugagugugugcugggccagagcaagagaguggacuuuugcggcaagggcuaccaccugaugagcuucccucagucugccccucacggcgugguguuucugcacgugacauaugugcccgcucaagagaagaauuucaccaccgcuccagccaucugccacgacggcaaagcccacuuuccuagagaaggcguguucguguccaacggcacccauugguucgugacacagcggaacuucuacgagccccagaucaucaccaccgacaacaccuucgugucuggcaacugcgacguugugaucggcauugugaacaauaccguguacgacccucugcagcccgagcuggacagcuucaaagaggaacuggacaaguacuuuaagaaccacacaagccccgacguggaccugggcgauaucagcggaaucaaugccagcgucgugaacauccagaaagagaucgaccggcugaacgagguggccaagaaucugaacgagagccugaucgaccugcaagaacuggggaaguacgagcaguacaucaaguggcccugguacaucuggcugggcuuuaucgccggacugauugccaucgugauggucacaaucaugcuguguugcaugaccagcugcuguagcugccugaagggcuguuguagcuguggcagcugcugcaaguucgacgaggacgauucugagcccgugcugaagggcgugaaacugcacuacaccuga

SEQ ID NO: 23156 - RNA, 3822 nt, Artificial Sequence
  SARS-CoV-2/Wuhan/WIV05/2019__EPI_ISL_402128 spike protein CDS gc mod (1-1273)(K986P_V987P_Y453F_D614G)
auguucguguuucuggugcugcugccccugguguccagccagugugugaaccugaccaccagaacacagcugccuccagccuacaccaacagcuucaccagaggcguguacuaccccgacaagguguucagauccagcgugcugcacucuacccaggaccuguuccugccuuucuucagcaacgugaccugguuccacgccauccacguguccggcaccaauggcaccaagagauucgacaaccccgugcugcccuucaacgacgggguguacuuugccagcaccgagaaguccaacaucaucagaggcuggaucuucggcaccacacuggacagcaagacccagagccugcugaucgugaacaacgccaccaacguggucaucaaagugugcgaguuccaguucugcaacgaccccuuccugggcgucuacuaccacaagaacaacaagagcuggauggaaagcgaguuccggguguacagcagcgccaacaacugcaccuucgaguacgugucccagccuuuccugauggaccuggaaggcaagcagggcaacuucaagaaccugcgcgaguucguguucaagaacaucgacggcuacuucaaaaucuacagcaagcacaccccuaucaaccucgugcgggaucugccucagggcuucucugcucuggaaccccugguggaucugcccaucggcaucaacaucacccgguuucagacacugcuggcccugcacagaagcuaccugacaccuggcgauagcagcagcggauggacagcuggugccgccgcuuacuaugugggcuaccugcagccuagaaccuuccugcugaaguacaacgagaacggcaccaucaccgacgccguggauugugcucuggauccucugagcgagacaaagugcacccugaaguccuucaccguggaaaagggcaucuaccagaccagcaacuuccgggugcagcccaccgaauccaucgugcgguuccccaauaucaccaaucugugccccuucggcgagguguucaaugccaccagauucgccucuguguacgccuggaaccggaagcggaucagcaauugcguggccgacuacuccgugcuguacaacuccgccagcuucagcaccuucaagugcuacggcguguccccuaccaagcugaacgaccugugcuucacaaacguguacgccgacagcuucgugauccggggagaugaagugcggcagauugccccuggacagacaggcaagaucgccgacuacaacuacaagcugcccgacgacuucaccggcugugugauugccuggaacagcaacaaccuggacuccaaagucggcggcaacuacaauuaccuguuccggcuguuccggaaguccaaucugaagcccuucgagcgggacaucagcaccgaaaucuaucaggccggcagcaccccuugcaacggcguggaaggcuucaacugcuacuucccacugcaguccuacggcuuucagcccacaaauggcgugggcuaucagcccuacagagugguggugcugagcuucgaacugcugcaugcuccugccacagugugcggcccuaagaaaagcaccaaucucgugaagaacaaaugcgugaacuucaacuucaacggccugaccggcaccggcgugcugacagagagcaacaagaaguuccugccauuccagcaguuuggccgggauaucgccgauaccacagacgccguuagagauccccagacacuggaaauccuggacaucaccccaugcagcuucggcggagugucugugaucaccccuggcaccaacaccagcaaucagguggcagugcuguaccagggcgugaacuguaccgaagugcccguggccauucacgccgaucagcugacaccuacauggcggguguacuccaccggcagcaauguguuucagaccagagccggcugucugaucggagccgagcacgugaacaauagcuacgagugcgacauccccaucggcgcuggcaucugugccagcuaccagacacagacaaacagccccagacgggcuagaagcguggccagccagagcaucauugccuacacaaugucucugggcgccgagaacagcguggccuacuccaacaacucuaucgcuauccccaccaacuucaccaucagcgugaccaccgagauccugccuguguccaugaccaagaccagcguggacugcaccauguacaucugcggcgauuccaccgagugcuccaaccugcugcugcaguacggcagcuucugcacccagcugaauagagcccugacagggaucgccguggaacaggacaagaacacccaagagguguucgcccaagugaagcaaaucuacaagaccccuccuaucaaggacuucggcggcuucaauuucagccagauucugcccgauccuagcaagcccagcaagcggagcuucaucgaggaccugcuguucaacaaagugacacuggccgacgccggcuucaucaagcaguauggcgauugucugggcgacauugccgccagggaucugauuugcgcccagaaguuuaacggacugacagugcugccuccucugcugaccgaugagaugaucgcccaguacacaucugcccugcuggccggcacaaucacaagcggcuggacauuuggagcuggcgccgcucugcagauccccuuugcuaugcagauggccuaccgguucaacggcaucggagugacccagaaugugcuguacgagaaccagaagcugaucgccaaccaguucaacagcgccaucggcaagauccaggacagccugagcagcacagcaagcgcccugggaaagcugcaggacguggucaaccagaaugcccaggcacugaacacccuggucaagcagcuguccuccaacuucggcgccaucagcucugugcugaacgauauccugagcagacuggacccuccugaggccgaggugcagaucgacagacugaucacaggcagacugcagagccuccagacauacgugacccagcagcugaucagagccgccgagauuagagccucugccaaucuggccgccaccaagaugucugagugugugcugggccagagcaagagaguggacuuuugcggcaagggcuaccaccugaugagcuucccucagucugccccucacggcgugguguuucugcacgugacauaugugcccgcucaagagaagaauuucaccaccgcuccagccaucugccacgacggcaaagcccacuuuccuagagaaggcguguucguguccaacggcacccauugguucgugacacagcggaacuucuacgagccccagaucaucaccaccgacaacaccuucgugucuggcaacugcgacguugugaucggcauugugaacaauaccguguacgacccucugcagcccgagcuggacagcuucaaagaggaacuggacaaguacuuuaagaaccacacaagccccgacguggaccugggcgauaucagcggaaucaaugccagcgucgugaacauccagaaagagaucgaccggcugaacgagguggccaagaaucugaacgagagccugaucgaccugcaagaacuggggaaguacgagcaguacaucaaguggcccugguacaucuggcugggcuuuaucgccggacugauugccaucgugauggucacaaucaugcuguguugcaugaccagcugcuguagcugccugaagggcuguuguagcuguggcagcugcugcaaguucgacgaggacgauucugagcccgugcugaagggcgugaaacugcacuacaccuga

SEQ ID NO: 23157 - RNA, 3822 nt, Artificial Sequence
  SARS-CoV-2/Wuhan/WIV05/2019__EPI_ISL_402128 spike protein CDS gc mod (1-1273)(K986P_V987P_D614G_I692V)
auguucguguuucuggugcugcugccccugguguccagccagugugugaaccugaccaccagaacacagcugccuccagccuacaccaacagcuucaccagaggcguguacuaccccgacaagguguucagauccagcgugcugcacucuacccaggaccuguuccugccuuucuucagcaacgugaccugguuccacgccauccacguguccggcaccaauggcaccaagagauucgacaaccccgugcugcccuucaacgacgggguguacuuugccagcaccgagaaguccaacaucaucagaggcuggaucuucggcaccacacuggacagcaagacccagagccugcugaucgugaacaacgccaccaacguggucaucaaagugugcgaguuccaguucugcaacgaccccuuccugggcgucuacuaccacaagaacaacaagagcuggauggaaagcgaguuccggguguacagcagcgccaacaacugcaccuucgaguacgugucccagccuuuccugauggaccuggaaggcaagcagggcaacuucaagaaccugcgcgaguucguguucaagaacaucgacggcuacuucaaaaucuacagcaagcacaccccuaucaaccucgugcgggaucugccucagggcuucucugcucuggaaccccugguggaucugcccaucggcaucaacaucacccgguuucagacacugcuggcccugcacagaagcuaccugacaccuggcgauagcagcagcggauggacagcuggugccgccgcuuacuaugugggcuaccugcagccuagaaccuuccugcugaaguacaacgagaacggcaccaucaccgacgccguggauugugcucuggauccucugagcgagacaaagugcacccugaaguccuucaccguggaaaagggcaucuaccagaccagcaacuuccgggugcagcccaccgaauccaucgugcgguuccccaauaucaccaaucugugccccuucggcgagguguucaaugccaccagauucgccucuguguacgccuggaaccggaagcggaucagcaauugcguggccgacuacuccgugcuguacaacuccgccagcuucagcaccuucaagugcuacggcguguccccuaccaagcugaacgaccugugcuucacaaacguguacgccgacagcuucgugauccggggagaugaagugcggcagauugccccuggacagacaggcaagaucgccgacuacaacuacaagcugcccgacgacuucaccggcugugugauugccuggaacagcaacaaccuggacuccaaagucggcggcaacuacaauuaccuguaccggcuguuccggaaguccaaucugaagcccuucgagcgggacaucagcaccgaaaucuaucaggccggcagcaccccuugcaacggcguggaaggcuucaacugcuacuucccacugcaguccuacggcuuucagcccacaaauggcgugggcuaucagcccuacagagugguggugcugagcuucgaacugcugcaugcuccugccacagugugcggcccuaagaaaagcaccaaucucgugaagaacaaaugcgugaacuucaacuucaacggccugaccggcaccggcgugcugacagagagcaacaagaaguuccugccauuccagcaguuuggccgggauaucgccgauaccacagacgccguuagagauccccagacacuggaaauccuggacaucaccccaugcagcuucggcggagugucugugaucaccccuggcaccaacaccagcaaucagguggcagugcuguaccagggcgugaacuguaccgaagugcccguggccauucacgccgaucagcugacaccuacauggcggguguacuccaccggcagcaauguguuucagaccagagccggcugucugaucggagccgagcacgugaacaauagcuacgagugcgacauccccaucggcgcuggcaucugugccagcuaccagacacagacaaacagccccagacgggcuagaagcguggccagccagagcgugauugccuacacaaugucucugggcgccgagaacagcguggccuacuccaacaacucuaucgcuauccccaccaacuucaccaucagcgugaccaccgagauccugccuguguccaugaccaagaccagcguggacugcaccauguacaucugcggcgauuccaccgagugcuccaaccugcugcugcaguacggcagcuucugcacccagcugaauagagcccugacagggaucgccguggaacaggacaagaacacccaagagguguucgcccaagugaagcaaaucuacaagaccccuccuaucaaggacuucggcggcuucaauuucagccagauucugcccgauccuagcaagcccagcaagcggagcuucaucgaggaccugcuguucaacaaagugacacuggccgacgccggcuucaucaagcaguauggcgauugucugggcgacauugccgccagggaucugauuugcgcccagaaguuuaacggacugacagugcugccuccucugcugaccgaugagaugaucgcccaguacacaucugcccugcuggccggcacaaucacaagcggcuggacauuuggagcuggcgccgcucugcagauccccuuugcuaugcagauggccuaccgguucaacggcaucggagugacccagaaugugcuguacgagaaccagaagcugaucgccaaccaguucaacagcgccaucggcaagauccaggacagccugagcagcacagcaagcgcccugggaaagcugcaggacguggucaaccagaaugcccaggcacugaacacccuggucaagcagcuguccuccaacuucggcgccaucagcucugugcugaacgauauccugagcagacuggacccuccugaggccgaggugcagaucgacagacugaucacaggcagacugcagagccuccagacauacgugacccagcagcugaucagagccgccgagauuagagccucugccaaucuggccgccaccaagaugucugagugugugcugggccagagcaagagaguggacuuuugcggcaagggcuaccaccugaugagcuucccucagucugccccucacggcgugguguuucugcacgugacauaugugcccgcucaagagaagaauuucaccaccgcuccagccaucugccacgacggcaaagcccacuuuccuagagaaggcguguucguguccaacggcacccauugguucgugacacagcggaacuucuacgagccccagaucaucaccaccgacaacaccuucgugucuggcaacugcgacguugugaucggcauugugaacaauaccguguacgacccucugcagcccgagcuggacagcuucaaagaggaacuggacaaguacuuuaagaaccacacaagccccgacguggaccugggcgauaucagcggaaucaaugccagcgucgugaacauccagaaagagaucgaccggcugaacgagguggccaagaaucugaacgagagccugaucgaccugcaagaacuggggaaguacgagcaguacaucaaguggcccugguacaucuggcugggcuuuaucgccggacugauugccaucgugauggucacaaucaugcuguguugcaugaccagcugcuguagcugccugaagggcuguuguagcuguggcagcugcugcaaguucgacgaggacgauucugagcccgugcugaagggcgugaaacugcacuacaccuga

SEQ ID NO: 23158 - RNA, 3822 nt, Artificial Sequence
  SARS-CoV-2/Wuhan/WIV05/2019__EPI_ISL_402128 spike protein CDS gc mod (1-1273)(K986P_V987P_D614G_M1229I)
auguucguguuucuggugcugcugccccugguguccagccagugugugaaccugaccaccagaacacagcugccuccagccuacaccaacagcuucaccagaggcguguacuaccccgacaagguguucagauccagcgugcugcacucuacccaggaccuguuccugccuuucuucagcaacgugaccugguuccacgccauccacguguccggcaccaauggcaccaagagauucgacaaccccgugcugcccuucaacgacgggguguacuuugccagcaccgagaaguccaacaucaucagaggcuggaucuucggcaccacacuggacagcaagacccagagccugcugaucgugaacaacgccaccaacguggucaucaaagugugcgaguuccaguucugcaacgaccccuuccugggcgucuacuaccacaagaacaacaagagcuggauggaaagcgaguuccggguguacagcagcgccaacaacugcaccuucgaguacgugucccagccuuuccugauggaccuggaaggcaagcagggcaacuucaagaaccugcgcgaguucguguucaagaacaucgacggcuacuucaaaaucuacagcaagcacaccccuaucaaccucgugcgggaucugccucagggcuucucugcucuggaaccccugguggaucugcccaucggcaucaacaucacccgguuucagacacugcuggcccugcacagaagcuaccugacaccuggcgauagcagcagcggauggacagcuggugccgccgcuuacuaugugggcuaccugcagccuagaaccuuccugcugaaguacaacgagaacggcaccaucaccgacgccguggauugugcucuggauccucugagcgagacaaagugcacccugaaguccuucaccguggaaaagggcaucuaccagaccagcaacuuccgggugcagcccaccgaauccaucgugcgguuccccaauaucaccaaucugugccccuucggcgagguguucaaugccaccagauucgccucuguguacgccuggaaccggaagcggaucagcaauugcguggccgacuacuccgugcuguacaacuccgccagcuucagcaccuucaagugcuacggcguguccccuaccaagcugaacgaccugugcuucacaaacguguacgccgacagcuucgugauccggggagaugaagugcggcagauugccccuggacagacaggcaagaucgccgacuacaacuacaagcugcccgacgacuucaccggcugugugauugccuggaacagcaacaaccuggacuccaaagucggcggcaacuacaauuaccuguaccggcuguuccggaaguccaaucugaagcccuucgagcgggacaucagcaccgaaaucuaucaggccggcagcaccccuugcaacggcguggaaggcuucaacugcuacuucccacugcaguccuacggcuuucagcccacaaauggcgugggcuaucagcccuacagagugguggugcugagcuucgaacugcugcaugcuccugccacagugugcggcccuaagaaaagcaccaaucucgugaagaacaaaugcgugaacuucaacuucaacggccugaccggcaccggcgugcugacagagagcaacaagaaguuccugccauuccagcaguuuggccgggauaucgccgauaccacagacgccguuagagauccccagacacuggaaauccuggacaucaccccaugcagcuucggcggagugucugugaucaccccuggcaccaacaccagcaaucagguggcagugcuguaccagggcgugaacuguaccgaagugcccguggccauucacgccgaucagcugacaccuacauggcggguguacuccaccggcagcaauguguuucagaccagagccggcugucugaucggagccgagcacgugaacaauagcuacgagugcgacauccccaucggcgcuggcaucugugccagcuaccagacacagacaaacagccccagacgggcuagaagcguggccagccagagcaucauugccuacacaaugucucugggcgccgagaacagcguggccuacuccaacaacucuaucgcuauccccaccaacuucaccaucagcgugaccaccgagauccugccuguguccaugaccaagaccagcguggacugcaccauguacaucugcggcgauuccaccgagugcuccaaccugcugcugcaguacggcagcuucugcacccagcugaauagagcccugacagggaucgccguggaacaggacaagaacacccaagagguguucgcccaagugaagcaaaucuacaagaccccuccuaucaaggacuucggcggcuucaauuucagccagauucugcccgauccuagcaagcccagcaagcggagcuucaucgaggaccugcuguucaacaaagugacacuggccgacgccggcuucaucaagcaguauggcgauugucugggcgacauugccgccagggaucugauuugcgcccagaaguuuaacggacugacagugcugccuccucugcugaccgaugagaugaucgcccaguacacaucugcccugcuggccggcacaaucacaagcggcuggacauuuggagcuggcgccgcucugcagauccccuuugcuaugcagauggccuaccgguucaacggcaucggagugacccagaaugugcuguacgagaaccagaagcugaucgccaaccaguucaacagcgccaucggcaagauccaggacagccugagcagcacagcaagcgcccugggaaagcugcaggacguggucaaccagaaugcccaggcacugaacacccuggucaagcagcuguccuccaacuucggcgccaucagcucugugcugaacgauauccugagcagacuggacccuccugaggccgaggugcagaucgacagacugaucacaggcagacugcagagccuccagacauacgugacccagcagcugaucagagccgccgagauuagagccucugccaaucuggccgccaccaagaugucugagugugugcugggccagagcaagagaguggacuuuugcggcaagggcuaccaccugaugagcuucccucagucugccccucacggcgugguguuucugcacgugacauaugugcccgcucaagagaagaauuucaccaccgcuccagccaucugccacgacggcaaagcccacuuuccuagagaaggcguguucguguccaacggcacccauugguucgugacacagcggaacuucuacgagccccagaucaucaccaccgacaacaccuucgugucuggcaacugcgacguugugaucggcauugugaacaauaccguguacgacccucugcagcccgagcuggacagcuucaaagaggaacuggacaaguacuuuaagaaccacacaagccccgacguggaccugggcgauaucagcggaaucaaugccagcgucgugaacauccagaaagagaucgaccggcugaacgagguggccaagaaucugaacgagagccugaucgaccugcaagaacuggggaaguacgagcaguacaucaaguggcccugguacaucuggcugggcuuuaucgccggacugauugccaucgugaucgucacaaucaugcuguguugcaugaccagcugcuguagcugccugaagggcuguuguagcuguggcagcugcugcaaguucgacgaggacgauucugagcccgugcugaagggcgugaaacugcacuacaccuga

SEQ ID NO: 23159 - RNA, 3816 nt, Artificial Sequence
  SARS-CoV-2/Wuhan/WIV05/2019__EPI_ISL_402128 spike protein CDS gc mod (1-1273)(K986P_V987P_H69del_V70del_A222V_Y453F_S477N_D614G_I692V)
auguucguguuucuggugcugcugccccugguguccagccagugugugaaccugaccaccagaacacagcugccuccagccuacaccaacagcuucaccagaggcguguacuaccccgacaagguguucagauccagcgugcugcacucuacccaggaccuguuccugccuuucuucagcaacgugaccugguuccacgccaucuccggcaccaauggcaccaagagauucgacaaccccgugcugcccuucaacgacgggguguacuuugccagcaccgagaaguccaacaucaucagaggcuggaucuucggcaccacacuggacagcaagacccagagccugcugaucgugaacaacgccaccaacguggucaucaaagugugcgaguuccaguucugcaacgaccccuuccugggcgucuacuaccacaagaacaacaagagcuggauggaaagcgaguuccggguguacagcagcgccaacaacugcaccuucgaguacgugucccagccuuuccugauggaccuggaaggcaagcagggcaacuucaagaaccugcgcgaguucguguucaagaacaucgacggcuacuucaaaaucuacagcaagcacaccccuaucaaccucgugcgggaucugccucagggcuucucugugcuggaaccccugguggaucugcccaucggcaucaacaucacccgguuucagacacugcuggcccugcacagaagcuaccugacaccuggcgauagcagcagcggauggacagcuggugccgccgcuuacuaugugggcuaccugcagccuagaaccuuccugcugaaguacaacgagaacggcaccaucaccgacgccguggauugugcucuggauccucugagcgagacaaagugcacccugaaguccuucaccguggaaaagggcaucuaccagaccagcaacuuccgggugcagcccaccgaauccaucgugcgguuccccaauaucaccaaucugugccccuucggcgagguguucaaugccaccagauucgccucuguguacgccuggaaccggaagcggaucagcaauugcguggccgacuacuccgugcuguacaacuccgccagcuucagcaccuucaagugcuacggcguguccccuaccaagcugaacgaccugugcuucacaaacguguacgccgacagcuucgugauccggggagaugaagugcggcagauugccccuggacagacaggcaagaucgccgacuacaacuacaagcugcccgacgacuucaccggcugugugauugccuggaacagcaacaaccuggacuccaaagucggcggcaacuacaauuaccuguuccggcuguuccggaaguccaaucugaagcccuucgagcgggacaucagcaccgaaaucuaucaggccggcaacaccccuugcaacggcguggaaggcuucaacugcuacuucccacugcaguccuacggcuuucagcccacaaauggcgugggcuaucagcccuacagagugguggugcugagcuucgaacugcugcaugcuccugccacagugugcggcccuaagaaaagcaccaaucucgugaagaacaaaugcgugaacuucaacuucaacggccugaccggcaccggcgugcugacagagagcaacaagaaguuccugccauuccagcaguuuggccgggauaucgccgauaccacagacgccguuagagauccccagacacuggaaauccuggacaucaccccaugcagcuucggcggagugucugugaucaccccuggcaccaacaccagcaaucagguggcagugcuguaccagggcgugaacuguaccgaagugcccguggccauucacgccgaucagcugacaccuacauggcggguguacuccaccggcagcaauguguuucagaccagagccggcugucugaucggagccgagcacgugaacaauagcuacgagugcgacauccccaucggcgcuggcaucugugccagcuaccagacacagacaaacagccccagacgggcuagaagcguggccagccagagcgugauugccuacacaaugucucugggcgccgagaacagcguggccuacuccaacaacucuaucgcuauccccaccaacuucaccaucagcgugaccaccgagauccugccuguguccaugaccaagaccagcguggacugcaccauguacaucugcggcgauuccaccgagugcuccaaccugcugcugcaguacggcagcuucugcacccagcugaauagagcccugacagggaucgccguggaacaggacaagaacacccaagagguguucgcccaagugaagcaaaucuacaagaccccuccuaucaaggacuucggcggcuucaauuucagccagauucugcccgauccuagcaagcccagcaagcggagcuucaucgaggaccugcuguucaacaaagugacacuggccgacgccggcuucaucaagcaguauggcgauugucugggcgacauugccgccagggaucugauuugcgcccagaaguuuaacggacugacagugcugccuccucugcugaccgaugagaugaucgcccaguacacaucugcccugcuggccggcacaaucacaagcggcuggacauuuggagcuggcgccgcucugcagauccccuuugcuaugcagauggccuaccgguucaacggcaucggagugacccagaaugugcuguacgagaaccagaagcugaucgccaaccaguucaacagcgccaucggcaagauccaggacagccugagcagcacagcaagcgcccugggaaagcugcaggacguggucaaccagaaugcccaggcacugaacacccuggucaagcagcuguccuccaacuucggcgccaucagcucugugcugaacgauauccugagcagacuggacccuccugaggccgaggugcagaucgacagacugaucacaggcagacugcagagccuccagacauacgugacccagcagcugaucagagccgccgagauuagagccucugccaaucuggccgccaccaagaugucugagugugugcugggccagagcaagagaguggacuuuugcggcaagggcuaccaccugaugagcuucccucagucugccccucacggcgugguguuucugcacgugacauaugugcccgcucaagagaagaauuucaccaccgcuccagccaucugccacgacggcaaagcccacuuuccuagagaaggcguguucguguccaacggcacccauugguucgugacacagcggaacuucuacgagccccagaucaucaccaccgacaacaccuucgugucuggcaacugcgacguugugaucggcauugugaacaauaccguguacgacccucugcagcccgagcuggacagcuucaaagaggaacuggacaaguacuuuaagaaccacacaagccccgacguggaccugggcgauaucagcggaaucaaugccagcgucgugaacauccagaaagagaucgaccggcugaacgagguggccaagaaucugaacgagagccugaucgaccugcaagaacuggggaaguacgagcaguacaucaaguggcccugguacaucuggcugggcuuuaucgccggacugauugccaucgugauggucacaaucaugcuguguugcaugaccagcugcuguagcugccugaagggcuguuguagcuguggcagcugcugcaaguucgacgaggacgauucugagcccgugcugaagggcgugaaacugcacuacaccuga

SEQ ID NO: 23160 - RNA, 3816 nt, Artificial Sequence
  SARS-CoV-2/Wuhan/WIV05/2019__EPI_ISL_402128 spike protein CDS gc mod (1-1273)(K986P_V987P_H69del_V70del_Y453F_D614G_I692V_M1229I)
auguucguguuucuggugcugcugccccugguguccagccagugugugaaccugaccaccagaacacagcugccuccagccuacaccaacagcuucaccagaggcguguacuaccccgacaagguguucagauccagcgugcugcacucuacccaggaccuguuccugccuuucuucagcaacgugaccugguuccacgccaucuccggcaccaauggcaccaagagauucgacaaccccgugcugcccuucaacgacgggguguacuuugccagcaccgagaaguccaacaucaucagaggcuggaucuucggcaccacacuggacagcaagacccagagccugcugaucgugaacaacgccaccaacguggucaucaaagugugcgaguuccaguucugcaacgaccccuuccugggcgucuacuaccacaagaacaacaagagcuggauggaaagcgaguuccggguguacagcagcgccaacaacugcaccuucgaguacgugucccagccuuuccugauggaccuggaaggcaagcagggcaacuucaagaaccugcgcgaguucguguucaagaacaucgacggcuacuucaaaaucuacagcaagcacaccccuaucaaccucgugcgggaucugccucagggcuucucugcucuggaaccccugguggaucugcccaucggcaucaacaucacccgguuucagacacugcuggcccugcacagaagcuaccugacaccuggcgauagcagcagcggauggacagcuggugccgccgcuuacuaugugggcuaccugcagccuagaaccuuccugcugaaguacaacgagaacggcaccaucaccgacgccguggauugugcucuggauccucugagcgagacaaagugcacccugaaguccuucaccguggaaaagggcaucuaccagaccagcaacuuccgggugcagcccaccgaauccaucgugcgguuccccaauaucaccaaucugugccccuucggcgagguguucaaugccaccagauucgccucuguguacgccuggaaccggaagcggaucagcaauugcguggccgacuacuccgugcuguacaacuccgccagcuucagcaccuucaagugcuacggcguguccccuaccaagcugaacgaccugugcuucacaaacguguacgccgacagcuucgugauccggggagaugaagugcggcagauugccccuggacagacaggcaagaucgccgacuacaacuacaagcugcccgacgacuucaccggcugugugauugccuggaacagcaacaaccuggacuccaaagucggcggcaacuacaauuaccuguuccggcuguuccggaaguccaaucugaagcccuucgagcgggacaucagcaccgaaaucuaucaggccggcagcaccccuugcaacggcguggaaggcuucaacugcuacuucccacugcaguccuacggcuuucagcccacaaauggcgugggcuaucagcccuacagagugguggugcugagcuucgaacugcugcaugcuccugccacagugugcggcccuaagaaaagcaccaaucucgugaagaacaaaugcgugaacuucaacuucaacggccugaccggcaccggcgugcugacagagagcaacaagaaguuccugccauuccagcaguuuggccgggauaucgccgauaccacagacgccguuagagauccccagacacuggaaauccuggacaucaccccaugcagcuucggcggagugucugugaucaccccuggcaccaacaccagcaaucagguggcagugcuguaccagggcgugaacuguaccgaagugcccguggccauucacgccgaucagcugacaccuacauggcggguguacuccaccggcagcaauguguuucagaccagagccggcugucugaucggagccgagcacgugaacaauagcuacgagugcgacauccccaucggcgcuggcaucugugccagcuaccagacacagacaaacagccccagacgggcuagaagcguggccagccagagcgugauugccuacacaaugucucugggcgccgagaacagcguggccuacuccaacaacucuaucgcuauccccaccaacuucaccaucagcgugaccaccgagauccugccuguguccaugaccaagaccagcguggacugcaccauguacaucugcggcgauuccaccgagugcuccaaccugcugcugcaguacggcagcuucugcacccagcugaauagagcccugacagggaucgccguggaacaggacaagaacacccaagagguguucgcccaagugaagcaaaucuacaagaccccuccuaucaaggacuucggcggcuucaauuucagccagauucugcccgauccuagcaagcccagcaagcggagcuucaucgaggaccugcuguucaacaaagugacacuggccgacgccggcuucaucaagcaguauggcgauugucugggcgacauugccgccagggaucugauuugcgcccagaaguuuaacggacugacagugcugccuccucugcugaccgaugagaugaucgcccaguacacaucugcccugcuggccggcacaaucacaagcggcuggacauuuggagcuggcgccgcucugcagauccccuuugcuaugcagauggccuaccgguucaacggcaucggagugacccagaaugugcuguacgagaaccagaagcugaucgccaaccaguucaacagcgccaucggcaagauccaggacagccugagcagcacagcaagcgcccugggaaagcugcaggacguggucaaccagaaugcccaggcacugaacacccuggucaagcagcuguccuccaacuucggcgccaucagcucugugcugaacgauauccugagcagacuggacccuccugaggccgaggugcagaucgacagacugaucacaggcagacugcagagccuccagacauacgugacccagcagcugaucagagccgccgagauuagagccucugccaaucuggccgccaccaagaugucugagugugugcugggccagagcaagagaguggacuuuugcggcaagggcuaccaccugaugagcuucccucagucugccccucacggcgugguguuucugcacgugacauaugugcccgcucaagagaagaauuucaccaccgcuccagccaucugccacgacggcaaagcccacuuuccuagagaaggcguguucguguccaacggcacccauugguucgugacacagcggaacuucuacgagccccagaucaucaccaccgacaacaccuucgugucuggcaacugcgacguugugaucggcauugugaacaauaccguguacgacccucugcagcccgagcuggacagcuucaaagaggaacuggacaaguacuuuaagaaccacacaagccccgacguggaccugggcgauaucagcggaaucaaugccagcgucgugaacauccagaaagagaucgaccggcugaacgagguggccaagaaucugaacgagagccugaucgaccugcaagaacuggggaaguacgagcaguacaucaaguggcccugguacaucuggcugggcuuuaucgccggacugauugccaucgugaucgucacaaucaugcuguguugcaugaccagcugcuguagcugccugaagggcuguuguagcuguggcagcugcugcaaguucgacgaggacgauucugagcccgugcugaagggcgugaaacugcacuacaccuga

SEQ ID NO: 23161 - RNA, 3813 nt, Artificial Sequence
  SARS-CoV-2/Wuhan/WIV05/2019__EPI_ISL_402128 spike protein CDS gc mod (1-1273)(K986P_V987P_K986P_V987P_H69del_V70del_Y144del_N501Y_A570 D_D614G_P681H_T716I_S982A_D1118H)
auguucguguuucuggugcugcugccccugguguccagccagugugugaaccugaccaccagaacacagcugccuccagccuacaccaacagcuucaccagaggcguguacuaccccgacaagguguucagauccagcgugcugcacucuacccaggaccuguuccugccuuucuucagcaacgugaccugguuccacgccaucuccggcaccaauggcaccaagagauucgacaaccccgugcugcccuucaacgacgggguguacuuugccagcaccgagaaguccaacaucaucagaggcuggaucuucggcaccacacuggacagcaagacccagagccugcugaucgugaacaacgccaccaacguggucaucaaagugugcgaguuccaguucugcaacgaccccuuccugggcgucuaccacaagaacaacaagagcuggauggaaagcgaguuccggguguacagcagcgccaacaacugcaccuucgaguacgugucccagccuuuccugauggaccuggaaggcaagcagggcaacuucaagaaccugcgcgaguucguguucaagaacaucgacggcuacuucaaaaucuacagcaagcacaccccuaucaaccucgugcgggaucugccucagggcuucucugcucuggaaccccugguggaucugcccaucggcaucaacaucacccgguuucagacacugcuggcccugcacagaagcuaccugacaccuggcgauagcagcagcggauggacagcuggugccgccgcuuacuaugugggcuaccugcagccuagaaccuuccugcugaaguacaacgagaacggcaccaucaccgacgccguggauugugcucuggauccucugagcgagacaaagugcacccugaaguccuucaccguggaaaagggcaucuaccagaccagcaacuuccgggugcagcccaccgaauccaucgugcgguuccccaauaucaccaaucugugccccuucggcgagguguucaaugccaccagauucgccucuguguacgccuggaaccggaagcggaucagcaauugcguggccgacuacuccgugcuguacaacuccgccagcuucagcaccuucaagugcuacggcguguccccuaccaagcugaacgaccugugcuucacaaacguguacgccgacagcuucgugauccggggagaugaagugcggcagauugccccuggacagacaggcaagaucgccgacuacaacuacaagcugcccgacgacuucaccggcugugugauugccuggaacagcaacaaccuggacuccaaagucggcggcaacuacaauuaccuguaccggcuguuccggaaguccaaucugaagcccuucgagcgggacaucagcaccgaaaucuaucaggccggcagcaccccuugcaacggcguggaaggcuucaacugcuacuucccacugcaguccuacggcuuucagcccacauacggcgugggcuaucagcccuacagagugguggugcugagcuucgaacugcugcaugcuccugccacagugugcggcccuaagaaaagcaccaaucucgugaagaacaaaugcgugaacuucaacuucaacggccugaccggcaccggcgugcugacagagagcaacaagaaguuccugccauuccagcaguuuggccgggauaucgacgauaccacagacgccguuagagauccccagacacuggaaauccuggacaucaccccaugcagcuucggcggagugucugugaucaccccuggcaccaacaccagcaaucagguggcagugcuguaccagggcgugaacuguaccgaagugcccguggccauucacgccgaucagcugacaccuacauggcggguguacuccaccggcagcaauguguuucagaccagagccggcugucugaucggagccgagcacgugaacaauagcuacgagugcgacauccccaucggcgcuggcaucugugccagcuaccagacacagacaaacagccacagacgggcuagaagcguggccagccagagcaucauugccuacacaaugucucugggcgccgagaacagcguggccuacuccaacaacucuaucgcuauccccaucaacuucaccaucagcgugaccaccgagauccugccuguguccaugaccaagaccagcguggacugcaccauguacaucugcggcgauuccaccgagugcuccaaccugcugcugcaguacggcagcuucugcacccagcugaauagagcccugacagggaucgccguggaacaggacaagaacacccaagagguguucgcccaagugaagcaaaucuacaagaccccuccuaucaaggacuucggcggcuucaauuucagccagauucugcccgauccuagcaagcccagcaagcggagcuucaucgaggaccugcuguucaacaaagugacacuggccgacgccggcuucaucaagcaguauggcgauugucugggcgacauugccgccagggaucugauuugcgcccagaaguuuaacggacugacagugcugccuccucugcugaccgaugagaugaucgcccaguacacaucugcccugcuggccggcacaaucacaagcggcuggacauuuggagcuggcgccgcucugcagauccccuuugcuaugcagauggccuaccgguucaacggcaucggagugacccagaaugugcuguacgagaaccagaagcugaucgccaaccaguucaacagcgccaucggcaagauccaggacagccugagcagcacagcaagcgcccugggaaagcugcaggacguggucaaccagaaugcccaggcacugaacacccuggucaagcagcuguccuccaacuucggcgccaucagcucugugcugaacgauauccuggccagacuggacccuccugaggccgaggugcagaucgacagacugaucacaggcagacugcagagccuccagacauacgugacccagcagcugaucagagccgccgagauuagagccucugccaaucuggccgccaccaagaugucugagugugugcugggccagagcaagagaguggacuuuugcggcaagggcuaccaccugaugagcuucccucagucugccccucacggcgugguguuucugcacgugacauaugugcccgcucaagagaagaauuucaccaccgcuccagccaucugccacgacggcaaagcccacuuuccuagagaaggcguguucguguccaacggcacccauugguucgugacacagcggaacuucuacgagccccagaucaucaccacccacaacaccuucgugucuggcaacugcgacguugugaucggcauugugaacaauaccguguacgacccucugcagcccgagcuggacagcuucaaagaggaacuggacaaguacuuuaagaaccacacaagccccgacguggaccugggcgauaucagcggaaucaaugccagcgucgugaacauccagaaagagaucgaccggcugaacgagguggccaagaaucugaacgagagccugaucgaccugcaagaacuggggaaguacgagcaguacaucaaguggcccugguacaucuggcugggcuuuaucgccggacugauugccaucgugauggucacaaucaugcuguguugcaugaccagcugcuguagcugccugaagggcuguuguagcuguggcagcugcugcaaguucgacgaggacgauucugagcccgugcugaagggcgugaaacugcacuacaccuga

SEQ ID NO: 23162 - RNA, 3822 nt, Artificial Sequence
  SARS-CoV-2/Wuhan/WIV05/2019__EPI_ISL_402128 spike protein CDS gc mod (1-1273)(K986P_V987P_K986P_V987P_K417N_E484K_N501Y_D614G)
auguucguguuucuggugcugcugccccugguguccagccagugugugaaccugaccaccagaacacagcugccuccagccuacaccaacagcuucaccagaggcguguacuaccccgacaagguguucagauccagcgugcugcacucuacccaggaccuguuccugccuuucuucagcaacgugaccugguuccacgccauccacguguccggcaccaauggcaccaagagauucgacaaccccgugcugcccuucaacgacgggguguacuuugccagcaccgagaaguccaacaucaucagaggcuggaucuucggcaccacacuggacagcaagacccagagccugcugaucgugaacaacgccaccaacguggucaucaaagugugcgaguuccaguucugcaacgaccccuuccugggcgucuacuaccacaagaacaacaagagcuggauggaaagcgaguuccggguguacagcagcgccaacaacugcaccuucgaguacgugucccagccuuuccugauggaccuggaaggcaagcagggcaacuucaagaaccugcgcgaguucguguucaagaacaucgacggcuacuucaaaaucuacagcaagcacaccccuaucaaccucgugcgggaucugccucagggcuucucugcucuggaaccccugguggaucugcccaucggcaucaacaucacccgguuucagacacugcuggcccugcacagaagcuaccugacaccuggcgauagcagcagcggauggacagcuggugccgccgcuuacuaugugggcuaccugcagccuagaaccuuccugcugaaguacaacgagaacggcaccaucaccgacgccguggauugugcucuggauccucugagcgagacaaagugcacccugaaguccuucaccguggaaaagggcaucuaccagaccagcaacuuccgggugcagcccaccgaauccaucgugcgguuccccaauaucaccaaucugugccccuucggcgagguguucaaugccaccagauucgccucuguguacgccuggaaccggaagcggaucagcaauugcguggccgacuacuccgugcuguacaacuccgccagcuucagcaccuucaagugcuacggcguguccccuaccaagcugaacgaccugugcuucacaaacguguacgccgacagcuucgugauccggggagaugaagugcggcagauugccccuggacagacaggcaacaucgccgacuacaacuacaagcugcccgacgacuucaccggcugugugauugccuggaacagcaacaaccuggacuccaaagucggcggcaacuacaauuaccuguaccggcuguuccggaaguccaaucugaagcccuucgagcgggacaucagcaccgaaaucuaucaggccggcagcaccccuugcaacggcgugaagggcuucaacugcuacuucccacugcaguccuacggcuuucagcccacauacggcgugggcuaucagcccuacagagugguggugcugagcuucgaacugcugcaugcuccugccacagugugcggcccuaagaaaagcaccaaucucgugaagaacaaaugcgugaacuucaacuucaacggccugaccggcaccggcgugcugacagagagcaacaagaaguuccugccauuccagcaguuuggccgggauaucgccgauaccacagacgccguuagagauccccagacacuggaaauccuggacaucaccccaugcagcuucggcggagugucugugaucaccccuggcaccaacaccagcaaucagguggcagugcuguaccagggcgugaacuguaccgaagugcccguggccauucacgccgaucagcugacaccuacauggcggguguacuccaccggcagcaauguguuucagaccagagccggcugucugaucggagccgagcacgugaacaauagcuacgagugcgacauccccaucggcgcuggcaucugugccagcuaccagacacagacaaacagccccagacgggcuagaagcguggccagccagagcaucauugccuacacaaugucucugggcgccgagaacagcguggccuacuccaacaacucuaucgcuauccccaccaacuucaccaucagcgugaccaccgagauccugccuguguccaugaccaagaccagcguggacugcaccauguacaucugcggcgauuccaccgagugcuccaaccugcugcugcaguacggcagcuucugcacccagcugaauagagcccugacagggaucgccguggaacaggacaagaacacccaagagguguucgcccaagugaagcaaaucuacaagaccccuccuaucaaggacuucggcggcuucaauuucagccagauucugcccgauccuagcaagcccagcaagcggagcuucaucgaggaccugcuguucaacaaagugacacuggccgacgccggcuucaucaagcaguauggcgauugucugggcgacauugccgccagggaucugauuugcgcccagaaguuuaacggacugacagugcugccuccucugcugaccgaugagaugaucgcccaguacacaucugcccugcuggccggcacaaucacaagcggcuggacauuuggagcuggcgccgcucugcagauccccuuugcuaugcagauggccuaccgguucaacggcaucggagugacccagaaugugcuguacgagaaccagaagcugaucgccaaccaguucaacagcgccaucggcaagauccaggacagccugagcagcacagcaagcgcccugggaaagcugcaggacguggucaaccagaaugcccaggcacugaacacccuggucaagcagcuguccuccaacuucggcgccaucagcucugugcugaacgauauccugagcagacuggacccuccugaggccgaggugcagaucgacagacugaucacaggcagacugcagagccuccagacauacgugacccagcagcugaucagagccgccgagauuagagccucugccaaucuggccgccaccaagaugucugagugugugcugggccagagcaagagaguggacuuuugcggcaagggcuaccaccugaugagcuucccucagucugccccucacggcgugguguuucugcacgugacauaugugcccgcucaagagaagaauuucaccaccgcuccagccaucugccacgacggcaaagcccacuuuccuagagaaggcguguucguguccaacggcacccauugguucgugacacagcggaacuucuacgagccccagaucaucaccaccgacaacaccuucgugucuggcaacugcgacguugugaucggcauugugaacaauaccguguacgacccucugcagcccgagcuggacagcuucaaagaggaacuggacaaguacuuuaagaaccacacaagccccgacguggaccugggcgauaucagcggaaucaaugccagcgucgugaacauccagaaagagaucgaccggcugaacgagguggccaagaaucugaacgagagccugaucgaccugcaagaacuggggaaguacgagcaguacaucaaguggcccugguacaucuggcugggcuuuaucgccggacugauugccaucgugauggucacaaucaugcuguguugcaugaccagcugcuguagcugccugaagggcuguuguagcuguggcagcugcugcaaguucgacgaggacgauucugagcccgugcugaagggcgugaaacugcacuacaccuga

SEQ ID NO: 23163 - RNA, 3813 nt, Artificial Sequence
  SARS-CoV-2/Wuhan/WIV05/2019__EPI_ISL_402128 spike protein CDS gc mod (1-1273)(K986P_V987P_K986P_V987P_L18F_D80A_D215G_L242del_A243del_ L244del_R246I_K417N_E484K_N501Y_D614G_A701V)
auguucguguuucuggugcugcugccccugguguccagccagugugugaacuucaccaccagaacacagcugccuccagccuacaccaacagcuucaccagaggcguguacuaccccgacaagguguucagauccagcgugcugcacucuacccaggaccuguuccugccuuucuucagcaacgugaccugguuccacgccauccacguguccggcaccaauggcaccaagagauucgccaaccccgugcugcccuucaacgacgggguguacuuugccagcaccgagaaguccaacaucaucagaggcuggaucuucggcaccacacuggacagcaagacccagagccugcugaucgugaacaacgccaccaacguggucaucaaagugugcgaguuccaguucugcaacgaccccuuccugggcgucuacuaccacaagaacaacaagagcuggauggaaagcgaguuccggguguacagcagcgccaacaacugcaccuucgaguacgugucccagccuuuccugauggaccuggaaggcaagcagggcaacuucaagaaccugcgcgaguucguguucaagaacaucgacggcuacuucaaaaucuacagcaagcacaccccuaucaaccucgugcggggccugccucagggcuucucugcucuggaaccccugguggaucugcccaucggcaucaacaucacccgguuucagacacugcacaucagcuaccugacaccuggcgauagcagcagcggauggacagcuggugccgccgcuuacuaugugggcuaccugcagccuagaaccuuccugcugaaguacaacgagaacggcaccaucaccgacgccguggauugugcucuggauccucugagcgagacaaagugcacccugaaguccuucaccguggaaaagggcaucuaccagaccagcaacuuccgggugcagcccaccgaauccaucgugcgguuccccaauaucaccaaucugugccccuucggcgagguguucaaugccaccagauucgccucuguguacgccuggaaccggaagcggaucagcaauugcguggccgacuacuccgugcuguacaacuccgccagcuucagcaccuucaagugcuacggcguguccccuaccaagcugaacgaccugugcuucacaaacguguacgccgacagcuucgugauccggggagaugaagugcggcagauugccccuggacagacaggcaacaucgccgacuacaacuacaagcugcccgacgacuucaccggcugugugauugccuggaacagcaacaaccuggacuccaaagucggcggcaacuacaauuaccuguaccggcuguuccggaaguccaaucugaagcccuucgagcgggacaucagcaccgaaaucuaucaggccggcagcaccccuugcaacggcgugaagggcuucaacugcuacuucccacugcaguccuacggcuuucagcccacauacggcgugggcuaucagcccuacagagugguggugcugagcuucgaacugcugcaugcuccugccacagugugcggcccuaagaaaagcaccaaucucgugaagaacaaaugcgugaacuucaacuucaacggccugaccggcaccggcgugcugacagagagcaacaagaaguuccugccauuccagcaguuuggccgggauaucgccgauaccacagacgccguuagagauccccagacacuggaaauccuggacaucaccccaugcagcuucggcggagugucugugaucaccccuggcaccaacaccagcaaucagguggcagugcuguaccagggcgugaacuguaccgaagugcccguggccauucacgccgaucagcugacaccuacauggcggguguacuccaccggcagcaauguguuucagaccagagccggcugucugaucggagccgagcacgugaacaauagcuacgagugcgacauccccaucggcgcuggcaucugugccagcuaccagacacagacaaacagccccagacgggcuagaagcguggccagccagagcaucauugccuacacaaugucucugggcguggagaacagcguggccuacuccaacaacucuaucgcuauccccaccaacuucaccaucagcgugaccaccgagauccugccuguguccaugaccaagaccagcguggacugcaccauguacaucugcggcgauuccaccgagugcuccaaccugcugcugcaguacggcagcuucugcacccagcugaauagagcccugacagggaucgccguggaacaggacaagaacacccaagagguguucgcccaagugaagcaaaucuacaagaccccuccuaucaaggacuucggcggcuucaauuucagccagauucugcccgauccuagcaagcccagcaagcggagcuucaucgaggaccugcuguucaacaaagugacacuggccgacgccggcuucaucaagcaguauggcgauugucugggcgacauugccgccagggaucugauuugcgcccagaaguuuaacggacugacagugcugccuccucugcugaccgaugagaugaucgcccaguacacaucugcccugcuggccggcacaaucacaagcggcuggacauuuggagcuggcgccgcucugcagauccccuuugcuaugcagauggccuaccgguucaacggcaucggagugacccagaaugugcuguacgagaaccagaagcugaucgccaaccaguucaacagcgccaucggcaagauccaggacagccugagcagcacagcaagcgcccugggaaagcugcaggacguggucaaccagaaugcccaggcacugaacacccuggucaagcagcuguccuccaacuucggcgccaucagcucugugcugaacgauauccugagcagacuggacccuccugaggccgaggugcagaucgacagacugaucacaggcagacugcagagccuccagacauacgugacccagcagcugaucagagccgccgagauuagagccucugccaaucuggccgccaccaagaugucugagugugugcugggccagagcaagagaguggacuuuugcggcaagggcuaccaccugaugagcuucccucagucugccccucacggcgugguguuucugcacgugacauaugugcccgcucaagagaagaauuucaccaccgcuccagccaucugccacgacggcaaagcccacuuuccuagagaaggcguguucguguccaacggcacccauugguucgugacacagcggaacuucuacgagccccagaucaucaccaccgacaacaccuucgugucuggcaacugcgacguugugaucggcauugugaacaauaccguguacgacccucugcagcccgagcuggacagcuucaaagaggaacuggacaaguacuuuaagaaccacacaagccccgacguggaccugggcgauaucagcggaaucaaugccagcgucgugaacauccagaaagagaucgaccggcugaacgagguggccaagaaucugaacgagagccugaucgaccugcaagaacuggggaaguacgagcaguacaucaaguggcccugguacaucuggcugggcuuuaucgccggacugauugccaucgugauggucacaaucaugcuguguugcaugaccagcugcuguagcugccugaagggcuguuguagcuguggcagcugcugcaaguucgacgaggacgauucugagcccgugcugaagggcgugaaacugcacuacaccuga

SEQ ID NO: 23164 - RNA, 3822 nt, Artificial Sequence
  SARS-CoV-2/Wuhan/WIV05/2019__EPI_ISL_402128 spike protein CDS gc mod (1-1273)(K986P_V987P_K986P_V987P_E484K_D614G)
auguucguguuucuggugcugcugccccugguguccagccagugugugaaccugaccaccagaacacagcugccuccagccuacaccaacagcuucaccagaggcguguacuaccccgacaagguguucagauccagcgugcugcacucuacccaggaccuguuccugccuuucuucagcaacgugaccugguuccacgccauccacguguccggcaccaauggcaccaagagauucgacaaccccgugcugcccuucaacgacgggguguacuuugccagcaccgagaaguccaacaucaucagaggcuggaucuucggcaccacacuggacagcaagacccagagccugcugaucgugaacaacgccaccaacguggucaucaaagugugcgaguuccaguucugcaacgaccccuuccugggcgucuacuaccacaagaacaacaagagcuggauggaaagcgaguuccggguguacagcagcgccaacaacugcaccuucgaguacgugucccagccuuuccugauggaccuggaaggcaagcagggcaacuucaagaaccugcgcgaguucguguucaagaacaucgacggcuacuucaaaaucuacagcaagcacaccccuaucaaccucgugcgggaucugccucagggcuucucugcucuggaaccccugguggaucugcccaucggcaucaacaucacccgguuucagacacugcuggcccugcacagaagcuaccugacaccuggcgauagcagcagcggauggacagcuggugccgccgcuuacuaugugggcuaccugcagccuagaaccuuccugcugaaguacaacgagaacggcaccaucaccgacgccguggauugugcucuggauccucugagcgagacaaagugcacccugaaguccuucaccguggaaaagggcaucuaccagaccagcaacuuccgggugcagcccaccgaauccaucgugcgguuccccaauaucaccaaucugugccccuucggcgagguguucaaugccaccagauucgccucuguguacgccuggaaccggaagcggaucagcaauugcguggccgacuacuccgugcuguacaacuccgccagcuucagcaccuucaagugcuacggcguguccccuaccaagcugaacgaccugugcuucacaaacguguacgccgacagcuucgugauccggggagaugaagugcggcagauugccccuggacagacaggcaagaucgccgacuacaacuacaagcugcccgacgacuucaccggcugugugauugccuggaacagcaacaaccuggacuccaaagucggcggcaacuacaauuaccuguaccggcuguuccggaaguccaaucugaagcccuucgagcgggacaucagcaccgaaaucuaucaggccggcagcaccccuugcaacggcgugaagggcuucaacugcuacuucccacugcaguccuacggcuuucagcccacaaauggcgugggcuaucagcccuacagagugguggugcugagcuucgaacugcugcaugcuccugccacagugugcggcccuaagaaaagcaccaaucucgugaagaacaaaugcgugaacuucaacuucaacggccugaccggcaccggcgugcugacagagagcaacaagaaguuccugccauuccagcaguuuggccgggauaucgccgauaccacagacgccguuagagauccccagacacuggaaauccuggacaucaccccaugcagcuucggcggagugucugugaucaccccuggcaccaacaccagcaaucagguggcagugcuguaccagggcgugaacuguaccgaagugcccguggccauucacgccgaucagcugacaccuacauggcggguguacuccaccggcagcaauguguuucagaccagagccggcugucugaucggagccgagcacgugaacaauagcuacgagugcgacauccccaucggcgcuggcaucugugccagcuaccagacacagacaaacagccccagacgggcuagaagcguggccagccagagcaucauugccuacacaaugucucugggcgccgagaacagcguggccuacuccaacaacucuaucgcuauccccaccaacuucaccaucagcgugaccaccgagauccugccuguguccaugaccaagaccagcguggacugcaccauguacaucugcggcgauuccaccgagugcuccaaccugcugcugcaguacggcagcuucugcacccagcugaauagagcccugacagggaucgccguggaacaggacaagaacacccaagagguguucgcccaagugaagcaaaucuacaagaccccuccuaucaaggacuucggcggcuucaauuucagccagauucugcccgauccuagcaagcccagcaagcggagcuucaucgaggaccugcuguucaacaaagugacacuggccgacgccggcuucaucaagcaguauggcgauugucugggcgacauugccgccagggaucugauuugcgcccagaaguuuaacggacugacagugcugccuccucugcugaccgaugagaugaucgcccaguacacaucugcccugcuggccggcacaaucacaagcggcuggacauuuggagcuggcgccgcucugcagauccccuuugcuaugcagauggccuaccgguucaacggcaucggagugacccagaaugugcuguacgagaaccagaagcugaucgccaaccaguucaacagcgccaucggcaagauccaggacagccugagcagcacagcaagcgcccugggaaagcugcaggacguggucaaccagaaugcccaggcacugaacacccuggucaagcagcuguccuccaacuucggcgccaucagcucugugcugaacgauauccugagcagacuggacccuccugaggccgaggugcagaucgacagacugaucacaggcagacugcagagccuccagacauacgugacccagcagcugaucagagccgccgagauuagagccucugccaaucuggccgccaccaagaugucugagugugugcugggccagagcaagagaguggacuuuugcggcaagggcuaccaccugaugagcuucccucagucugccccucacggcgugguguuucugcacgugacauaugugcccgcucaagagaagaauuucaccaccgcuccagccaucugccacgacggcaaagcccacuuuccuagagaaggcguguucguguccaacggcacccauugguucgugacacagcggaacuucuacgagccccagaucaucaccaccgacaacaccuucgugucuggcaacugcgacguugugaucggcauugugaacaauaccguguacgacccucugcagcccgagcuggacagcuucaaagaggaacuggacaaguacuuuaagaaccacacaagccccgacguggaccugggcgauaucagcggaaucaaugccagcgucgugaacauccagaaagagaucgaccggcugaacgagguggccaagaaucugaacgagagccugaucgaccugcaagaacuggggaaguacgagcaguacaucaaguggcccugguacaucuggcugggcuuuaucgccggacugauugccaucgugauggucacaaucaugcuguguugcaugaccagcugcuguagcugccugaagggcuguuguagcuguggcagcugcugcaaguucgacgaggacgauucugagcccgugcugaagggcgugaaacugcacuacaccuga

SEQ ID NO: 23165 - RNA, 3822 nt, Artificial Sequence
  SARS-CoV-2/Wuhan/WIV05/2019__EPI_ISL_402128 spike protein CDS gc mod (1-1273)(K986P_V987P_K986P_V987P_L18F_T20N_P26S_D138Y_R190S_K417T _E484K_N501Y_D614G_H655Y_T1027I)
auguucguguuucuggugcugcugccccugguguccagccagugugugaacuucaccaacagaacacagcugccuagcgccuacaccaacagcuucaccagaggcguguacuaccccgacaagguguucagauccagcgugcugcacucuacccaggaccuguuccugccuuucuucagcaacgugaccugguuccacgccauccacguguccggcaccaauggcaccaagagauucgacaaccccgugcugcccuucaacgacgggguguacuuugccagcaccgagaaguccaacaucaucagaggcuggaucuucggcaccacacuggacagcaagacccagagccugcugaucgugaacaacgccaccaacguggucaucaaagugugcgaguuccaguucugcaacuaccccuuccugggcgucuacuaccacaagaacaacaagagcuggauggaaagcgaguuccggguguacagcagcgccaacaacugcaccuucgaguacgugucccagccuuuccugauggaccuggaaggcaagcagggcaacuucaagaaccugagcgaguucguguucaagaacaucgacggcuacuucaaaaucuacagcaagcacaccccuaucaaccucgugcgggaucugccucagggcuucucugcucuggaaccccugguggaucugcccaucggcaucaacaucacccgguuucagacacugcuggcccugcacagaagcuaccugacaccuggcgauagcagcagcggauggacagcuggugccgccgcuuacuaugugggcuaccugcagccuagaaccuuccugcugaaguacaacgagaacggcaccaucaccgacgccguggauugugcucuggauccucugagcgagacaaagugcacccugaaguccuucaccguggaaaagggcaucuaccagaccagcaacuuccgggugcagcccaccgaauccaucgugcgguuccccaauaucaccaaucugugccccuucggcgagguguucaaugccaccagauucgccucuguguacgccuggaaccggaagcggaucagcaauugcguggccgacuacuccgugcuguacaacuccgccagcuucagcaccuucaagugcuacggcguguccccuaccaagcugaacgaccugugcuucacaaacguguacgccgacagcuucgugauccggggagaugaagugcggcagauugccccuggacagacaggcaccaucgccgacuacaacuacaagcugcccgacgacuucaccggcugugugauugccuggaacagcaacaaccuggacuccaaagucggcggcaacuacaauuaccuguaccggcuguuccggaaguccaaucugaagcccuucgagcgggacaucagcaccgaaaucuaucaggccggcagcaccccuugcaacggcgugaagggcuucaacugcuacuucccacugcaguccuacggcuuucagcccacauacggcgugggcuaucagcccuacagagugguggugcugagcuucgaacugcugcaugcuccugccacagugugcggcccuaagaaaagcaccaaucucgugaagaacaaaugcgugaacuucaacuucaacggccugaccggcaccggcgugcugacagagagcaacaagaaguuccugccauuccagcaguuuggccgggauaucgccgauaccacagacgccguuagagauccccagacacuggaaauccuggacaucaccccaugcagcuucggcggagugucugugaucaccccuggcaccaacaccagcaaucagguggcagugcuguaccagggcgugaacuguaccgaagugcccguggccauucacgccgaucagcugacaccuacauggcggguguacuccaccggcagcaauguguuucagaccagagccggcugucugaucggagccgaguacgugaacaauagcuacgagugcgacauccccaucggcgcuggcaucugugccagcuaccagacacagacaaacagccccagacgggcuagaagcguggccagccagagcaucauugccuacacaaugucucugggcgccgagaacagcguggccuacuccaacaacucuaucgcuauccccaccaacuucaccaucagcgugaccaccgagauccugccuguguccaugaccaagaccagcguggacugcaccauguacaucugcggcgauuccaccgagugcuccaaccugcugcugcaguacggcagcuucugcacccagcugaauagagcccugacagggaucgccguggaacaggacaagaacacccaagagguguucgcccaagugaagcaaaucuacaagaccccuccuaucaaggacuucggcggcuucaauuucagccagauucugcccgauccuagcaagcccagcaagcggagcuucaucgaggaccugcuguucaacaaagugacacuggccgacgccggcuucaucaagcaguauggcgauugucugggcgacauugccgccagggaucugauuugcgcccagaaguuuaacggacugacagugcugccuccucugcugaccgaugagaugaucgcccaguacacaucugcccugcuggccggcacaaucacaagcggcuggacauuuggagcuggcgccgcucugcagauccccuuugcuaugcagauggccuaccgguucaacggcaucggagugacccagaaugugcuguacgagaaccagaagcugaucgccaaccaguucaacagcgccaucggcaagauccaggacagccugagcagcacagcaagcgcccugggaaagcugcaggacguggucaaccagaaugcccaggcacugaacacccuggucaagcagcuguccuccaacuucggcgccaucagcucugugcugaacgauauccugagcagacuggacccuccugaggccgaggugcagaucgacagacugaucacaggcagacugcagagccuccagacauacgugacccagcagcugaucagagccgccgagauuagagccucugccaaucuggccgccaucaagaugucugagugugugcugggccagagcaagagaguggacuuuugcggcaagggcuaccaccugaugagcuucccucagucugccccucacggcgugguguuucugcacgugacauaugugcccgcucaagagaagaauuucaccaccgcuccagccaucugccacgacggcaaagcccacuuuccuagagaaggcguguucguguccaacggcacccauugguucgugacacagcggaacuucuacgagccccagaucaucaccaccgacaacaccuucgugucuggcaacugcgacguugugaucggcauugugaacaauaccguguacgacccucugcagcccgagcuggacagcuucaaagaggaacuggacaaguacuuuaagaaccacacaagccccgacguggaccugggcgauaucagcggaaucaaugccagcgucgugaacauccagaaagagaucgaccggcugaacgagguggccaagaaucugaacgagagccugaucgaccugcaagaacuggggaaguacgagcaguacaucaaguggcccugguacaucuggcugggcuuuaucgccggacugauugccaucgugauggucacaaucaugcuguguugcaugaccagcugcuguagcugccugaagggcuguuguagcuguggcagcugcugcaaguucgacgaggacgauucugagcccgugcugaagggcgugaaacugcacuacaccuga

SEQ ID NO: 23166 - RNA, 3822 nt, Artificial Sequence
  SARS-CoV-2/Wuhan/WIV05/2019__EPI_ISL_402128 spike protein CDS gc mod (1-1273)(K986P_V987P_K986P_V987P_S13I_W152C_L452R_D614G)
auguucguguuucuggugcugcugccccugguguccauccagugugugaaccugaccaccagaacacagcugccuccagccuacaccaacagcuucaccagaggcguguacuaccccgacaagguguucagauccagcgugcugcacucuacccaggaccuguuccugccuuucuucagcaacgugaccugguuccacgccauccacguguccggcaccaauggcaccaagagauucgacaaccccgugcugcccuucaacgacgggguguacuuugccagcaccgagaaguccaacaucaucagaggcuggaucuucggcaccacacuggacagcaagacccagagccugcugaucgugaacaacgccaccaacguggucaucaaagugugcgaguuccaguucugcaacgaccccuuccugggcgucuacuaccacaagaacaacaagagcugcauggaaagcgaguuccggguguacagcagcgccaacaacugcaccuucgaguacgugucccagccuuuccugauggaccuggaaggcaagcagggcaacuucaagaaccugcgcgaguucguguucaagaacaucgacggcuacuucaaaaucuacagcaagcacaccccuaucaaccucgugcgggaucugccucagggcuucucugcucuggaaccccugguggaucugcccaucggcaucaacaucacccgguuucagacacugcuggcccugcacagaagcuaccugacaccuggcgauagcagcagcggauggacagcuggugccgccgcuuacuaugugggcuaccugcagccuagaaccuuccugcugaaguacaacgagaacggcaccaucaccgacgccguggauugugcucuggauccucugagcgagacaaagugcacccugaaguccuucaccguggaaaagggcaucuaccagaccagcaacuuccgggugcagcccaccgaauccaucgugcgguuccccaauaucaccaaucugugccccuucggcgagguguucaaugccaccagauucgccucuguguacgccuggaaccggaagcggaucagcaauugcguggccgacuacuccgugcuguacaacuccgccagcuucagcaccuucaagugcuacggcguguccccuaccaagcugaacgaccugugcuucacaaacguguacgccgacagcuucgugauccggggagaugaagugcggcagauugccccuggacagacaggcaagaucgccgacuacaacuacaagcugcccgacgacuucaccggcugugugauugccuggaacagcaacaaccuggacuccaaagucggcggcaacuacaauuaccgcuaccggcuguuccggaaguccaaucugaagcccuucgagcgggacaucagcaccgaaaucuaucaggccggcagcaccccuugcaacggcguggaaggcuucaacugcuacuucccacugcaguccuacggcuuucagcccacaaauggcgugggcuaucagcccuacagagugguggugcugagcuucgaacugcugcaugcuccugccacagugugcggcccuaagaaaagcaccaaucucgugaagaacaaaugcgugaacuucaacuucaacggccugaccggcaccggcgugcugacagagagcaacaagaaguuccugccauuccagcaguuuggccgggauaucgccgauaccacagacgccguuagagauccccagacacuggaaauccuggacaucaccccaugcagcuucggcggagugucugugaucaccccuggcaccaacaccagcaaucagguggcagugcuguaccagggcgugaacuguaccgaagugcccguggccauucacgccgaucagcugacaccuacauggcggguguacuccaccggcagcaauguguuucagaccagagccggcugucugaucggagccgagcacgugaacaauagcuacgagugcgacauccccaucggcgcuggcaucugugccagcuaccagacacagacaaacagccccagacgggcuagaagcguggccagccagagcaucauugccuacacaaugucucugggcgccgagaacagcguggccuacuccaacaacucuaucgcuauccccaccaacuucaccaucagcgugaccaccgagauccugccuguguccaugaccaagaccagcguggacugcaccauguacaucugcggcgauuccaccgagugcuccaaccugcugcugcaguacggcagcuucugcacccagcugaauagagcccugacagggaucgccguggaacaggacaagaacacccaagagguguucgcccaagugaagcaaaucuacaagaccccuccuaucaaggacuucggcggcuucaauuucagccagauucugcccgauccuagcaagcccagcaagcggagcuucaucgaggaccugcuguucaacaaagugacacuggccgacgccggcuucaucaagcaguauggcgauugucugggcgacauugccgccagggaucugauuugcgcccagaaguuuaacggacugacagugcugccuccucugcugaccgaugagaugaucgcccaguacacaucugcccugcuggccggcacaaucacaagcggcuggacauuuggagcuggcgccgcucugcagauccccuuugcuaugcagauggccuaccgguucaacggcaucggagugacccagaaugugcuguacgagaaccagaagcugaucgccaaccaguucaacagcgccaucggcaagauccaggacagccugagcagcacagcaagcgcccugggaaagcugcaggacguggucaaccagaaugcccaggcacugaacacccuggucaagcagcuguccuccaacuucggcgccaucagcucugugcugaacgauauccugagcagacuggacccuccugaggccgaggugcagaucgacagacugaucacaggcagacugcagagccuccagacauacgugacccagcagcugaucagagccgccgagauuagagccucugccaaucuggccgccaccaagaugucugagugugugcugggccagagcaagagaguggacuuuugcggcaagggcuaccaccugaugagcuucccucagucugccccucacggcgugguguuucugcacgugacauaugugcccgcucaagagaagaauuucaccaccgcuccagccaucugccacgacggcaaagcccacuuuccuagagaaggcguguucguguccaacggcacccauugguucgugacacagcggaacuucuacgagccccagaucaucaccaccgacaacaccuucgugucuggcaacugcgacguugugaucggcauugugaacaauaccguguacgacccucugcagcccgagcuggacagcuucaaagaggaacuggacaaguacuuuaagaaccacacaagccccgacguggaccugggcgauaucagcggaaucaaugccagcgucgugaacauccagaaagagaucgaccggcugaacgagguggccaagaaucugaacgagagccugaucgaccugcaagaacuggggaaguacgagcaguacaucaaguggcccugguacaucuggcugggcuuuaucgccggacugauugccaucgugauggucacaaucaugcuguguugcaugaccagcugcuguagcugccugaagggcuguuguagcuguggcagcugcugcaaguucgacgaggacgauucugagcccgugcugaagggcgugaaacugcacuacaccuga

SEQ ID NO: 23167 - RNA, 3822 nt, Artificial Sequence
  SARS-CoV-2/Wuhan/WIV05/2019__EPI_ISL_402128 spike protein CDS gc mod (1-1273)(K986P_V987P)
auguucguguuccuggugcugcugccucugguguccagccagugugugaaccugaccaccagaacacagcugccuccagccuacaccaacagcuuuaccagaggcguguacuaccccgacaagguguucagauccagcgugcugcacucuacccaggaccuguuccugccuuucuucagcaacgugaccugguuccacgccauccacguguccggcaccaauggcaccaagagauucgacaaccccgugcugcccuucaacgacgggguguacuuugccagcaccgagaaguccaacaucaucagaggcuggaucuucggcaccacacuggacagcaagacccagagccugcugaucgugaacaacgccaccaacguggucaucaaagugugcgaguuccaguucugcaacgaccccuuccugggcgucuacuaccacaagaacaacaagagcuggauggaaagcgaguuccggguguacagcagcgccaacaacugcaccuucgaguacgugucccagccuuuccugauggaccuggaaggcaagcagggcaacuucaagaaccugcgcgaguucguguuuaagaacaucgacggcuacuucaagaucuacagcaagcacaccccuaucaaccucgugcgggaucugccucagggcuucucugcucuggaaccccugguggaucugcccaucggcaucaacaucacccgguuucagacacugcuggcccugcacagaagcuaccugacaccuggcgauagcagcagcggauggacagcuggugccgccgcuuacuaugugggcuaccugcagccuagaaccuuccugcugaaguacaacgagaacggcaccaucaccgacgccguggauugugcucuggauccucugagcgagacaaagugcacccugaaguccuucaccguggaaaagggcaucuaccagaccagcaacuuccgggugcagcccaccgaauccaucgugcgguuccccaauaucaccaaucugugccccuucggcgagguguucaaugccaccagauucgccucuguguacgccuggaaccggaagcggaucagcaauugcguggccgacuacuccgugcuguacaacuccgccagcuucagcaccuucaagugcuacggcguguccccuaccaagcugaacgaccugugcuucacaaacguguacgccgacagcuucgugauccggggagaugaagugcggcagauugccccuggacagacaggcaagaucgccgacuacaacuacaagcugcccgacgacuucaccggcugugugauugccuggaacagcaacaaccuggacuccaaagucggcggcaacuacaauuaccuguaccggcuguuccggaaguccaaucugaagcccuucgagcgggacaucuccaccgagaucuaucaggccggcagcaccccuuguaacggcguggaaggcuucaacugcuacuucccacugcaguccuacggcuuucagcccacaaauggcgugggcuaucagcccuacagagugguggugcugagcuucgaacugcugcaugccccugccacagugugcggcccuaagaaaagcaccaaucucgugaagaacaaaugcgugaacuucaacuucaacggccugaccggcaccggcgugcugacagagagcaacaagaaguuccugccauuccagcaguuuggccgggauaucgccgauaccacagacgccguuagagauccccagacacuggaaauccuggacaucaccccuugcagcuucggcggagugucugugaucaccccuggcaccaacaccagcaaucagguggcagugcuguaccaggacgugaacuguaccgaagugcccguggccauucacgccgaucagcugacaccuacauggcggguguacuccaccggcagcaauguguuucagaccagagccggcugucugaucggagccgagcacgugaacaauagcuacgagugcgacauccccaucggcgcuggaaucugcgccagcuaccagacacagacaaacagcccucggagagccagaagcguggccagccagagcaucauugccuacacaaugucucugggcgccgagaacagcguggccuacuccaacaacucuaucgcuauccccaccaacuucaccaucagcgugaccacagagauccugccuguguccaugaccaagaccagcguggacugcaccauguacaucugcggcgauuccaccgagugcuccaaccugcugcugcaguacggcagcuucugcacccagcugaauagagcccugacagggaucgccguggaacaggacaagaacacccaagagguguucgcccaagugaagcagaucuacaagaccccuccuaucaaggacuucggcggcuucaauuucagccagauucugcccgauccuagcaagcccagcaagcggagcuucaucgaggaccugcuguucaacaaagugacacuggccgacgccggcuucaucaagcaguauggcgauugucugggcgacauugccgccagggaucugauuugcgcccagaaguuuaacggacugacagugcugccuccucugcugaccgaugagaugaucgcccaguacacaucugcccugcuggccggcacaaucacaagcggcuggacauuuggagcaggcgccgcucugcagauccccuuugcuaugcagauggccuaccgguucaacggcaucggagugacccagaaugugcuguacgagaaccagaagcugaucgccaaccaguucaacagcgccaucggcaagauccaggacagccugagcagcacagcaagcgcccugggaaagcugcaggacguggucaaccagaaugcccaggcacugaacacccuggucaagcagcuguccuccaacuucggcgccaucagcucugugcugaacgauauccugagcagacuggacccuccugaggccgaggugcagaucgacagacugaucacaggcagacugcagagccuccagacauacgugacccagcagcugaucagagccgccgagauuagagccucugccaaucuggccgccaccaagaugucugagugugugcugggccagagcaagagaguggacuuuugcggcaagggcuaccaccugaugagcuucccucagucugccccucacggcgugguguuucugcacgugacauaugugcccgcucaagagaagaauuucaccaccgcuccagccaucugccacgacggcaaagcccacuuuccuagagaaggcguguucguguccaacggcacccauugguucgugacacagcggaacuucuacgagccccagaucaucaccaccgacaacaccuucgugucuggcaacugcgacgucgugaucggcauugugaacaauaccguguacgacccucugcagcccgagcuggacagcuucaaagaggaacuggacaaguacuuuaagaaccacacaagccccgacguggaccugggcgauaucagcggaaucaaugccagcgucgugaacauccagaaagagaucgaccggcugaacgagguggccaagaaucugaacgagagccugaucgaccugcaagaacuggggaaguacgagcaguacaucaaguggcccugguacaucuggcugggcuuuaucgccggacugauugccaucgugauggucacaaucaugcuguguugcaugaccagcugcuguagcugccugaagggcuguuguagcuguggcagcugcugcaaguucgacgaggacgauucugagcccgugcugaagggcgugaaacugcacuacacauga

SEQ ID NO: 23168 - RNA, 3822 nt, Artificial Sequence
  SARS-CoV-2/Wuhan/WIV05/2019__EPI_ISL_402128 spike protein CDS gc mod (1-1273)(K986P_V987P_ D614G)
auguucguguuccuggugcugcugccucugguguccagccagugugugaaccugaccaccagaacacagcugccuccagccuacaccaacagcuuuaccagaggcguguacuaccccgacaagguguucagauccagcgugcugcacucuacccaggaccuguuccugccuuucuucagcaacgugaccugguuccacgccauccacguguccggcaccaauggcaccaagagauucgacaaccccgugcugcccuucaacgacgggguguacuuugccagcaccgagaaguccaacaucaucagaggcuggaucuucggcaccacacuggacagcaagacccagagccugcugaucgugaacaacgccaccaacguggucaucaaagugugcgaguuccaguucugcaacgaccccuuccugggcgucuacuaccacaagaacaacaagagcuggauggaaagcgaguuccggguguacagcagcgccaacaacugcaccuucgaguacgugucccagccuuuccugauggaccuggaaggcaagcagggcaacuucaagaaccugcgcgaguucguguuuaagaacaucgacggcuacuucaagaucuacagcaagcacaccccuaucaaccucgugcgggaucugccucagggcuucucugcucuggaaccccugguggaucugcccaucggcaucaacaucacccgguuucagacacugcuggcccugcacagaagcuaccugacaccuggcgauagcagcagcggauggacagcuggugccgccgcuuacuaugugggcuaccugcagccuagaaccuuccugcugaaguacaacgagaacggcaccaucaccgacgccguggauugugcucuggauccucugagcgagacaaagugcacccugaaguccuucaccguggaaaagggcaucuaccagaccagcaacuuccgggugcagcccaccgaauccaucgugcgguuccccaauaucaccaaucugugccccuucggcgagguguucaaugccaccagauucgccucuguguacgccuggaaccggaagcggaucagcaauugcguggccgacuacuccgugcuguacaacuccgccagcuucagcaccuucaagugcuacggcguguccccuaccaagcugaacgaccugugcuucacaaacguguacgccgacagcuucgugauccggggagaugaagugcggcagauugccccuggacagacaggcaagaucgccgacuacaacuacaagcugcccgacgacuucaccggcugugugauugccuggaacagcaacaaccuggacuccaaagucggcggcaacuacaauuaccuguaccggcuguuccggaaguccaaucugaagcccuucgagcgggacaucuccaccgagaucuaucaggccggcagcaccccuuguaacggcguggaaggcuucaacugcuacuucccacugcaguccuacggcuuucagcccacaaauggcgugggcuaucagcccuacagagugguggugcugagcuucgaacugcugcaugccccugccacagugugcggcccuaagaaaagcaccaaucucgugaagaacaaaugcgugaacuucaacuucaacggccugaccggcaccggcgugcugacagagagcaacaagaaguuccugccauuccagcaguuuggccgggauaucgccgauaccacagacgccguuagagauccccagacacuggaaauccuggacaucaccccuugcagcuucggcggagugucugugaucaccccuggcaccaacaccagcaaucagguggcagugcuguaccagggcgugaacuguaccgaagugcccguggccauucacgccgaucagcugacaccuacauggcggguguacuccaccggcagcaauguguuucagaccagagccggcugucugaucggagccgagcacgugaacaauagcuacgagugcgacauccccaucggcgcuggaaucugcgccagcuaccagacacagacaaacagcccucggagagccagaagcguggccagccagagcaucauugccuacacaaugucucugggcgccgagaacagcguggccuacuccaacaacucuaucgcuauccccaccaacuucaccaucagcgugaccacagagauccugccuguguccaugaccaagaccagcguggacugcaccauguacaucugcggcgauuccaccgagugcuccaaccugcugcugcaguacggcagcuucugcacccagcugaauagagcccugacagggaucgccguggaacaggacaagaacacccaagagguguucgcccaagugaagcagaucuacaagaccccuccuaucaaggacuucggcggcuucaauuucagccagauucugcccgauccuagcaagcccagcaagcggagcuucaucgaggaccugcuguucaacaaagugacacuggccgacgccggcuucaucaagcaguauggcgauugucugggcgacauugccgccagggaucugauuugcgcccagaaguuuaacggacugacagugcugccuccucugcugaccgaugagaugaucgcccaguacacaucugcccugcuggccggcacaaucacaagcggcuggacauuuggagcaggcgccgcucugcagauccccuuugcuaugcagauggccuaccgguucaacggcaucggagugacccagaaugugcuguacgagaaccagaagcugaucgccaaccaguucaacagcgccaucggcaagauccaggacagccugagcagcacagcaagcgcccugggaaagcugcaggacguggucaaccagaaugcccaggcacugaacacccuggucaagcagcuguccuccaacuucggcgccaucagcucugugcugaacgauauccugagcagacuggacccuccugaggccgaggugcagaucgacagacugaucacaggcagacugcagagccuccagacauacgugacccagcagcugaucagagccgccgagauuagagccucugccaaucuggccgccaccaagaugucugagugugugcugggccagagcaagagaguggacuuuugcggcaagggcuaccaccugaugagcuucccucagucugccccucacggcgugguguuucugcacgugacauaugugcccgcucaagagaagaauuucaccaccgcuccagccaucugccacgacggcaaagcccacuuuccuagagaaggcguguucguguccaacggcacccauugguucgugacacagcggaacuucuacgagccccagaucaucaccaccgacaacaccuucgugucuggcaacugcgacgucgugaucggcauugugaacaauaccguguacgacccucugcagcccgagcuggacagcuucaaagaggaacuggacaaguacuuuaagaaccacacaagccccgacguggaccugggcgauaucagcggaaucaaugccagcgucgugaacauccagaaagagaucgaccggcugaacgagguggccaagaaucugaacgagagccugaucgaccugcaagaacuggggaaguacgagcaguacaucaaguggcccugguacaucuggcugggcuuuaucgccggacugauugccaucgugauggucacaaucaugcuguguugcaugaccagcugcuguagcugccugaagggcuguuguagcuguggcagcugcugcaaguucgacgaggacgauucugagcccgugcugaagggcgugaaacugcacuacacauga

SEQ ID NO: 23169 - RNA, 3822 nt, Artificial Sequence
  SARS-CoV-2/Wuhan/WIV05/2019__EPI_ISL_402128 spike protein CDS gc mod (1-1273)(K986P_V987P_A222V_D614G)
auguucguguuccuggugcugcugccucugguguccagccagugugugaaccugaccaccagaacacagcugccuccagccuacaccaacagcuuuaccagaggcguguacuaccccgacaagguguucagauccagcgugcugcacucuacccaggaccuguuccugccuuucuucagcaacgugaccugguuccacgccauccacguguccggcaccaauggcaccaagagauucgacaaccccgugcugcccuucaacgacgggguguacuuugccagcaccgagaaguccaacaucaucagaggcuggaucuucggcaccacacuggacagcaagacccagagccugcugaucgugaacaacgccaccaacguggucaucaaagugugcgaguuccaguucugcaacgaccccuuccugggcgucuacuaccacaagaacaacaagagcuggauggaaagcgaguuccggguguacagcagcgccaacaacugcaccuucgaguacgugucccagccuuuccugauggaccuggaaggcaagcagggcaacuucaagaaccugcgcgaguucguguuuaagaacaucgacggcuacuucaagaucuacagcaagcacaccccuaucaaccucgugcgggaucugccucagggcuucucugugcuggaaccccugguggaucugcccaucggcaucaacaucacccgguuucagacacugcuggcccugcacagaagcuaccugacaccuggcgauagcagcagcggauggacagcuggugccgccgcuuacuaugugggcuaccugcagccuagaaccuuccugcugaaguacaacgagaacggcaccaucaccgacgccguggauugugcucuggauccucugagcgagacaaagugcacccugaaguccuucaccguggaaaagggcaucuaccagaccagcaacuuccgggugcagcccaccgaauccaucgugcgguuccccaauaucaccaaucugugccccuucggcgagguguucaaugccaccagauucgccucuguguacgccuggaaccggaagcggaucagcaauugcguggccgacuacuccgugcuguacaacuccgccagcuucagcaccuucaagugcuacggcguguccccuaccaagcugaacgaccugugcuucacaaacguguacgccgacagcuucgugauccggggagaugaagugcggcagauugccccuggacagacaggcaagaucgccgacuacaacuacaagcugcccgacgacuucaccggcugugugauugccuggaacagcaacaaccuggacuccaaagucggcggcaacuacaauuaccuguaccggcuguuccggaaguccaaucugaagcccuucgagcgggacaucuccaccgagaucuaucaggccggcagcaccccuuguaacggcguggaaggcuucaacugcuacuucccacugcaguccuacggcuuucagcccacaaauggcgugggcuaucagcccuacagagugguggugcugagcuucgaacugcugcaugccccugccacagugugcggcccuaagaaaagcaccaaucucgugaagaacaaaugcgugaacuucaacuucaacggccugaccggcaccggcgugcugacagagagcaacaagaaguuccugccauuccagcaguuuggccgggauaucgccgauaccacagacgccguuagagauccccagacacuggaaauccuggacaucaccccuugcagcuucggcggagugucugugaucaccccuggcaccaacaccagcaaucagguggcagugcuguaccagggcgugaacuguaccgaagugcccguggccauucacgccgaucagcugacaccuacauggcggguguacuccaccggcagcaauguguuucagaccagagccggcugucugaucggagccgagcacgugaacaauagcuacgagugcgacauccccaucggcgcuggaaucugcgccagcuaccagacacagacaaacagcccucggagagccagaagcguggccagccagagcaucauugccuacacaaugucucugggcgccgagaacagcguggccuacuccaacaacucuaucgcuauccccaccaacuucaccaucagcgugaccacagagauccugccuguguccaugaccaagaccagcguggacugcaccauguacaucugcggcgauuccaccgagugcuccaaccugcugcugcaguacggcagcuucugcacccagcugaauagagcccugacagggaucgccguggaacaggacaagaacacccaagagguguucgcccaagugaagcagaucuacaagaccccuccuaucaaggacuucggcggcuucaauuucagccagauucugcccgauccuagcaagcccagcaagcggagcuucaucgaggaccugcuguucaacaaagugacacuggccgacgccggcuucaucaagcaguauggcgauugucugggcgacauugccgccagggaucugauuugcgcccagaaguuuaacggacugacagugcugccuccucugcugaccgaugagaugaucgcccaguacacaucugcccugcuggccggcacaaucacaagcggcuggacauuuggagcaggcgccgcucugcagauccccuuugcuaugcagauggccuaccgguucaacggcaucggagugacccagaaugugcuguacgagaaccagaagcugaucgccaaccaguucaacagcgccaucggcaagauccaggacagccugagcagcacagcaagcgcccugggaaagcugcaggacguggucaaccagaaugcccaggcacugaacacccuggucaagcagcuguccuccaacuucggcgccaucagcucugugcugaacgauauccugagcagacuggacccuccugaggccgaggugcagaucgacagacugaucacaggcagacugcagagccuccagacauacgugacccagcagcugaucagagccgccgagauuagagccucugccaaucuggccgccaccaagaugucugagugugugcugggccagagcaagagaguggacuuuugcggcaagggcuaccaccugaugagcuucccucagucugccccucacggcgugguguuucugcacgugacauaugugcccgcucaagagaagaauuucaccaccgcuccagccaucugccacgacggcaaagcccacuuuccuagagaaggcguguucguguccaacggcacccauugguucgugacacagcggaacuucuacgagccccagaucaucaccaccgacaacaccuucgugucuggcaacugcgacgucgugaucggcauugugaacaauaccguguacgacccucugcagcccgagcuggacagcuucaaagaggaacuggacaaguacuuuaagaaccacacaagccccgacguggaccugggcgauaucagcggaaucaaugccagcgucgugaacauccagaaagagaucgaccggcugaacgagguggccaagaaucugaacgagagccugaucgaccugcaagaacuggggaaguacgagcaguacaucaaguggcccugguacaucuggcugggcuuuaucgccggacugauugccaucgugauggucacaaucaugcuguguugcaugaccagcugcuguagcugccugaagggcuguuguagcuguggcagcugcugcaaguucgacgaggacgauucugagcccgugcugaagggcgugaaacugcacuacacauga

SEQ ID NO: 23170 - RNA, 3822 nt, Artificial Sequence
  SARS-CoV-2/Wuhan/WIV05/2019__EPI_ISL_402128 spike protein CDS gc mod (1-1273)(K986P_V987P_N439K_D614G)
auguucguguuccuggugcugcugccucugguguccagccagugugugaaccugaccaccagaacacagcugccuccagccuacaccaacagcuuuaccagaggcguguacuaccccgacaagguguucagauccagcgugcugcacucuacccaggaccuguuccugccuuucuucagcaacgugaccugguuccacgccauccacguguccggcaccaauggcaccaagagauucgacaaccccgugcugcccuucaacgacgggguguacuuugccagcaccgagaaguccaacaucaucagaggcuggaucuucggcaccacacuggacagcaagacccagagccugcugaucgugaacaacgccaccaacguggucaucaaagugugcgaguuccaguucugcaacgaccccuuccugggcgucuacuaccacaagaacaacaagagcuggauggaaagcgaguuccggguguacagcagcgccaacaacugcaccuucgaguacgugucccagccuuuccugauggaccuggaaggcaagcagggcaacuucaagaaccugcgcgaguucguguuuaagaacaucgacggcuacuucaagaucuacagcaagcacaccccuaucaaccucgugcgggaucugccucagggcuucucugcucuggaaccccugguggaucugcccaucggcaucaacaucacccgguuucagacacugcuggcccugcacagaagcuaccugacaccuggcgauagcagcagcggauggacagcuggugccgccgcuuacuaugugggcuaccugcagccuagaaccuuccugcugaaguacaacgagaacggcaccaucaccgacgccguggauugugcucuggauccucugagcgagacaaagugcacccugaaguccuucaccguggaaaagggcaucuaccagaccagcaacuuccgggugcagcccaccgaauccaucgugcgguuccccaauaucaccaaucugugccccuucggcgagguguucaaugccaccagauucgccucuguguacgccuggaaccggaagcggaucagcaauugcguggccgacuacuccgugcuguacaacuccgccagcuucagcaccuucaagugcuacggcguguccccuaccaagcugaacgaccugugcuucacaaacguguacgccgacagcuucgugauccggggagaugaagugcggcagauugccccuggacagacaggcaagaucgccgacuacaacuacaagcugcccgacgacuucaccggcugugugauugccuggaacagcaagaaccuggacuccaaagucggcggcaacuacaauuaccuguaccggcuguuccggaaguccaaucugaagcccuucgagcgggacaucuccaccgagaucuaucaggccggcagcaccccuuguaacggcguggaaggcuucaacugcuacuucccacugcaguccuacggcuuucagcccacaaauggcgugggcuaucagcccuacagagugguggugcugagcuucgaacugcugcaugccccugccacagugugcggcccuaagaaaagcaccaaucucgugaagaacaaaugcgugaacuucaacuucaacggccugaccggcaccggcgugcugacagagagcaacaagaaguuccugccauuccagcaguuuggccgggauaucgccgauaccacagacgccguuagagauccccagacacuggaaauccuggacaucaccccuugcagcuucggcggagugucugugaucaccccuggcaccaacaccagcaaucagguggcagugcuguaccagggcgugaacuguaccgaagugcccguggccauucacgccgaucagcugacaccuacauggcggguguacuccaccggcagcaauguguuucagaccagagccggcugucugaucggagccgagcacgugaacaauagcuacgagugcgacauccccaucggcgcuggaaucugcgccagcuaccagacacagacaaacagcccucggagagccagaagcguggccagccagagcaucauugccuacacaaugucucugggcgccgagaacagcguggccuacuccaacaacucuaucgcuauccccaccaacuucaccaucagcgugaccacagagauccugccuguguccaugaccaagaccagcguggacugcaccauguacaucugcggcgauuccaccgagugcuccaaccugcugcugcaguacggcagcuucugcacccagcugaauagagcccugacagggaucgccguggaacaggacaagaacacccaagagguguucgcccaagugaagcagaucuacaagaccccuccuaucaaggacuucggcggcuucaauuucagccagauucugcccgauccuagcaagcccagcaagcggagcuucaucgaggaccugcuguucaacaaagugacacuggccgacgccggcuucaucaagcaguauggcgauugucugggcgacauugccgccagggaucugauuugcgcccagaaguuuaacggacugacagugcugccuccucugcugaccgaugagaugaucgcccaguacacaucugcccugcuggccggcacaaucacaagcggcuggacauuuggagcaggcgccgcucugcagauccccuuugcuaugcagauggccuaccgguucaacggcaucggagugacccagaaugugcuguacgagaaccagaagcugaucgccaaccaguucaacagcgccaucggcaagauccaggacagccugagcagcacagcaagcgcccugggaaagcugcaggacguggucaaccagaaugcccaggcacugaacacccuggucaagcagcuguccuccaacuucggcgccaucagcucugugcugaacgauauccugagcagacuggacccuccugaggccgaggugcagaucgacagacugaucacaggcagacugcagagccuccagacauacgugacccagcagcugaucagagccgccgagauuagagccucugccaaucuggccgccaccaagaugucugagugugugcugggccagagcaagagaguggacuuuugcggcaagggcuaccaccugaugagcuucccucagucugccccucacggcgugguguuucugcacgugacauaugugcccgcucaagagaagaauuucaccaccgcuccagccaucugccacgacggcaaagcccacuuuccuagagaaggcguguucguguccaacggcacccauugguucgugacacagcggaacuucuacgagccccagaucaucaccaccgacaacaccuucgugucuggcaacugcgacgucgugaucggcauugugaacaauaccguguacgacccucugcagcccgagcuggacagcuucaaagaggaacuggacaaguacuuuaagaaccacacaagccccgacguggaccugggcgauaucagcggaaucaaugccagcgucgugaacauccagaaagagaucgaccggcugaacgagguggccaagaaucugaacgagagccugaucgaccugcaagaacuggggaaguacgagcaguacaucaaguggcccugguacaucuggcugggcuuuaucgccggacugauugccaucgugauggucacaaucaugcuguguugcaugaccagcugcuguagcugccugaagggcuguuguagcuguggcagcugcugcaaguucgacgaggacgauucugagcccgugcugaagggcgugaaacugcacuacacauga

SEQ ID NO: 23171 - RNA, 3822 nt, Artificial Sequence
  SARS-CoV-2/Wuhan/WIV05/2019__EPI_ISL_402128 spike protein CDS gc mod (1-1273)(K986P_V987P_S477N_D614G)
auguucguguuccuggugcugcugccucugguguccagccagugugugaaccugaccaccagaacacagcugccuccagccuacaccaacagcuuuaccagaggcguguacuaccccgacaagguguucagauccagcgugcugcacucuacccaggaccuguuccugccuuucuucagcaacgugaccugguuccacgccauccacguguccggcaccaauggcaccaagagauucgacaaccccgugcugcccuucaacgacgggguguacuuugccagcaccgagaaguccaacaucaucagaggcuggaucuucggcaccacacuggacagcaagacccagagccugcugaucgugaacaacgccaccaacguggucaucaaagugugcgaguuccaguucugcaacgaccccuuccugggcgucuacuaccacaagaacaacaagagcuggauggaaagcgaguuccggguguacagcagcgccaacaacugcaccuucgaguacgugucccagccuuuccugauggaccuggaaggcaagcagggcaacuucaagaaccugcgcgaguucguguuuaagaacaucgacggcuacuucaagaucuacagcaagcacaccccuaucaaccucgugcgggaucugccucagggcuucucugcucuggaaccccugguggaucugcccaucggcaucaacaucacccgguuucagacacugcuggcccugcacagaagcuaccugacaccuggcgauagcagcagcggauggacagcuggugccgccgcuuacuaugugggcuaccugcagccuagaaccuuccugcugaaguacaacgagaacggcaccaucaccgacgccguggauugugcucuggauccucugagcgagacaaagugcacccugaaguccuucaccguggaaaagggcaucuaccagaccagcaacuuccgggugcagcccaccgaauccaucgugcgguuccccaauaucaccaaucugugccccuucggcgagguguucaaugccaccagauucgccucuguguacgccuggaaccggaagcggaucagcaauugcguggccgacuacuccgugcuguacaacuccgccagcuucagcaccuucaagugcuacggcguguccccuaccaagcugaacgaccugugcuucacaaacguguacgccgacagcuucgugauccggggagaugaagugcggcagauugccccuggacagacaggcaagaucgccgacuacaacuacaagcugcccgacgacuucaccggcugugugauugccuggaacagcaacaaccuggacuccaaagucggcggcaacuacaauuaccuguaccggcuguuccggaaguccaaucugaagcccuucgagcgggacaucuccaccgagaucuaucaggccggcaacaccccuuguaacggcguggaaggcuucaacugcuacuucccacugcaguccuacggcuuucagcccacaaauggcgugggcuaucagcccuacagagugguggugcugagcuucgaacugcugcaugccccugccacagugugcggcccuaagaaaagcaccaaucucgugaagaacaaaugcgugaacuucaacuucaacggccugaccggcaccggcgugcugacagagagcaacaagaaguuccugccauuccagcaguuuggccgggauaucgccgauaccacagacgccguuagagauccccagacacuggaaauccuggacaucaccccuugcagcuucggcggagugucugugaucaccccuggcaccaacaccagcaaucagguggcagugcuguaccagggcgugaacuguaccgaagugcccguggccauucacgccgaucagcugacaccuacauggcggguguacuccaccggcagcaauguguuucagaccagagccggcugucugaucggagccgagcacgugaacaauagcuacgagugcgacauccccaucggcgcuggaaucugcgccagcuaccagacacagacaaacagcccucggagagccagaagcguggccagccagagcaucauugccuacacaaugucucugggcgccgagaacagcguggccuacuccaacaacucuaucgcuauccccaccaacuucaccaucagcgugaccacagagauccugccuguguccaugaccaagaccagcguggacugcaccauguacaucugcggcgauuccaccgagugcuccaaccugcugcugcaguacggcagcuucugcacccagcugaauagagcccugacagggaucgccguggaacaggacaagaacacccaagagguguucgcccaagugaagcagaucuacaagaccccuccuaucaaggacuucggcggcuucaauuucagccagauucugcccgauccuagcaagcccagcaagcggagcuucaucgaggaccugcuguucaacaaagugacacuggccgacgccggcuucaucaagcaguauggcgauugucugggcgacauugccgccagggaucugauuugcgcccagaaguuuaacggacugacagugcugccuccucugcugaccgaugagaugaucgcccaguacacaucugcccugcuggccggcacaaucacaagcggcuggacauuuggagcaggcgccgcucugcagauccccuuugcuaugcagauggccuaccgguucaacggcaucggagugacccagaaugugcuguacgagaaccagaagcugaucgccaaccaguucaacagcgccaucggcaagauccaggacagccugagcagcacagcaagcgcccugggaaagcugcaggacguggucaaccagaaugcccaggcacugaacacccuggucaagcagcuguccuccaacuucggcgccaucagcucugugcugaacgauauccugagcagacuggacccuccugaggccgaggugcagaucgacagacugaucacaggcagacugcagagccuccagacauacgugacccagcagcugaucagagccgccgagauuagagccucugccaaucuggccgccaccaagaugucugagugugugcugggccagagcaagagaguggacuuuugcggcaagggcuaccaccugaugagcuucccucagucugccccucacggcgugguguuucugcacgugacauaugugcccgcucaagagaagaauuucaccaccgcuccagccaucugccacgacggcaaagcccacuuuccuagagaaggcguguucguguccaacggcacccauugguucgugacacagcggaacuucuacgagccccagaucaucaccaccgacaacaccuucgugucuggcaacugcgacgucgugaucggcauugugaacaauaccguguacgacccucugcagcccgagcuggacagcuucaaagaggaacuggacaaguacuuuaagaaccacacaagccccgacguggaccugggcgauaucagcggaaucaaugccagcgucgugaacauccagaaagagaucgaccggcugaacgagguggccaagaaucugaacgagagccugaucgaccugcaagaacuggggaaguacgagcaguacaucaaguggcccugguacaucuggcugggcuuuaucgccggacugauugccaucgugauggucacaaucaugcuguguugcaugaccagcugcuguagcugccugaagggcuguuguagcuguggcagcugcugcaaguucgacgaggacgauucugagcccgugcugaagggcgugaaacugcacuacacauga

SEQ ID NO: 23172 - RNA, 3822 nt, Artificial Sequence
  SARS-CoV-2/Wuhan/WIV05/2019__EPI_ISL_402128 spike protein CDS gc mod (1-1273)(K986P_V987P_N501Y_D614G)
auguucguguuccuggugcugcugccucugguguccagccagugugugaaccugaccaccagaacacagcugccuccagccuacaccaacagcuuuaccagaggcguguacuaccccgacaagguguucagauccagcgugcugcacucuacccaggaccuguuccugccuuucuucagcaacgugaccugguuccacgccauccacguguccggcaccaauggcaccaagagauucgacaaccccgugcugcccuucaacgacgggguguacuuugccagcaccgagaaguccaacaucaucagaggcuggaucuucggcaccacacuggacagcaagacccagagccugcugaucgugaacaacgccaccaacguggucaucaaagugugcgaguuccaguucugcaacgaccccuuccugggcgucuacuaccacaagaacaacaagagcuggauggaaagcgaguuccggguguacagcagcgccaacaacugcaccuucgaguacgugucccagccuuuccugauggaccuggaaggcaagcagggcaacuucaagaaccugcgcgaguucguguuuaagaacaucgacggcuacuucaagaucuacagcaagcacaccccuaucaaccucgugcgggaucugccucagggcuucucugcucuggaaccccugguggaucugcccaucggcaucaacaucacccgguuucagacacugcuggcccugcacagaagcuaccugacaccuggcgauagcagcagcggauggacagcuggugccgccgcuuacuaugugggcuaccugcagccuagaaccuuccugcugaaguacaacgagaacggcaccaucaccgacgccguggauugugcucuggauccucugagcgagacaaagugcacccugaaguccuucaccguggaaaagggcaucuaccagaccagcaacuuccgggugcagcccaccgaauccaucgugcgguuccccaauaucaccaaucugugccccuucggcgagguguucaaugccaccagauucgccucuguguacgccuggaaccggaagcggaucagcaauugcguggccgacuacuccgugcuguacaacuccgccagcuucagcaccuucaagugcuacggcguguccccuaccaagcugaacgaccugugcuucacaaacguguacgccgacagcuucgugauccggggagaugaagugcggcagauugccccuggacagacaggcaagaucgccgacuacaacuacaagcugcccgacgacuucaccggcugugugauugccuggaacagcaacaaccuggacuccaaagucggcggcaacuacaauuaccuguaccggcuguuccggaaguccaaucugaagcccuucgagcgggacaucuccaccgagaucuaucaggccggcagcaccccuuguaacggcguggaaggcuucaacugcuacuucccacugcaguccuacggcuuucagcccacauacggcgugggcuaucagcccuacagagugguggugcugagcuucgaacugcugcaugccccugccacagugugcggcccuaagaaaagcaccaaucucgugaagaacaaaugcgugaacuucaacuucaacggccugaccggcaccggcgugcugacagagagcaacaagaaguuccugccauuccagcaguuuggccgggauaucgccgauaccacagacgccguuagagauccccagacacuggaaauccuggacaucaccccuugcagcuucggcggagugucugugaucaccccuggcaccaacaccagcaaucagguggcagugcuguaccagggcgugaacuguaccgaagugcccguggccauucacgccgaucagcugacaccuacauggcggguguacuccaccggcagcaauguguuucagaccagagccggcugucugaucggagccgagcacgugaacaauagcuacgagugcgacauccccaucggcgcuggaaucugcgccagcuaccagacacagacaaacagcccucggagagccagaagcguggccagccagagcaucauugccuacacaaugucucugggcgccgagaacagcguggccuacuccaacaacucuaucgcuauccccaccaacuucaccaucagcgugaccacagagauccugccuguguccaugaccaagaccagcguggacugcaccauguacaucugcggcgauuccaccgagugcuccaaccugcugcugcaguacggcagcuucugcacccagcugaauagagcccugacagggaucgccguggaacaggacaagaacacccaagagguguucgcccaagugaagcagaucuacaagaccccuccuaucaaggacuucggcggcuucaauuucagccagauucugcccgauccuagcaagcccagcaagcggagcuucaucgaggaccugcuguucaacaaagugacacuggccgacgccggcuucaucaagcaguauggcgauugucugggcgacauugccgccagggaucugauuugcgcccagaaguuuaacggacugacagugcugccuccucugcugaccgaugagaugaucgcccaguacacaucugcccugcuggccggcacaaucacaagcggcuggacauuuggagcaggcgccgcucugcagauccccuuugcuaugcagauggccuaccgguucaacggcaucggagugacccagaaugugcuguacgagaaccagaagcugaucgccaaccaguucaacagcgccaucggcaagauccaggacagccugagcagcacagcaagcgcccugggaaagcugcaggacguggucaaccagaaugcccaggcacugaacacccuggucaagcagcuguccuccaacuucggcgccaucagcucugugcugaacgauauccugagcagacuggacccuccugaggccgaggugcagaucgacagacugaucacaggcagacugcagagccuccagacauacgugacccagcagcugaucagagccgccgagauuagagccucugccaaucuggccgccaccaagaugucugagugugugcugggccagagcaagagaguggacuuuugcggcaagggcuaccaccugaugagcuucccucagucugccccucacggcgugguguuucugcacgugacauaugugcccgcucaagagaagaauuucaccaccgcuccagccaucugccacgacggcaaagcccacuuuccuagagaaggcguguucguguccaacggcacccauugguucgugacacagcggaacuucuacgagccccagaucaucaccaccgacaacaccuucgugucuggcaacugcgacgucgugaucggcauugugaacaauaccguguacgacccucugcagcccgagcuggacagcuucaaagaggaacuggacaaguacuuuaagaaccacacaagccccgacguggaccugggcgauaucagcggaaucaaugccagcgucgugaacauccagaaagagaucgaccggcugaacgagguggccaagaaucugaacgagagccugaucgaccugcaagaacuggggaaguacgagcaguacaucaaguggcccugguacaucuggcugggcuuuaucgccggacugauugccaucgugauggucacaaucaugcuguguugcaugaccagcugcuguagcugccugaagggcuguuguagcuguggcagcugcugcaaguucgacgaggacgauucugagcccgugcugaagggcgugaaacugcacuacacauga

SEQ ID NO: 23173 - RNA, 3816 nt, Artificial Sequence
  SARS-CoV-2/Wuhan/WIV05/2019__EPI_ISL_402128 spike protein CDS gc mod (1-1273)(K986P_V987P_H69del_V70del_D614G)
auguucguguuccuggugcugcugccucugguguccagccagugugugaaccugaccaccagaacacagcugccuccagccuacaccaacagcuuuaccagaggcguguacuaccccgacaagguguucagauccagcgugcugcacucuacccaggaccuguuccugccuuucuucagcaacgugaccugguuccacgccaucuccggcaccaauggcaccaagagauucgacaaccccgugcugcccuucaacgacgggguguacuuugccagcaccgagaaguccaacaucaucagaggcuggaucuucggcaccacacuggacagcaagacccagagccugcugaucgugaacaacgccaccaacguggucaucaaagugugcgaguuccaguucugcaacgaccccuuccugggcgucuacuaccacaagaacaacaagagcuggauggaaagcgaguuccggguguacagcagcgccaacaacugcaccuucgaguacgugucccagccuuuccugauggaccuggaaggcaagcagggcaacuucaagaaccugcgcgaguucguguuuaagaacaucgacggcuacuucaagaucuacagcaagcacaccccuaucaaccucgugcgggaucugccucagggcuucucugcucuggaaccccugguggaucugcccaucggcaucaacaucacccgguuucagacacugcuggcccugcacagaagcuaccugacaccuggcgauagcagcagcggauggacagcuggugccgccgcuuacuaugugggcuaccugcagccuagaaccuuccugcugaaguacaacgagaacggcaccaucaccgacgccguggauugugcucuggauccucugagcgagacaaagugcacccugaaguccuucaccguggaaaagggcaucuaccagaccagcaacuuccgggugcagcccaccgaauccaucgugcgguuccccaauaucaccaaucugugccccuucggcgagguguucaaugccaccagauucgccucuguguacgccuggaaccggaagcggaucagcaauugcguggccgacuacuccgugcuguacaacuccgccagcuucagcaccuucaagugcuacggcguguccccuaccaagcugaacgaccugugcuucacaaacguguacgccgacagcuucgugauccggggagaugaagugcggcagauugccccuggacagacaggcaagaucgccgacuacaacuacaagcugcccgacgacuucaccggcugugugauugccuggaacagcaacaaccuggacuccaaagucggcggcaacuacaauuaccuguaccggcuguuccggaaguccaaucugaagcccuucgagcgggacaucuccaccgagaucuaucaggccggcagcaccccuuguaacggcguggaaggcuucaacugcuacuucccacugcaguccuacggcuuucagcccacaaauggcgugggcuaucagcccuacagagugguggugcugagcuucgaacugcugcaugccccugccacagugugcggcccuaagaaaagcaccaaucucgugaagaacaaaugcgugaacuucaacuucaacggccugaccggcaccggcgugcugacagagagcaacaagaaguuccugccauuccagcaguuuggccgggauaucgccgauaccacagacgccguuagagauccccagacacuggaaauccuggacaucaccccuugcagcuucggcggagugucugugaucaccccuggcaccaacaccagcaaucagguggcagugcuguaccagggcgugaacuguaccgaagugcccguggccauucacgccgaucagcugacaccuacauggcggguguacuccaccggcagcaauguguuucagaccagagccggcugucugaucggagccgagcacgugaacaauagcuacgagugcgacauccccaucggcgcuggaaucugcgccagcuaccagacacagacaaacagcccucggagagccagaagcguggccagccagagcaucauugccuacacaaugucucugggcgccgagaacagcguggccuacuccaacaacucuaucgcuauccccaccaacuucaccaucagcgugaccacagagauccugccuguguccaugaccaagaccagcguggacugcaccauguacaucugcggcgauuccaccgagugcuccaaccugcugcugcaguacggcagcuucugcacccagcugaauagagcccugacagggaucgccguggaacaggacaagaacacccaagagguguucgcccaagugaagcagaucuacaagaccccuccuaucaaggacuucggcggcuucaauuucagccagauucugcccgauccuagcaagcccagcaagcggagcuucaucgaggaccugcuguucaacaaagugacacuggccgacgccggcuucaucaagcaguauggcgauugucugggcgacauugccgccagggaucugauuugcgcccagaaguuuaacggacugacagugcugccuccucugcugaccgaugagaugaucgcccaguacacaucugcccugcuggccggcacaaucacaagcggcuggacauuuggagcaggcgccgcucugcagauccccuuugcuaugcagauggccuaccgguucaacggcaucggagugacccagaaugugcuguacgagaaccagaagcugaucgccaaccaguucaacagcgccaucggcaagauccaggacagccugagcagcacagcaagcgcccugggaaagcugcaggacguggucaaccagaaugcccaggcacugaacacccuggucaagcagcuguccuccaacuucggcgccaucagcucugugcugaacgauauccugagcagacuggacccuccugaggccgaggugcagaucgacagacugaucacaggcagacugcagagccuccagacauacgugacccagcagcugaucagagccgccgagauuagagccucugccaaucuggccgccaccaagaugucugagugugugcugggccagagcaagagaguggacuuuugcggcaagggcuaccaccugaugagcuucccucagucugccccucacggcgugguguuucugcacgugacauaugugcccgcucaagagaagaauuucaccaccgcuccagccaucugccacgacggcaaagcccacuuuccuagagaaggcguguucguguccaacggcacccauugguucgugacacagcggaacuucuacgagccccagaucaucaccaccgacaacaccuucgugucuggcaacugcgacgucgugaucggcauugugaacaauaccguguacgacccucugcagcccgagcuggacagcuucaaagaggaacuggacaaguacuuuaagaaccacacaagccccgacguggaccugggcgauaucagcggaaucaaugccagcgucgugaacauccagaaagagaucgaccggcugaacgagguggccaagaaucugaacgagagccugaucgaccugcaagaacuggggaaguacgagcaguacaucaaguggcccugguacaucuggcugggcuuuaucgccggacugauugccaucgugauggucacaaucaugcuguguugcaugaccagcugcuguagcugccugaagggcuguuguagcuguggcagcugcugcaaguucgacgaggacgauucugagcccgugcugaagggcgugaaacugcacuacacauga

SEQ ID NO: 23174 - RNA, 3822 nt, Artificial Sequence
  SARS-CoV-2/Wuhan/WIV05/2019__EPI_ISL_402128 spike protein CDS gc mod (1-1273)(K986P_V987P_Y453F_D614G)
auguucguguuccuggugcugcugccucugguguccagccagugugugaaccugaccaccagaacacagcugccuccagccuacaccaacagcuuuaccagaggcguguacuaccccgacaagguguucagauccagcgugcugcacucuacccaggaccuguuccugccuuucuucagcaacgugaccugguuccacgccauccacguguccggcaccaauggcaccaagagauucgacaaccccgugcugcccuucaacgacgggguguacuuugccagcaccgagaaguccaacaucaucagaggcuggaucuucggcaccacacuggacagcaagacccagagccugcugaucgugaacaacgccaccaacguggucaucaaagugugcgaguuccaguucugcaacgaccccuuccugggcgucuacuaccacaagaacaacaagagcuggauggaaagcgaguuccggguguacagcagcgccaacaacugcaccuucgaguacgugucccagccuuuccugauggaccuggaaggcaagcagggcaacuucaagaaccugcgcgaguucguguuuaagaacaucgacggcuacuucaagaucuacagcaagcacaccccuaucaaccucgugcgggaucugccucagggcuucucugcucuggaaccccugguggaucugcccaucggcaucaacaucacccgguuucagacacugcuggcccugcacagaagcuaccugacaccuggcgauagcagcagcggauggacagcuggugccgccgcuuacuaugugggcuaccugcagccuagaaccuuccugcugaaguacaacgagaacggcaccaucaccgacgccguggauugugcucuggauccucugagcgagacaaagugcacccugaaguccuucaccguggaaaagggcaucuaccagaccagcaacuuccgggugcagcccaccgaauccaucgugcgguuccccaauaucaccaaucugugccccuucggcgagguguucaaugccaccagauucgccucuguguacgccuggaaccggaagcggaucagcaauugcguggccgacuacuccgugcuguacaacuccgccagcuucagcaccuucaagugcuacggcguguccccuaccaagcugaacgaccugugcuucacaaacguguacgccgacagcuucgugauccggggagaugaagugcggcagauugccccuggacagacaggcaagaucgccgacuacaacuacaagcugcccgacgacuucaccggcugugugauugccuggaacagcaacaaccuggacuccaaagucggcggcaacuacaauuaccuguuccggcuguuccggaaguccaaucugaagcccuucgagcgggacaucuccaccgagaucuaucaggccggcagcaccccuuguaacggcguggaaggcuucaacugcuacuucccacugcaguccuacggcuuucagcccacaaauggcgugggcuaucagcccuacagagugguggugcugagcuucgaacugcugcaugccccugccacagugugcggcccuaagaaaagcaccaaucucgugaagaacaaaugcgugaacuucaacuucaacggccugaccggcaccggcgugcugacagagagcaacaagaaguuccugccauuccagcaguuuggccgggauaucgccgauaccacagacgccguuagagauccccagacacuggaaauccuggacaucaccccuugcagcuucggcggagugucugugaucaccccuggcaccaacaccagcaaucagguggcagugcuguaccagggcgugaacuguaccgaagugcccguggccauucacgccgaucagcugacaccuacauggcggguguacuccaccggcagcaauguguuucagaccagagccggcugucugaucggagccgagcacgugaacaauagcuacgagugcgacauccccaucggcgcuggaaucugcgccagcuaccagacacagacaaacagcccucggagagccagaagcguggccagccagagcaucauugccuacacaaugucucugggcgccgagaacagcguggccuacuccaacaacucuaucgcuauccccaccaacuucaccaucagcgugaccacagagauccugccuguguccaugaccaagaccagcguggacugcaccauguacaucugcggcgauuccaccgagugcuccaaccugcugcugcaguacggcagcuucugcacccagcugaauagagcccugacagggaucgccguggaacaggacaagaacacccaagagguguucgcccaagugaagcagaucuacaagaccccuccuaucaaggacuucggcggcuucaauuucagccagauucugcccgauccuagcaagcccagcaagcggagcuucaucgaggaccugcuguucaacaaagugacacuggccgacgccggcuucaucaagcaguauggcgauugucugggcgacauugccgccagggaucugauuugcgcccagaaguuuaacggacugacagugcugccuccucugcugaccgaugagaugaucgcccaguacacaucugcccugcuggccggcacaaucacaagcggcuggacauuuggagcaggcgccgcucugcagauccccuuugcuaugcagauggccuaccgguucaacggcaucggagugacccagaaugugcuguacgagaaccagaagcugaucgccaaccaguucaacagcgccaucggcaagauccaggacagccugagcagcacagcaagcgcccugggaaagcugcaggacguggucaaccagaaugcccaggcacugaacacccuggucaagcagcuguccuccaacuucggcgccaucagcucugugcugaacgauauccugagcagacuggacccuccugaggccgaggugcagaucgacagacugaucacaggcagacugcagagccuccagacauacgugacccagcagcugaucagagccgccgagauuagagccucugccaaucuggccgccaccaagaugucugagugugugcugggccagagcaagagaguggacuuuugcggcaagggcuaccaccugaugagcuucccucagucugccccucacggcgugguguuucugcacgugacauaugugcccgcucaagagaagaauuucaccaccgcuccagccaucugccacgacggcaaagcccacuuuccuagagaaggcguguucguguccaacggcacccauugguucgugacacagcggaacuucuacgagccccagaucaucaccaccgacaacaccuucgugucuggcaacugcgacgucgugaucggcauugugaacaauaccguguacgacccucugcagcccgagcuggacagcuucaaagaggaacuggacaaguacuuuaagaaccacacaagccccgacguggaccugggcgauaucagcggaaucaaugccagcgucgugaacauccagaaagagaucgaccggcugaacgagguggccaagaaucugaacgagagccugaucgaccugcaagaacuggggaaguacgagcaguacaucaaguggcccugguacaucuggcugggcuuuaucgccggacugauugccaucgugauggucacaaucaugcuguguugcaugaccagcugcuguagcugccugaagggcuguuguagcuguggcagcugcugcaaguucgacgaggacgauucugagcccgugcugaagggcgugaaacugcacuacacauga

SEQ ID NO: 23175 - RNA, 3822 nt, Artificial Sequence
  SARS-CoV-2/Wuhan/WIV05/2019__EPI_ISL_402128 spike protein CDS gc mod (1-1273)(K986P_V987P_D614G_I692V)
auguucguguuccuggugcugcugccucugguguccagccagugugugaaccugaccaccagaacacagcugccuccagccuacaccaacagcuuuaccagaggcguguacuaccccgacaagguguucagauccagcgugcugcacucuacccaggaccuguuccugccuuucuucagcaacgugaccugguuccacgccauccacguguccggcaccaauggcaccaagagauucgacaaccccgugcugcccuucaacgacgggguguacuuugccagcaccgagaaguccaacaucaucagaggcuggaucuucggcaccacacuggacagcaagacccagagccugcugaucgugaacaacgccaccaacguggucaucaaagugugcgaguuccaguucugcaacgaccccuuccugggcgucuacuaccacaagaacaacaagagcuggauggaaagcgaguuccggguguacagcagcgccaacaacugcaccuucgaguacgugucccagccuuuccugauggaccuggaaggcaagcagggcaacuucaagaaccugcgcgaguucguguuuaagaacaucgacggcuacuucaagaucuacagcaagcacaccccuaucaaccucgugcgggaucugccucagggcuucucugcucuggaaccccugguggaucugcccaucggcaucaacaucacccgguuucagacacugcuggcccugcacagaagcuaccugacaccuggcgauagcagcagcggauggacagcuggugccgccgcuuacuaugugggcuaccugcagccuagaaccuuccugcugaaguacaacgagaacggcaccaucaccgacgccguggauugugcucuggauccucugagcgagacaaagugcacccugaaguccuucaccguggaaaagggcaucuaccagaccagcaacuuccgggugcagcccaccgaauccaucgugcgguuccccaauaucaccaaucugugccccuucggcgagguguucaaugccaccagauucgccucuguguacgccuggaaccggaagcggaucagcaauugcguggccgacuacuccgugcuguacaacuccgccagcuucagcaccuucaagugcuacggcguguccccuaccaagcugaacgaccugugcuucacaaacguguacgccgacagcuucgugauccggggagaugaagugcggcagauugccccuggacagacaggcaagaucgccgacuacaacuacaagcugcccgacgacuucaccggcugugugauugccuggaacagcaacaaccuggacuccaaagucggcggcaacuacaauuaccuguaccggcuguuccggaaguccaaucugaagcccuucgagcgggacaucuccaccgagaucuaucaggccggcagcaccccuuguaacggcguggaaggcuucaacugcuacuucccacugcaguccuacggcuuucagcccacaaauggcgugggcuaucagcccuacagagugguggugcugagcuucgaacugcugcaugccccugccacagugugcggcccuaagaaaagcaccaaucucgugaagaacaaaugcgugaacuucaacuucaacggccugaccggcaccggcgugcugacagagagcaacaagaaguuccugccauuccagcaguuuggccgggauaucgccgauaccacagacgccguuagagauccccagacacuggaaauccuggacaucaccccuugcagcuucggcggagugucugugaucaccccuggcaccaacaccagcaaucagguggcagugcuguaccagggcgugaacuguaccgaagugcccguggccauucacgccgaucagcugacaccuacauggcggguguacuccaccggcagcaauguguuucagaccagagccggcugucugaucggagccgagcacgugaacaauagcuacgagugcgacauccccaucggcgcuggaaucugcgccagcuaccagacacagacaaacagcccucggagagccagaagcguggccagccagagcgugauugccuacacaaugucucugggcgccgagaacagcguggccuacuccaacaacucuaucgcuauccccaccaacuucaccaucagcgugaccacagagauccugccuguguccaugaccaagaccagcguggacugcaccauguacaucugcggcgauuccaccgagugcuccaaccugcugcugcaguacggcagcuucugcacccagcugaauagagcccugacagggaucgccguggaacaggacaagaacacccaagagguguucgcccaagugaagcagaucuacaagaccccuccuaucaaggacuucggcggcuucaauuucagccagauucugcccgauccuagcaagcccagcaagcggagcuucaucgaggaccugcuguucaacaaagugacacuggccgacgccggcuucaucaagcaguauggcgauugucugggcgacauugccgccagggaucugauuugcgcccagaaguuuaacggacugacagugcugccuccucugcugaccgaugagaugaucgcccaguacacaucugcccugcuggccggcacaaucacaagcggcuggacauuuggagcaggcgccgcucugcagauccccuuugcuaugcagauggccuaccgguucaacggcaucggagugacccagaaugugcuguacgagaaccagaagcugaucgccaaccaguucaacagcgccaucggcaagauccaggacagccugagcagcacagcaagcgcccugggaaagcugcaggacguggucaaccagaaugcccaggcacugaacacccuggucaagcagcuguccuccaacuucggcgccaucagcucugugcugaacgauauccugagcagacuggacccuccugaggccgaggugcagaucgacagacugaucacaggcagacugcagagccuccagacauacgugacccagcagcugaucagagccgccgagauuagagccucugccaaucuggccgccaccaagaugucugagugugugcugggccagagcaagagaguggacuuuugcggcaagggcuaccaccugaugagcuucccucagucugccccucacggcgugguguuucugcacgugacauaugugcccgcucaagagaagaauuucaccaccgcuccagccaucugccacgacggcaaagcccacuuuccuagagaaggcguguucguguccaacggcacccauugguucgugacacagcggaacuucuacgagccccagaucaucaccaccgacaacaccuucgugucuggcaacugcgacgucgugaucggcauugugaacaauaccguguacgacccucugcagcccgagcuggacagcuucaaagaggaacuggacaaguacuuuaagaaccacacaagccccgacguggaccugggcgauaucagcggaaucaaugccagcgucgugaacauccagaaagagaucgaccggcugaacgagguggccaagaaucugaacgagagccugaucgaccugcaagaacuggggaaguacgagcaguacaucaaguggcccugguacaucuggcugggcuuuaucgccggacugauugccaucgugauggucacaaucaugcuguguugcaugaccagcugcuguagcugccugaagggcuguuguagcuguggcagcugcugcaaguucgacgaggacgauucugagcccgugcugaagggcgugaaacugcacuacacauga

SEQ ID NO: 23176 - RNA, 3822 nt, Artificial Sequence
  SARS-CoV-2/Wuhan/WIV05/2019__EPI_ISL_402128 spike protein CDS gc mod (1-1273)(K986P_V987P_D614G_M1229I)
auguucguguuccuggugcugcugccucugguguccagccagugugugaaccugaccaccagaacacagcugccuccagccuacaccaacagcuuuaccagaggcguguacuaccccgacaagguguucagauccagcgugcugcacucuacccaggaccuguuccugccuuucuucagcaacgugaccugguuccacgccauccacguguccggcaccaauggcaccaagagauucgacaaccccgugcugcccuucaacgacgggguguacuuugccagcaccgagaaguccaacaucaucagaggcuggaucuucggcaccacacuggacagcaagacccagagccugcugaucgugaacaacgccaccaacguggucaucaaagugugcgaguuccaguucugcaacgaccccuuccugggcgucuacuaccacaagaacaacaagagcuggauggaaagcgaguuccggguguacagcagcgccaacaacugcaccuucgaguacgugucccagccuuuccugauggaccuggaaggcaagcagggcaacuucaagaaccugcgcgaguucguguuuaagaacaucgacggcuacuucaagaucuacagcaagcacaccccuaucaaccucgugcgggaucugccucagggcuucucugcucuggaaccccugguggaucugcccaucggcaucaacaucacccgguuucagacacugcuggcccugcacagaagcuaccugacaccuggcgauagcagcagcggauggacagcuggugccgccgcuuacuaugugggcuaccugcagccuagaaccuuccugcugaaguacaacgagaacggcaccaucaccgacgccguggauugugcucuggauccucugagcgagacaaagugcacccugaaguccuucaccguggaaaagggcaucuaccagaccagcaacuuccgggugcagcccaccgaauccaucgugcgguuccccaauaucaccaaucugugccccuucggcgagguguucaaugccaccagauucgccucuguguacgccuggaaccggaagcggaucagcaauugcguggccgacuacuccgugcuguacaacuccgccagcuucagcaccuucaagugcuacggcguguccccuaccaagcugaacgaccugugcuucacaaacguguacgccgacagcuucgugauccggggagaugaagugcggcagauugccccuggacagacaggcaagaucgccgacuacaacuacaagcugcccgacgacuucaccggcugugugauugccuggaacagcaacaaccuggacuccaaagucggcggcaacuacaauuaccuguaccggcuguuccggaaguccaaucugaagcccuucgagcgggacaucuccaccgagaucuaucaggccggcagcaccccuuguaacggcguggaaggcuucaacugcuacuucccacugcaguccuacggcuuucagcccacaaauggcgugggcuaucagcccuacagagugguggugcugagcuucgaacugcugcaugccccugccacagugugcggcccuaagaaaagcaccaaucucgugaagaacaaaugcgugaacuucaacuucaacggccugaccggcaccggcgugcugacagagagcaacaagaaguuccugccauuccagcaguuuggccgggauaucgccgauaccacagacgccguuagagauccccagacacuggaaauccuggacaucaccccuugcagcuucggcggagugucugugaucaccccuggcaccaacaccagcaaucagguggcagugcuguaccagggcgugaacuguaccgaagugcccguggccauucacgccgaucagcugacaccuacauggcggguguacuccaccggcagcaauguguuucagaccagagccggcugucugaucggagccgagcacgugaacaauagcuacgagugcgacauccccaucggcgcuggaaucugcgccagcuaccagacacagacaaacagcccucggagagccagaagcguggccagccagagcaucauugccuacacaaugucucugggcgccgagaacagcguggccuacuccaacaacucuaucgcuauccccaccaacuucaccaucagcgugaccacagagauccugccuguguccaugaccaagaccagcguggacugcaccauguacaucugcggcgauuccaccgagugcuccaaccugcugcugcaguacggcagcuucugcacccagcugaauagagcccugacagggaucgccguggaacaggacaagaacacccaagagguguucgcccaagugaagcagaucuacaagaccccuccuaucaaggacuucggcggcuucaauuucagccagauucugcccgauccuagcaagcccagcaagcggagcuucaucgaggaccugcuguucaacaaagugacacuggccgacgccggcuucaucaagcaguauggcgauugucugggcgacauugccgccagggaucugauuugcgcccagaaguuuaacggacugacagugcugccuccucugcugaccgaugagaugaucgcccaguacacaucugcccugcuggccggcacaaucacaagcggcuggacauuuggagcaggcgccgcucugcagauccccuuugcuaugcagauggccuaccgguucaacggcaucggagugacccagaaugugcuguacgagaaccagaagcugaucgccaaccaguucaacagcgccaucggcaagauccaggacagccugagcagcacagcaagcgcccugggaaagcugcaggacguggucaaccagaaugcccaggcacugaacacccuggucaagcagcuguccuccaacuucggcgccaucagcucugugcugaacgauauccugagcagacuggacccuccugaggccgaggugcagaucgacagacugaucacaggcagacugcagagccuccagacauacgugacccagcagcugaucagagccgccgagauuagagccucugccaaucuggccgccaccaagaugucugagugugugcugggccagagcaagagaguggacuuuugcggcaagggcuaccaccugaugagcuucccucagucugccccucacggcgugguguuucugcacgugacauaugugcccgcucaagagaagaauuucaccaccgcuccagccaucugccacgacggcaaagcccacuuuccuagagaaggcguguucguguccaacggcacccauugguucgugacacagcggaacuucuacgagccccagaucaucaccaccgacaacaccuucgugucuggcaacugcgacgucgugaucggcauugugaacaauaccguguacgacccucugcagcccgagcuggacagcuucaaagaggaacuggacaaguacuuuaagaaccacacaagccccgacguggaccugggcgauaucagcggaaucaaugccagcgucgugaacauccagaaagagaucgaccggcugaacgagguggccaagaaucugaacgagagccugaucgaccugcaagaacuggggaaguacgagcaguacaucaaguggcccugguacaucuggcugggcuuuaucgccggacugauugccaucgugaucgucacaaucaugcuguguugcaugaccagcugcuguagcugccugaagggcuguuguagcuguggcagcugcugcaaguucgacgaggacgauucugagcccgugcugaagggcgugaaacugcacuacacauga

SEQ ID NO: 23177 - RNA, 3816 nt, Artificial Sequence
  SARS-CoV-2/Wuhan/WIV05/2019__EPI_ISL_402128 spike protein CDS gc mod (1-1273)(K986P_V987P_H69del_V70del_A222V_Y453F_S477N_D614G_I692V)
auguucguguuccuggugcugcugccucugguguccagccagugugugaaccugaccaccagaacacagcugccuccagccuacaccaacagcuuuaccagaggcguguacuaccccgacaagguguucagauccagcgugcugcacucuacccaggaccuguuccugccuuucuucagcaacgugaccugguuccacgccaucuccggcaccaauggcaccaagagauucgacaaccccgugcugcccuucaacgacgggguguacuuugccagcaccgagaaguccaacaucaucagaggcuggaucuucggcaccacacuggacagcaagacccagagccugcugaucgugaacaacgccaccaacguggucaucaaagugugcgaguuccaguucugcaacgaccccuuccugggcgucuacuaccacaagaacaacaagagcuggauggaaagcgaguuccggguguacagcagcgccaacaacugcaccuucgaguacgugucccagccuuuccugauggaccuggaaggcaagcagggcaacuucaagaaccugcgcgaguucguguuuaagaacaucgacggcuacuucaagaucuacagcaagcacaccccuaucaaccucgugcgggaucugccucagggcuucucugugcuggaaccccugguggaucugcccaucggcaucaacaucacccgguuucagacacugcuggcccugcacagaagcuaccugacaccuggcgauagcagcagcggauggacagcuggugccgccgcuuacuaugugggcuaccugcagccuagaaccuuccugcugaaguacaacgagaacggcaccaucaccgacgccguggauugugcucuggauccucugagcgagacaaagugcacccugaaguccuucaccguggaaaagggcaucuaccagaccagcaacuuccgggugcagcccaccgaauccaucgugcgguuccccaauaucaccaaucugugccccuucggcgagguguucaaugccaccagauucgccucuguguacgccuggaaccggaagcggaucagcaauugcguggccgacuacuccgugcuguacaacuccgccagcuucagcaccuucaagugcuacggcguguccccuaccaagcugaacgaccugugcuucacaaacguguacgccgacagcuucgugauccggggagaugaagugcggcagauugccccuggacagacaggcaagaucgccgacuacaacuacaagcugcccgacgacuucaccggcugugugauugccuggaacagcaacaaccuggacuccaaagucggcggcaacuacaauuaccuguuccggcuguuccggaaguccaaucugaagcccuucgagcgggacaucuccaccgagaucuaucaggccggcaacaccccuuguaacggcguggaaggcuucaacugcuacuucccacugcaguccuacggcuuucagcccacaaauggcgugggcuaucagcccuacagagugguggugcugagcuucgaacugcugcaugccccugccacagugugcggcccuaagaaaagcaccaaucucgugaagaacaaaugcgugaacuucaacuucaacggccugaccggcaccggcgugcugacagagagcaacaagaaguuccugccauuccagcaguuuggccgggauaucgccgauaccacagacgccguuagagauccccagacacuggaaauccuggacaucaccccuugcagcuucggcggagugucugugaucaccccuggcaccaacaccagcaaucagguggcagugcuguaccagggcgugaacuguaccgaagugcccguggccauucacgccgaucagcugacaccuacauggcggguguacuccaccggcagcaauguguuucagaccagagccggcugucugaucggagccgagcacgugaacaauagcuacgagugcgacauccccaucggcgcuggaaucugcgccagcuaccagacacagacaaacagcccucggagagccagaagcguggccagccagagcgugauugccuacacaaugucucugggcgccgagaacagcguggccuacuccaacaacucuaucgcuauccccaccaacuucaccaucagcgugaccacagagauccugccuguguccaugaccaagaccagcguggacugcaccauguacaucugcggcgauuccaccgagugcuccaaccugcugcugcaguacggcagcuucugcacccagcugaauagagcccugacagggaucgccguggaacaggacaagaacacccaagagguguucgcccaagugaagcagaucuacaagaccccuccuaucaaggacuucggcggcuucaauuucagccagauucugcccgauccuagcaagcccagcaagcggagcuucaucgaggaccugcuguucaacaaagugacacuggccgacgccggcuucaucaagcaguauggcgauugucugggcgacauugccgccagggaucugauuugcgcccagaaguuuaacggacugacagugcugccuccucugcugaccgaugagaugaucgcccaguacacaucugcccugcuggccggcacaaucacaagcggcuggacauuuggagcaggcgccgcucugcagauccccuuugcuaugcagauggccuaccgguucaacggcaucggagugacccagaaugugcuguacgagaaccagaagcugaucgccaaccaguucaacagcgccaucggcaagauccaggacagccugagcagcacagcaagcgcccugggaaagcugcaggacguggucaaccagaaugcccaggcacugaacacccuggucaagcagcuguccuccaacuucggcgccaucagcucugugcugaacgauauccugagcagacuggacccuccugaggccgaggugcagaucgacagacugaucacaggcagacugcagagccuccagacauacgugacccagcagcugaucagagccgccgagauuagagccucugccaaucuggccgccaccaagaugucugagugugugcugggccagagcaagagaguggacuuuugcggcaagggcuaccaccugaugagcuucccucagucugccccucacggcgugguguuucugcacgugacauaugugcccgcucaagagaagaauuucaccaccgcuccagccaucugccacgacggcaaagcccacuuuccuagagaaggcguguucguguccaacggcacccauugguucgugacacagcggaacuucuacgagccccagaucaucaccaccgacaacaccuucgugucuggcaacugcgacgucgugaucggcauugugaacaauaccguguacgacccucugcagcccgagcuggacagcuucaaagaggaacuggacaaguacuuuaagaaccacacaagccccgacguggaccugggcgauaucagcggaaucaaugccagcgucgugaacauccagaaagagaucgaccggcugaacgagguggccaagaaucugaacgagagccugaucgaccugcaagaacuggggaaguacgagcaguacaucaaguggcccugguacaucuggcugggcuuuaucgccggacugauugccaucgugauggucacaaucaugcuguguugcaugaccagcugcuguagcugccugaagggcuguuguagcuguggcagcugcugcaaguucgacgaggacgauucugagcccgugcugaagggcgugaaacugcacuacacauga

SEQ ID NO: 23178 - RNA, 3816 nt, Artificial Sequence
  SARS-CoV-2/Wuhan/WIV05/2019__EPI_ISL_402128 spike protein CDS gc mod (1-1273)(K986P_V987P_H69del_V70del_Y453F_D614G_I692V_M1229I)
auguucguguuccuggugcugcugccucugguguccagccagugugugaaccugaccaccagaacacagcugccuccagccuacaccaacagcuuuaccagaggcguguacuaccccgacaagguguucagauccagcgugcugcacucuacccaggaccuguuccugccuuucuucagcaacgugaccugguuccacgccaucuccggcaccaauggcaccaagagauucgacaaccccgugcugcccuucaacgacgggguguacuuugccagcaccgagaaguccaacaucaucagaggcuggaucuucggcaccacacuggacagcaagacccagagccugcugaucgugaacaacgccaccaacguggucaucaaagugugcgaguuccaguucugcaacgaccccuuccugggcgucuacuaccacaagaacaacaagagcuggauggaaagcgaguuccggguguacagcagcgccaacaacugcaccuucgaguacgugucccagccuuuccugauggaccuggaaggcaagcagggcaacuucaagaaccugcgcgaguucguguuuaagaacaucgacggcuacuucaagaucuacagcaagcacaccccuaucaaccucgugcgggaucugccucagggcuucucugcucuggaaccccugguggaucugcccaucggcaucaacaucacccgguuucagacacugcuggcccugcacagaagcuaccugacaccuggcgauagcagcagcggauggacagcuggugccgccgcuuacuaugugggcuaccugcagccuagaaccuuccugcugaaguacaacgagaacggcaccaucaccgacgccguggauugugcucuggauccucugagcgagacaaagugcacccugaaguccuucaccguggaaaagggcaucuaccagaccagcaacuuccgggugcagcccaccgaauccaucgugcgguuccccaauaucaccaaucugugccccuucggcgagguguucaaugccaccagauucgccucuguguacgccuggaaccggaagcggaucagcaauugcguggccgacuacuccgugcuguacaacuccgccagcuucagcaccuucaagugcuacggcguguccccuaccaagcugaacgaccugugcuucacaaacguguacgccgacagcuucgugauccggggagaugaagugcggcagauugccccuggacagacaggcaagaucgccgacuacaacuacaagcugcccgacgacuucaccggcugugugauugccuggaacagcaacaaccuggacuccaaagucggcggcaacuacaauuaccuguuccggcuguuccggaaguccaaucugaagcccuucgagcgggacaucuccaccgagaucuaucaggccggcagcaccccuuguaacggcguggaaggcuucaacugcuacuucccacugcaguccuacggcuuucagcccacaaauggcgugggcuaucagcccuacagagugguggugcugagcuucgaacugcugcaugccccugccacagugugcggcccuaagaaaagcaccaaucucgugaagaacaaaugcgugaacuucaacuucaacggccugaccggcaccggcgugcugacagagagcaacaagaaguuccugccauuccagcaguuuggccgggauaucgccgauaccacagacgccguuagagauccccagacacuggaaauccuggacaucaccccuugcagcuucggcggagugucugugaucaccccuggcaccaacaccagcaaucagguggcagugcuguaccagggcgugaacuguaccgaagugcccguggccauucacgccgaucagcugacaccuacauggcggguguacuccaccggcagcaauguguuucagaccagagccggcugucugaucggagccgagcacgugaacaauagcuacgagugcgacauccccaucggcgcuggaaucugcgccagcuaccagacacagacaaacagcccucggagagccagaagcguggccagccagagcgugauugccuacacaaugucucugggcgccgagaacagcguggccuacuccaacaacucuaucgcuauccccaccaacuucaccaucagcgugaccacagagauccugccuguguccaugaccaagaccagcguggacugcaccauguacaucugcggcgauuccaccgagugcuccaaccugcugcugcaguacggcagcuucugcacccagcugaauagagcccugacagggaucgccguggaacaggacaagaacacccaagagguguucgcccaagugaagcagaucuacaagaccccuccuaucaaggacuucggcggcuucaauuucagccagauucugcccgauccuagcaagcccagcaagcggagcuucaucgaggaccugcuguucaacaaagugacacuggccgacgccggcuucaucaagcaguauggcgauugucugggcgacauugccgccagggaucugauuugcgcccagaaguuuaacggacugacagugcugccuccucugcugaccgaugagaugaucgcccaguacacaucugcccugcuggccggcacaaucacaagcggcuggacauuuggagcaggcgccgcucugcagauccccuuugcuaugcagauggccuaccgguucaacggcaucggagugacccagaaugugcuguacgagaaccagaagcugaucgccaaccaguucaacagcgccaucggcaagauccaggacagccugagcagcacagcaagcgcccugggaaagcugcaggacguggucaaccagaaugcccaggcacugaacacccuggucaagcagcuguccuccaacuucggcgccaucagcucugugcugaacgauauccugagcagacuggacccuccugaggccgaggugcagaucgacagacugaucacaggcagacugcagagccuccagacauacgugacccagcagcugaucagagccgccgagauuagagccucugccaaucuggccgccaccaagaugucugagugugugcugggccagagcaagagaguggacuuuugcggcaagggcuaccaccugaugagcuucccucagucugccccucacggcgugguguuucugcacgugacauaugugcccgcucaagagaagaauuucaccaccgcuccagccaucugccacgacggcaaagcccacuuuccuagagaaggcguguucguguccaacggcacccauugguucgugacacagcggaacuucuacgagccccagaucaucaccaccgacaacaccuucgugucuggcaacugcgacgucgugaucggcauugugaacaauaccguguacgacccucugcagcccgagcuggacagcuucaaagaggaacuggacaaguacuuuaagaaccacacaagccccgacguggaccugggcgauaucagcggaaucaaugccagcgucgugaacauccagaaagagaucgaccggcugaacgagguggccaagaaucugaacgagagccugaucgaccugcaagaacuggggaaguacgagcaguacaucaaguggcccugguacaucuggcugggcuuuaucgccggacugauugccaucgugaucgucacaaucaugcuguguugcaugaccagcugcuguagcugccugaagggcuguuguagcuguggcagcugcugcaaguucgacgaggacgauucugagcccgugcugaagggcgugaaacugcacuacacauga

SEQ ID NO: 23179 - RNA, 3813 nt, Artificial Sequence
  SARS-CoV-2/Wuhan/WIV05/2019__EPI_ISL_402128 spike protein CDS gc mod (1-1273)(K986P_V987P_K986P_V987P_H69del_V70del_Y144del_N501Y_A570 D_D614G_P681H_T716I_S982A_D1118H)
auguucguguuccuggugcugcugccucugguguccagccagugugugaaccugaccaccagaacacagcugccuccagccuacaccaacagcuuuaccagaggcguguacuaccccgacaagguguucagauccagcgugcugcacucuacccaggaccuguuccugccuuucuucagcaacgugaccugguuccacgccaucuccggcaccaauggcaccaagagauucgacaaccccgugcugcccuucaacgacgggguguacuuugccagcaccgagaaguccaacaucaucagaggcuggaucuucggcaccacacuggacagcaagacccagagccugcugaucgugaacaacgccaccaacguggucaucaaagugugcgaguuccaguucugcaacgaccccuuccugggcgucuaccacaagaacaacaagagcuggauggaaagcgaguuccggguguacagcagcgccaacaacugcaccuucgaguacgugucccagccuuuccugauggaccuggaaggcaagcagggcaacuucaagaaccugcgcgaguucguguuuaagaacaucgacggcuacuucaagaucuacagcaagcacaccccuaucaaccucgugcgggaucugccucagggcuucucugcucuggaaccccugguggaucugcccaucggcaucaacaucacccgguuucagacacugcuggcccugcacagaagcuaccugacaccuggcgauagcagcagcggauggacagcuggugccgccgcuuacuaugugggcuaccugcagccuagaaccuuccugcugaaguacaacgagaacggcaccaucaccgacgccguggauugugcucuggauccucugagcgagacaaagugcacccugaaguccuucaccguggaaaagggcaucuaccagaccagcaacuuccgggugcagcccaccgaauccaucgugcgguuccccaauaucaccaaucugugccccuucggcgagguguucaaugccaccagauucgccucuguguacgccuggaaccggaagcggaucagcaauugcguggccgacuacuccgugcuguacaacuccgccagcuucagcaccuucaagugcuacggcguguccccuaccaagcugaacgaccugugcuucacaaacguguacgccgacagcuucgugauccggggagaugaagugcggcagauugccccuggacagacaggcaagaucgccgacuacaacuacaagcugcccgacgacuucaccggcugugugauugccuggaacagcaacaaccuggacuccaaagucggcggcaacuacaauuaccuguaccggcuguuccggaaguccaaucugaagcccuucgagcgggacaucuccaccgagaucuaucaggccggcagcaccccuuguaacggcguggaaggcuucaacugcuacuucccacugcaguccuacggcuuucagcccacauacggcgugggcuaucagcccuacagagugguggugcugagcuucgaacugcugcaugccccugccacagugugcggcccuaagaaaagcaccaaucucgugaagaacaaaugcgugaacuucaacuucaacggccugaccggcaccggcgugcugacagagagcaacaagaaguuccugccauuccagcaguuuggccgggauaucgacgauaccacagacgccguuagagauccccagacacuggaaauccuggacaucaccccuugcagcuucggcggagugucugugaucaccccuggcaccaacaccagcaaucagguggcagugcuguaccagggcgugaacuguaccgaagugcccguggccauucacgccgaucagcugacaccuacauggcggguguacuccaccggcagcaauguguuucagaccagagccggcugucugaucggagccgagcacgugaacaauagcuacgagugcgacauccccaucggcgcuggaaucugcgccagcuaccagacacagacaaacagccaccggagagccagaagcguggccagccagagcaucauugccuacacaaugucucugggcgccgagaacagcguggccuacuccaacaacucuaucgcuauccccaucaacuucaccaucagcgugaccacagagauccugccuguguccaugaccaagaccagcguggacugcaccauguacaucugcggcgauuccaccgagugcuccaaccugcugcugcaguacggcagcuucugcacccagcugaauagagcccugacagggaucgccguggaacaggacaagaacacccaagagguguucgcccaagugaagcagaucuacaagaccccuccuaucaaggacuucggcggcuucaauuucagccagauucugcccgauccuagcaagcccagcaagcggagcuucaucgaggaccugcuguucaacaaagugacacuggccgacgccggcuucaucaagcaguauggcgauugucugggcgacauugccgccagggaucugauuugcgcccagaaguuuaacggacugacagugcugccuccucugcugaccgaugagaugaucgcccaguacacaucugcccugcuggccggcacaaucacaagcggcuggacauuuggagcaggcgccgcucugcagauccccuuugcuaugcagauggccuaccgguucaacggcaucggagugacccagaaugugcuguacgagaaccagaagcugaucgccaaccaguucaacagcgccaucggcaagauccaggacagccugagcagcacagcaagcgcccugggaaagcugcaggacguggucaaccagaaugcccaggcacugaacacccuggucaagcagcuguccuccaacuucggcgccaucagcucugugcugaacgauauccuggccagacuggacccuccugaggccgaggugcagaucgacagacugaucacaggcagacugcagagccuccagacauacgugacccagcagcugaucagagccgccgagauuagagccucugccaaucuggccgccaccaagaugucugagugugugcugggccagagcaagagaguggacuuuugcggcaagggcuaccaccugaugagcuucccucagucugccccucacggcgugguguuucugcacgugacauaugugcccgcucaagagaagaauuucaccaccgcuccagccaucugccacgacggcaaagcccacuuuccuagagaaggcguguucguguccaacggcacccauugguucgugacacagcggaacuucuacgagccccagaucaucaccacccacaacaccuucgugucuggcaacugcgacgucgugaucggcauugugaacaauaccguguacgacccucugcagcccgagcuggacagcuucaaagaggaacuggacaaguacuuuaagaaccacacaagccccgacguggaccugggcgauaucagcggaaucaaugccagcgucgugaacauccagaaagagaucgaccggcugaacgagguggccaagaaucugaacgagagccugaucgaccugcaagaacuggggaaguacgagcaguacaucaaguggcccugguacaucuggcugggcuuuaucgccggacugauugccaucgugauggucacaaucaugcuguguugcaugaccagcugcuguagcugccugaagggcuguuguagcuguggcagcugcugcaaguucgacgaggacgauucugagcccgugcugaagggcgugaaacugcacuacacauga

SEQ ID NO: 23180 - RNA, 3822 nt, Artificial Sequence
  SARS-CoV-2/Wuhan/WIV05/2019__EPI_ISL_402128 spike protein CDS gc mod (1-1273)(K986P_V987P_K986P_V987P_K417N_E484K_N501Y_D614G)
auguucguguuccuggugcugcugccucugguguccagccagugugugaaccugaccaccagaacacagcugccuccagccuacaccaacagcuuuaccagaggcguguacuaccccgacaagguguucagauccagcgugcugcacucuacccaggaccuguuccugccuuucuucagcaacgugaccugguuccacgccauccacguguccggcaccaauggcaccaagagauucgacaaccccgugcugcccuucaacgacgggguguacuuugccagcaccgagaaguccaacaucaucagaggcuggaucuucggcaccacacuggacagcaagacccagagccugcugaucgugaacaacgccaccaacguggucaucaaagugugcgaguuccaguucugcaacgaccccuuccugggcgucuacuaccacaagaacaacaagagcuggauggaaagcgaguuccggguguacagcagcgccaacaacugcaccuucgaguacgugucccagccuuuccugauggaccuggaaggcaagcagggcaacuucaagaaccugcgcgaguucguguuuaagaacaucgacggcuacuucaagaucuacagcaagcacaccccuaucaaccucgugcgggaucugccucagggcuucucugcucuggaaccccugguggaucugcccaucggcaucaacaucacccgguuucagacacugcuggcccugcacagaagcuaccugacaccuggcgauagcagcagcggauggacagcuggugccgccgcuuacuaugugggcuaccugcagccuagaaccuuccugcugaaguacaacgagaacggcaccaucaccgacgccguggauugugcucuggauccucugagcgagacaaagugcacccugaaguccuucaccguggaaaagggcaucuaccagaccagcaacuuccgggugcagcccaccgaauccaucgugcgguuccccaauaucaccaaucugugccccuucggcgagguguucaaugccaccagauucgccucuguguacgccuggaaccggaagcggaucagcaauugcguggccgacuacuccgugcuguacaacuccgccagcuucagcaccuucaagugcuacggcguguccccuaccaagcugaacgaccugugcuucacaaacguguacgccgacagcuucgugauccggggagaugaagugcggcagauugccccuggacagacaggcaacaucgccgacuacaacuacaagcugcccgacgacuucaccggcugugugauugccuggaacagcaacaaccuggacuccaaagucggcggcaacuacaauuaccuguaccggcuguuccggaaguccaaucugaagcccuucgagcgggacaucuccaccgagaucuaucaggccggcagcaccccuuguaacggcgugaagggcuucaacugcuacuucccacugcaguccuacggcuuucagcccacauacggcgugggcuaucagcccuacagagugguggugcugagcuucgaacugcugcaugccccugccacagugugcggcccuaagaaaagcaccaaucucgugaagaacaaaugcgugaacuucaacuucaacggccugaccggcaccggcgugcugacagagagcaacaagaaguuccugccauuccagcaguuuggccgggauaucgccgauaccacagacgccguuagagauccccagacacuggaaauccuggacaucaccccuugcagcuucggcggagugucugugaucaccccuggcaccaacaccagcaaucagguggcagugcuguaccagggcgugaacuguaccgaagugcccguggccauucacgccgaucagcugacaccuacauggcggguguacuccaccggcagcaauguguuucagaccagagccggcugucugaucggagccgagcacgugaacaauagcuacgagugcgacauccccaucggcgcuggaaucugcgccagcuaccagacacagacaaacagcccucggagagccagaagcguggccagccagagcaucauugccuacacaaugucucugggcgccgagaacagcguggccuacuccaacaacucuaucgcuauccccaccaacuucaccaucagcgugaccacagagauccugccuguguccaugaccaagaccagcguggacugcaccauguacaucugcggcgauuccaccgagugcuccaaccugcugcugcaguacggcagcuucugcacccagcugaauagagcccugacagggaucgccguggaacaggacaagaacacccaagagguguucgcccaagugaagcagaucuacaagaccccuccuaucaaggacuucggcggcuucaauuucagccagauucugcccgauccuagcaagcccagcaagcggagcuucaucgaggaccugcuguucaacaaagugacacuggccgacgccggcuucaucaagcaguauggcgauugucugggcgacauugccgccagggaucugauuugcgcccagaaguuuaacggacugacagugcugccuccucugcugaccgaugagaugaucgcccaguacacaucugcccugcuggccggcacaaucacaagcggcuggacauuuggagcaggcgccgcucugcagauccccuuugcuaugcagauggccuaccgguucaacggcaucggagugacccagaaugugcuguacgagaaccagaagcugaucgccaaccaguucaacagcgccaucggcaagauccaggacagccugagcagcacagcaagcgcccugggaaagcugcaggacguggucaaccagaaugcccaggcacugaacacccuggucaagcagcuguccuccaacuucggcgccaucagcucugugcugaacgauauccugagcagacuggacccuccugaggccgaggugcagaucgacagacugaucacaggcagacugcagagccuccagacauacgugacccagcagcugaucagagccgccgagauuagagccucugccaaucuggccgccaccaagaugucugagugugugcugggccagagcaagagaguggacuuuugcggcaagggcuaccaccugaugagcuucccucagucugccccucacggcgugguguuucugcacgugacauaugugcccgcucaagagaagaauuucaccaccgcuccagccaucugccacgacggcaaagcccacuuuccuagagaaggcguguucguguccaacggcacccauugguucgugacacagcggaacuucuacgagccccagaucaucaccaccgacaacaccuucgugucuggcaacugcgacgucgugaucggcauugugaacaauaccguguacgacccucugcagcccgagcuggacagcuucaaagaggaacuggacaaguacuuuaagaaccacacaagccccgacguggaccugggcgauaucagcggaaucaaugccagcgucgugaacauccagaaagagaucgaccggcugaacgagguggccaagaaucugaacgagagccugaucgaccugcaagaacuggggaaguacgagcaguacaucaaguggcccugguacaucuggcugggcuuuaucgccggacugauugccaucgugauggucacaaucaugcuguguugcaugaccagcugcuguagcugccugaagggcuguuguagcuguggcagcugcugcaaguucgacgaggacgauucugagcccgugcugaagggcgugaaacugcacuacacauga

SEQ ID NO: 23181 - RNA, 3813 nt, Artificial Sequence
  SARS-CoV-2/Wuhan/WIV05/2019__EPI_ISL_402128 spike protein CDS gc mod (1-1273)(K986P_V987P_K986P_V987P_L18F_D80A_D215G_L242del_A243del_ L244del_R246I_K417N_E484K_N501Y_D614G_A701V)
auguucguguuccuggugcugcugccucugguguccagccagugugugaacuucaccaccagaacacagcugccuccagccuacaccaacagcuuuaccagaggcguguacuaccccgacaagguguucagauccagcgugcugcacucuacccaggaccuguuccugccuuucuucagcaacgugaccugguuccacgccauccacguguccggcaccaauggcaccaagagauucgccaaccccgugcugcccuucaacgacgggguguacuuugccagcaccgagaaguccaacaucaucagaggcuggaucuucggcaccacacuggacagcaagacccagagccugcugaucgugaacaacgccaccaacguggucaucaaagugugcgaguuccaguucugcaacgaccccuuccugggcgucuacuaccacaagaacaacaagagcuggauggaaagcgaguuccggguguacagcagcgccaacaacugcaccuucgaguacgugucccagccuuuccugauggaccuggaaggcaagcagggcaacuucaagaaccugcgcgaguucguguuuaagaacaucgacggcuacuucaagaucuacagcaagcacaccccuaucaaccucgugcggggccugccucagggcuucucugcucuggaaccccugguggaucugcccaucggcaucaacaucacccgguuucagacacugcacaucagcuaccugacaccuggcgauagcagcagcggauggacagcuggugccgccgcuuacuaugugggcuaccugcagccuagaaccuuccugcugaaguacaacgagaacggcaccaucaccgacgccguggauugugcucuggauccucugagcgagacaaagugcacccugaaguccuucaccguggaaaagggcaucuaccagaccagcaacuuccgggugcagcccaccgaauccaucgugcgguuccccaauaucaccaaucugugccccuucggcgagguguucaaugccaccagauucgccucuguguacgccuggaaccggaagcggaucagcaauugcguggccgacuacuccgugcuguacaacuccgccagcuucagcaccuucaagugcuacggcguguccccuaccaagcugaacgaccugugcuucacaaacguguacgccgacagcuucgugauccggggagaugaagugcggcagauugccccuggacagacaggcaacaucgccgacuacaacuacaagcugcccgacgacuucaccggcugugugauugccuggaacagcaacaaccuggacuccaaagucggcggcaacuacaauuaccuguaccggcuguuccggaaguccaaucugaagcccuucgagcgggacaucuccaccgagaucuaucaggccggcagcaccccuuguaacggcgugaagggcuucaacugcuacuucccacugcaguccuacggcuuucagcccacauacggcgugggcuaucagcccuacagagugguggugcugagcuucgaacugcugcaugccccugccacagugugcggcccuaagaaaagcaccaaucucgugaagaacaaaugcgugaacuucaacuucaacggccugaccggcaccggcgugcugacagagagcaacaagaaguuccugccauuccagcaguuuggccgggauaucgccgauaccacagacgccguuagagauccccagacacuggaaauccuggacaucaccccuugcagcuucggcggagugucugugaucaccccuggcaccaacaccagcaaucagguggcagugcuguaccagggcgugaacuguaccgaagugcccguggccauucacgccgaucagcugacaccuacauggcggguguacuccaccggcagcaauguguuucagaccagagccggcugucugaucggagccgagcacgugaacaauagcuacgagugcgacauccccaucggcgcuggaaucugcgccagcuaccagacacagacaaacagcccucggagagccagaagcguggccagccagagcaucauugccuacacaaugucucugggcguggagaacagcguggccuacuccaacaacucuaucgcuauccccaccaacuucaccaucagcgugaccacagagauccugccuguguccaugaccaagaccagcguggacugcaccauguacaucugcggcgauuccaccgagugcuccaaccugcugcugcaguacggcagcuucugcacccagcugaauagagcccugacagggaucgccguggaacaggacaagaacacccaagagguguucgcccaagugaagcagaucuacaagaccccuccuaucaaggacuucggcggcuucaauuucagccagauucugcccgauccuagcaagcccagcaagcggagcuucaucgaggaccugcuguucaacaaagugacacuggccgacgccggcuucaucaagcaguauggcgauugucugggcgacauugccgccagggaucugauuugcgcccagaaguuuaacggacugacagugcugccuccucugcugaccgaugagaugaucgcccaguacacaucugcccugcuggccggcacaaucacaagcggcuggacauuuggagcaggcgccgcucugcagauccccuuugcuaugcagauggccuaccgguucaacggcaucggagugacccagaaugugcuguacgagaaccagaagcugaucgccaaccaguucaacagcgccaucggcaagauccaggacagccugagcagcacagcaagcgcccugggaaagcugcaggacguggucaaccagaaugcccaggcacugaacacccuggucaagcagcuguccuccaacuucggcgccaucagcucugugcugaacgauauccugagcagacuggacccuccugaggccgaggugcagaucgacagacugaucacaggcagacugcagagccuccagacauacgugacccagcagcugaucagagccgccgagauuagagccucugccaaucuggccgccaccaagaugucugagugugugcugggccagagcaagagaguggacuuuugcggcaagggcuaccaccugaugagcuucccucagucugccccucacggcgugguguuucugcacgugacauaugugcccgcucaagagaagaauuucaccaccgcuccagccaucugccacgacggcaaagcccacuuuccuagagaaggcguguucguguccaacggcacccauugguucgugacacagcggaacuucuacgagccccagaucaucaccaccgacaacaccuucgugucuggcaacugcgacgucgugaucggcauugugaacaauaccguguacgacccucugcagcccgagcuggacagcuucaaagaggaacuggacaaguacuuuaagaaccacacaagccccgacguggaccugggcgauaucagcggaaucaaugccagcgucgugaacauccagaaagagaucgaccggcugaacgagguggccaagaaucugaacgagagccugaucgaccugcaagaacuggggaaguacgagcaguacaucaaguggcccugguacaucuggcugggcuuuaucgccggacugauugccaucgugauggucacaaucaugcuguguugcaugaccagcugcuguagcugccugaagggcuguuguagcuguggcagcugcugcaaguucgacgaggacgauucugagcccgugcugaagggcgugaaacugcacuacacauga

SEQ ID NO: 23182 - RNA, 3822 nt, Artificial Sequence
  SARS-CoV-2/Wuhan/WIV05/2019__EPI_ISL_402128 spike protein CDS gc mod (1-1273)(K986P_V987P_K986P_V987P_E484K_D614G)
auguucguguuccuggugcugcugccucugguguccagccagugugugaaccugaccaccagaacacagcugccuccagccuacaccaacagcuuuaccagaggcguguacuaccccgacaagguguucagauccagcgugcugcacucuacccaggaccuguuccugccuuucuucagcaacgugaccugguuccacgccauccacguguccggcaccaauggcaccaagagauucgacaaccccgugcugcccuucaacgacgggguguacuuugccagcaccgagaaguccaacaucaucagaggcuggaucuucggcaccacacuggacagcaagacccagagccugcugaucgugaacaacgccaccaacguggucaucaaagugugcgaguuccaguucugcaacgaccccuuccugggcgucuacuaccacaagaacaacaagagcuggauggaaagcgaguuccggguguacagcagcgccaacaacugcaccuucgaguacgugucccagccuuuccugauggaccuggaaggcaagcagggcaacuucaagaaccugcgcgaguucguguuuaagaacaucgacggcuacuucaagaucuacagcaagcacaccccuaucaaccucgugcgggaucugccucagggcuucucugcucuggaaccccugguggaucugcccaucggcaucaacaucacccgguuucagacacugcuggcccugcacagaagcuaccugacaccuggcgauagcagcagcggauggacagcuggugccgccgcuuacuaugugggcuaccugcagccuagaaccuuccugcugaaguacaacgagaacggcaccaucaccgacgccguggauugugcucuggauccucugagcgagacaaagugcacccugaaguccuucaccguggaaaagggcaucuaccagaccagcaacuuccgggugcagcccaccgaauccaucgugcgguuccccaauaucaccaaucugugccccuucggcgagguguucaaugccaccagauucgccucuguguacgccuggaaccggaagcggaucagcaauugcguggccgacuacuccgugcuguacaacuccgccagcuucagcaccuucaagugcuacggcguguccccuaccaagcugaacgaccugugcuucacaaacguguacgccgacagcuucgugauccggggagaugaagugcggcagauugccccuggacagacaggcaagaucgccgacuacaacuacaagcugcccgacgacuucaccggcugugugauugccuggaacagcaacaaccuggacuccaaagucggcggcaacuacaauuaccuguaccggcuguuccggaaguccaaucugaagcccuucgagcgggacaucuccaccgagaucuaucaggccggcagcaccccuuguaacggcgugaagggcuucaacugcuacuucccacugcaguccuacggcuuucagcccacaaauggcgugggcuaucagcccuacagagugguggugcugagcuucgaacugcugcaugccccugccacagugugcggcccuaagaaaagcaccaaucucgugaagaacaaaugcgugaacuucaacuucaacggccugaccggcaccggcgugcugacagagagcaacaagaaguuccugccauuccagcaguuuggccgggauaucgccgauaccacagacgccguuagagauccccagacacuggaaauccuggacaucaccccuugcagcuucggcggagugucugugaucaccccuggcaccaacaccagcaaucagguggcagugcuguaccagggcgugaacuguaccgaagugcccguggccauucacgccgaucagcugacaccuacauggcggguguacuccaccggcagcaauguguuucagaccagagccggcugucugaucggagccgagcacgugaacaauagcuacgagugcgacauccccaucggcgcuggaaucugcgccagcuaccagacacagacaaacagcccucggagagccagaagcguggccagccagagcaucauugccuacacaaugucucugggcgccgagaacagcguggccuacuccaacaacucuaucgcuauccccaccaacuucaccaucagcgugaccacagagauccugccuguguccaugaccaagaccagcguggacugcaccauguacaucugcggcgauuccaccgagugcuccaaccugcugcugcaguacggcagcuucugcacccagcugaauagagcccugacagggaucgccguggaacaggacaagaacacccaagagguguucgcccaagugaagcagaucuacaagaccccuccuaucaaggacuucggcggcuucaauuucagccagauucugcccgauccuagcaagcccagcaagcggagcuucaucgaggaccugcuguucaacaaagugacacuggccgacgccggcuucaucaagcaguauggcgauugucugggcgacauugccgccagggaucugauuugcgcccagaaguuuaacggacugacagugcugccuccucugcugaccgaugagaugaucgcccaguacacaucugcccugcuggccggcacaaucacaagcggcuggacauuuggagcaggcgccgcucugcagauccccuuugcuaugcagauggccuaccgguucaacggcaucggagugacccagaaugugcuguacgagaaccagaagcugaucgccaaccaguucaacagcgccaucggcaagauccaggacagccugagcagcacagcaagcgcccugggaaagcugcaggacguggucaaccagaaugcccaggcacugaacacccuggucaagcagcuguccuccaacuucggcgccaucagcucugugcugaacgauauccugagcagacuggacccuccugaggccgaggugcagaucgacagacugaucacaggcagacugcagagccuccagacauacgugacccagcagcugaucagagccgccgagauuagagccucugccaaucuggccgccaccaagaugucugagugugugcugggccagagcaagagaguggacuuuugcggcaagggcuaccaccugaugagcuucccucagucugccccucacggcgugguguuucugcacgugacauaugugcccgcucaagagaagaauuucaccaccgcuccagccaucugccacgacggcaaagcccacuuuccuagagaaggcguguucguguccaacggcacccauugguucgugacacagcggaacuucuacgagccccagaucaucaccaccgacaacaccuucgugucuggcaacugcgacgucgugaucggcauugugaacaauaccguguacgacccucugcagcccgagcuggacagcuucaaagaggaacuggacaaguacuuuaagaaccacacaagccccgacguggaccugggcgauaucagcggaaucaaugccagcgucgugaacauccagaaagagaucgaccggcugaacgagguggccaagaaucugaacgagagccugaucgaccugcaagaacuggggaaguacgagcaguacaucaaguggcccugguacaucuggcugggcuuuaucgccggacugauugccaucgugauggucacaaucaugcuguguugcaugaccagcugcuguagcugccugaagggcuguuguagcuguggcagcugcugcaaguucgacgaggacgauucugagcccgugcugaagggcgugaaacugcacuacacauga

SEQ ID NO: 23183 - RNA, 3822 nt, Artificial Sequence
  SARS-CoV-2/Wuhan/WIV05/2019__EPI_ISL_402128 spike protein CDS gc mod (1-1273)(K986P_V987P_K986P_V987P_L18F_T20N_P26S_D138Y_R190S_K417T _E484K_N501Y_D614G_H655Y_T1027I)
auguucguguuccuggugcugcugccucugguguccagccagugugugaacuucaccaacagaacacagcugccuagcgccuacaccaacagcuuuaccagaggcguguacuaccccgacaagguguucagauccagcgugcugcacucuacccaggaccuguuccugccuuucuucagcaacgugaccugguuccacgccauccacguguccggcaccaauggcaccaagagauucgacaaccccgugcugcccuucaacgacgggguguacuuugccagcaccgagaaguccaacaucaucagaggcuggaucuucggcaccacacuggacagcaagacccagagccugcugaucgugaacaacgccaccaacguggucaucaaagugugcgaguuccaguucugcaacuaccccuuccugggcgucuacuaccacaagaacaacaagagcuggauggaaagcgaguuccggguguacagcagcgccaacaacugcaccuucgaguacgugucccagccuuuccugauggaccuggaaggcaagcagggcaacuucaagaaccugagcgaguucguguuuaagaacaucgacggcuacuucaagaucuacagcaagcacaccccuaucaaccucgugcgggaucugccucagggcuucucugcucuggaaccccugguggaucugcccaucggcaucaacaucacccgguuucagacacugcuggcccugcacagaagcuaccugacaccuggcgauagcagcagcggauggacagcuggugccgccgcuuacuaugugggcuaccugcagccuagaaccuuccugcugaaguacaacgagaacggcaccaucaccgacgccguggauugugcucuggauccucugagcgagacaaagugcacccugaaguccuucaccguggaaaagggcaucuaccagaccagcaacuuccgggugcagcccaccgaauccaucgugcgguuccccaauaucaccaaucugugccccuucggcgagguguucaaugccaccagauucgccucuguguacgccuggaaccggaagcggaucagcaauugcguggccgacuacuccgugcuguacaacuccgccagcuucagcaccuucaagugcuacggcguguccccuaccaagcugaacgaccugugcuucacaaacguguacgccgacagcuucgugauccggggagaugaagugcggcagauugccccuggacagacaggcaccaucgccgacuacaacuacaagcugcccgacgacuucaccggcugugugauugccuggaacagcaacaaccuggacuccaaagucggcggcaacuacaauuaccuguaccggcuguuccggaaguccaaucugaagcccuucgagcgggacaucuccaccgagaucuaucaggccggcagcaccccuuguaacggcgugaagggcuucaacugcuacuucccacugcaguccuacggcuuucagcccacauacggcgugggcuaucagcccuacagagugguggugcugagcuucgaacugcugcaugccccugccacagugugcggcccuaagaaaagcaccaaucucgugaagaacaaaugcgugaacuucaacuucaacggccugaccggcaccggcgugcugacagagagcaacaagaaguuccugccauuccagcaguuuggccgggauaucgccgauaccacagacgccguuagagauccccagacacuggaaauccuggacaucaccccuugcagcuucggcggagugucugugaucaccccuggcaccaacaccagcaaucagguggcagugcuguaccagggcgugaacuguaccgaagugcccguggccauucacgccgaucagcugacaccuacauggcggguguacuccaccggcagcaauguguuucagaccagagccggcugucugaucggagccgaguacgugaacaauagcuacgagugcgacauccccaucggcgcuggaaucugcgccagcuaccagacacagacaaacagcccucggagagccagaagcguggccagccagagcaucauugccuacacaaugucucugggcgccgagaacagcguggccuacuccaacaacucuaucgcuauccccaccaacuucaccaucagcgugaccacagagauccugccuguguccaugaccaagaccagcguggacugcaccauguacaucugcggcgauuccaccgagugcuccaaccugcugcugcaguacggcagcuucugcacccagcugaauagagcccugacagggaucgccguggaacaggacaagaacacccaagagguguucgcccaagugaagcagaucuacaagaccccuccuaucaaggacuucggcggcuucaauuucagccagauucugcccgauccuagcaagcccagcaagcggagcuucaucgaggaccugcuguucaacaaagugacacuggccgacgccggcuucaucaagcaguauggcgauugucugggcgacauugccgccagggaucugauuugcgcccagaaguuuaacggacugacagugcugccuccucugcugaccgaugagaugaucgcccaguacacaucugcccugcuggccggcacaaucacaagcggcuggacauuuggagcaggcgccgcucugcagauccccuuugcuaugcagauggccuaccgguucaacggcaucggagugacccagaaugugcuguacgagaaccagaagcugaucgccaaccaguucaacagcgccaucggcaagauccaggacagccugagcagcacagcaagcgcccugggaaagcugcaggacguggucaaccagaaugcccaggcacugaacacccuggucaagcagcuguccuccaacuucggcgccaucagcucugugcugaacgauauccugagcagacuggacccuccugaggccgaggugcagaucgacagacugaucacaggcagacugcagagccuccagacauacgugacccagcagcugaucagagccgccgagauuagagccucugccaaucuggccgccaucaagaugucugagugugugcugggccagagcaagagaguggacuuuugcggcaagggcuaccaccugaugagcuucccucagucugccccucacggcgugguguuucugcacgugacauaugugcccgcucaagagaagaauuucaccaccgcuccagccaucugccacgacggcaaagcccacuuuccuagagaaggcguguucguguccaacggcacccauugguucgugacacagcggaacuucuacgagccccagaucaucaccaccgacaacaccuucgugucuggcaacugcgacgucgugaucggcauugugaacaauaccguguacgacccucugcagcccgagcuggacagcuucaaagaggaacuggacaaguacuuuaagaaccacacaagccccgacguggaccugggcgauaucagcggaaucaaugccagcgucgugaacauccagaaagagaucgaccggcugaacgagguggccaagaaucugaacgagagccugaucgaccugcaagaacuggggaaguacgagcaguacaucaaguggcccugguacaucuggcugggcuuuaucgccggacugauugccaucgugauggucacaaucaugcuguguugcaugaccagcugcuguagcugccugaagggcuguuguagcuguggcagcugcugcaaguucgacgaggacgauucugagcccgugcugaagggcgugaaacugcacuacacauga

SEQ ID NO: 23184 - RNA, 3822 nt, Artificial Sequence
  SARS-CoV-2/Wuhan/WIV05/2019__EPI_ISL_402128 spike protein CDS gc mod (1-1273)(K986P_V987P_K986P_V987P_S13I_W152C_L452R_D614G)
auguucguguuccuggugcugcugccucugguguccauccagugugugaaccugaccaccagaacacagcugccuccagccuacaccaacagcuuuaccagaggcguguacuaccccgacaagguguucagauccagcgugcugcacucuacccaggaccuguuccugccuuucuucagcaacgugaccugguuccacgccauccacguguccggcaccaauggcaccaagagauucgacaaccccgugcugcccuucaacgacgggguguacuuugccagcaccgagaaguccaacaucaucagaggcuggaucuucggcaccacacuggacagcaagacccagagccugcugaucgugaacaacgccaccaacguggucaucaaagugugcgaguuccaguucugcaacgaccccuuccugggcgucuacuaccacaagaacaacaagagcugcauggaaagcgaguuccggguguacagcagcgccaacaacugcaccuucgaguacgugucccagccuuuccugauggaccuggaaggcaagcagggcaacuucaagaaccugcgcgaguucguguuuaagaacaucgacggcuacuucaagaucuacagcaagcacaccccuaucaaccucgugcgggaucugccucagggcuucucugcucuggaaccccugguggaucugcccaucggcaucaacaucacccgguuucagacacugcuggcccugcacagaagcuaccugacaccuggcgauagcagcagcggauggacagcuggugccgccgcuuacuaugugggcuaccugcagccuagaaccuuccugcugaaguacaacgagaacggcaccaucaccgacgccguggauugugcucuggauccucugagcgagacaaagugcacccugaaguccuucaccguggaaaagggcaucuaccagaccagcaacuuccgggugcagcccaccgaauccaucgugcgguuccccaauaucaccaaucugugccccuucggcgagguguucaaugccaccagauucgccucuguguacgccuggaaccggaagcggaucagcaauugcguggccgacuacuccgugcuguacaacuccgccagcuucagcaccuucaagugcuacggcguguccccuaccaagcugaacgaccugugcuucacaaacguguacgccgacagcuucgugauccggggagaugaagugcggcagauugccccuggacagacaggcaagaucgccgacuacaacuacaagcugcccgacgacuucaccggcugugugauugccuggaacagcaacaaccuggacuccaaagucggcggcaacuacaauuaccgcuaccggcuguuccggaaguccaaucugaagcccuucgagcgggacaucuccaccgagaucuaucaggccggcagcaccccuuguaacggcguggaaggcuucaacugcuacuucccacugcaguccuacggcuuucagcccacaaauggcgugggcuaucagcccuacagagugguggugcugagcuucgaacugcugcaugccccugccacagugugcggcccuaagaaaagcaccaaucucgugaagaacaaaugcgugaacuucaacuucaacggccugaccggcaccggcgugcugacagagagcaacaagaaguuccugccauuccagcaguuuggccgggauaucgccgauaccacagacgccguuagagauccccagacacuggaaauccuggacaucaccccuugcagcuucggcggagugucugugaucaccccuggcaccaacaccagcaaucagguggcagugcuguaccagggcgugaacuguaccgaagugcccguggccauucacgccgaucagcugacaccuacauggcggguguacuccaccggcagcaauguguuucagaccagagccggcugucugaucggagccgagcacgugaacaauagcuacgagugcgacauccccaucggcgcuggaaucugcgccagcuaccagacacagacaaacagcccucggagagccagaagcguggccagccagagcaucauugccuacacaaugucucugggcgccgagaacagcguggccuacuccaacaacucuaucgcuauccccaccaacuucaccaucagcgugaccacagagauccugccuguguccaugaccaagaccagcguggacugcaccauguacaucugcggcgauuccaccgagugcuccaaccugcugcugcaguacggcagcuucugcacccagcugaauagagcccugacagggaucgccguggaacaggacaagaacacccaagagguguucgcccaagugaagcagaucuacaagaccccuccuaucaaggacuucggcggcuucaauuucagccagauucugcccgauccuagcaagcccagcaagcggagcuucaucgaggaccugcuguucaacaaagugacacuggccgacgccggcuucaucaagcaguauggcgauugucugggcgacauugccgccagggaucugauuugcgcccagaaguuuaacggacugacagugcugccuccucugcugaccgaugagaugaucgcccaguacacaucugcccugcuggccggcacaaucacaagcggcuggacauuuggagcaggcgccgcucugcagauccccuuugcuaugcagauggccuaccgguucaacggcaucggagugacccagaaugugcuguacgagaaccagaagcugaucgccaaccaguucaacagcgccaucggcaagauccaggacagccugagcagcacagcaagcgcccugggaaagcugcaggacguggucaaccagaaugcccaggcacugaacacccuggucaagcagcuguccuccaacuucggcgccaucagcucugugcugaacgauauccugagcagacuggacccuccugaggccgaggugcagaucgacagacugaucacaggcagacugcagagccuccagacauacgugacccagcagcugaucagagccgccgagauuagagccucugccaaucuggccgccaccaagaugucugagugugugcugggccagagcaagagaguggacuuuugcggcaagggcuaccaccugaugagcuucccucagucugccccucacggcgugguguuucugcacgugacauaugugcccgcucaagagaagaauuucaccaccgcuccagccaucugccacgacggcaaagcccacuuuccuagagaaggcguguucguguccaacggcacccauugguucgugacacagcggaacuucuacgagccccagaucaucaccaccgacaacaccuucgugucuggcaacugcgacgucgugaucggcauugugaacaauaccguguacgacccucugcagcccgagcuggacagcuucaaagaggaacuggacaaguacuuuaagaaccacacaagccccgacguggaccugggcgauaucagcggaaucaaugccagcgucgugaacauccagaaagagaucgaccggcugaacgagguggccaagaaucugaacgagagccugaucgaccugcaagaacuggggaaguacgagcaguacaucaaguggcccugguacaucuggcugggcuuuaucgccggacugauugccaucgugauggucacaaucaugcuguguugcaugaccagcugcuguagcugccugaagggcuguuguagcuguggcagcugcugcaaguucgacgaggacgauucugagcccgugcugaagggcgugaaacugcacuacacauga

SEQ ID NO: 23185 - RNA, 1369 nt, Artificial Sequence; identical to SEQ ID NO: 22814
  SARS-CoV-2/Wuhan/WIV05/2019__EPI_ISL_402128 spike protein mRNA gc (1-15,334-528) Ferritin construct R10337

SEQ ID NO: 23186 - RNA, 967 nt, Artificial Sequence; identical to SEQ ID NO: 22815
  SARS-CoV-2/Wuhan/WIV05/2019__EPI_ISL_402128 spike protein mRNA gc (334-528) Foldon construct R9926

SEQ ID NO: 23187 - RNA, 1345 nt, Artificial Sequence; identical to SEQ ID NO: 22816
  SARS-CoV-2/Wuhan/WIV05/2019__EPI_ISL_402128 spike protein mRNA gc (1-15,334-528) LumSynth construct R10335

SEQ ID NO: 23188 - RNA, 1306 nt, Artificial Sequence; identical to SEQ ID NO: 22817
  SARS-CoV-2/Wuhan/WIV05/2019__EPI_ISL_402128 spike protein mRNA gc (334-528) LumSynth construct R10336

SEQ ID NO: 23189 - RNA, 4039 nt, Artificial Sequence; identical to SEQ ID NO: 162
  SARS-CoV-2/Wuhan/WIV05/2019__EPI_ISL_402128 spike protein mRNA gc (1-1273) R9514

SEQ ID NO: 23190 - RNA, 4039 nt, Artificial Sequence; identical to SEQ ID NO: 22818
  SARS-CoV-2/Wuhan/WIV05/2019__EPI_ISL_402128 spike protein mRNA gc (1-1273)(D614G)

SEQ ID NO: 23191 - RNA, 4039 nt, Artificial Sequence; identical to SEQ ID NO: 22820
  SARS-CoV-2/Wuhan/WIV05/2019__EPI_ISL_402128 spike protein mRNA gc (1-1273)(A222V_D614G) R10276

SEQ ID NO: 23192 - RNA, 4039 nt, Artificial Sequence; identical to SEQ ID NO: 22822
  SARS-CoV-2/Wuhan/WIV05/2019__EPI_ISL_402128 spike protein mRNA gc (1-1273)(N439K_D614G) R10296

SEQ ID NO: 23193 - RNA, 4039 nt, Artificial Sequence; identical to SEQ ID NO: 22824
  SARS-CoV-2/Wuhan/WIV05/2019__EPI_ISL_402128 spike protein mRNA gc (1-1273)(S477N_D614G) R10284

SEQ ID NO: 23194 - RNA, 4039 nt, Artificial Sequence; identical to SEQ ID NO: 22826
  SARS-CoV-2/Wuhan/WIV05/2019__EPI_ISL_402128 spike protein mRNA gc (1-1273)(N501Y_D614G) R10350

SEQ ID NO: 23195 - RNA, 4033 nt, Artificial Sequence; identical to SEQ ID NO: 22828
  SARS-CoV-2/Wuhan/WIV05/2019__EPI_ISL_402128 spike protein mRNA gc (1-1273)(H69del_V70del_D614G) R10272

SEQ ID NO: 23196 - RNA, 4039 nt, Artificial Sequence; identical to SEQ ID NO: 22830
  SARS-CoV-2/Wuhan/WIV05/2019__EPI_ISL_402128 spike protein mRNA gc (1-1273)(Y453F_D614G) R10280

SEQ ID NO: 23197 - RNA, 4039 nt, Artificial Sequence; identical to SEQ ID NO: 22832
  SARS-CoV-2/Wuhan/WIV05/2019__EPI_ISL_402128 spike protein mRNA gc (1-1273)(D614G_I692V) R10288

SEQ ID NO: 23198 - RNA, 4039 nt, Artificial Sequence; identical to SEQ ID NO: 22834
  SARS-CoV-2/Wuhan/WIV05/2019__EPI_ISL_402128 spike protein mRNA gc (1-1273)(D614G_M1229I) R10344

SEQ ID NO: 23199 - RNA, 4033 nt, Artificial Sequence; identical to SEQ ID NO: 22836
  SARS-CoV-2/Wuhan/WIV05/2019__EPI_ISL_402128 spike protein mRNA gc (1-1273)(H69del_V70del_A222V_Y453F_S477N_D614G_I692V) R10292

SEQ ID NO: 23200 - RNA, 4033 nt, Artificial Sequence; identical to SEQ ID NO: 22838
  SARS-CoV-2/Wuhan/WIV05/2019__EPI_ISL_402128 spike protein mRNA gc (1-1273)(H69del_V70del_Y453F_D614G_I692V_M1229I) R10346

SEQ ID NO: 23201 - RNA, 4030 nt, Artificial Sequence
  SARS-CoV-2/Wuhan/WIV05/2019__EPI_ISL_402128 spike protein mRNA gc (1-1273)(H69del_V70del_Y144del_N501Y_A570D_D614G_P681H_T716I_S982 A_D1118H) R10352
aggagaaagcuuaccauguucguguuccugguccuccugccccuggugagcucccagugcgugaaccucaccacccgcacgcagcugccgcccgccuacaccaacagcuucacccggggcgucuacuaccccgacaagguguuccgcuccagcgugcugcacuccacccaggaccucuuccugcccuucuucagcaacgucacgugguuccacgccaucuccgggaccaacggcaccaagcgguucgacaacccggugcugcccuucaacgacggggucuacuucgcgagcaccgagaaguccaacaucauccgcggcuggaucuucgggacgacccucgacagcaagacccagucccugcugaucgugaacaacgccaccaacguggucaucaaggugugcgaguuccaguucugcaacgaccccuuccucggcguguaccacaagaacaacaagagcuggauggaguccgaguuccgggucuacagcuccgccaacaacugcacguucgaguacgugagccagcccuuccugauggaccuggagggcaagcaggggaacuucaagaaccuccgcgaguucguguucaagaacaucgacggcuacuucaagaucuacuccaagcacaccccgaucaaccugguccgggaccugccccagggguucagcgcccucgagccccugguggaccugcccaucggcaucaacaucacccgcuuccagacccuccuggcccugcaccgguccuaccucacgccgggggacagcagcuccggcuggaccgcgggcgccgccgccuacuacgugggguaccugcagccccgcaccuuccugcucaaguacaacgagaacggcaccaucacggacgcggucgacugcgcccuggacccccugagcgagaccaagugcacccucaaguccuucaccguggagaaggggaucuaccagacgagcaacuuccgggugcagcccaccgaguccaucguccgcuucccgaacaucaccaaccugugccccuucggcgagguguucaacgccacccgguucgccagcgucuacgccuggaaccgcaagcggaucuccaacugcguggcggacuacagcgugcuguacaacuccgccagcuucuccacguucaagugcuacggcgucagccccaccaagcucaacgaccugugcuucaccaacguguacgccgacuccuucgugauccgcggggacgagguccggcagaucgcccccggccagaccgggaagaucgccgacuacaacuacaagcugccggacgacuucacgggcugcgugaucgcguggaacagcaacaaccucgacuccaaggucgggggcaacuacaacuaccuguaccgccuguuccgcaagagcaaccucaagcccuucgagcgggacaucuccaccgagaucuaccaggccggcagcacccccugcaacgggguggagggcuucaacugcuacuucccccugcaguccuacggguuccagccgaccuacggcgugggguaccagcccuaccggguggucgugcugagcuucgagcuccugcacgcccccgccacggugugcggccccaagaaguccaccaaccuggucaagaacaagugcgugaacuucaacuucaacggccucaccgggaccggcgugcugaccgagagcaacaagaaguuccugccguuccagcaguucgggcgcgacaucgacgacacgaccgacgcgguccgcgacccccagacccuggagauccucgacaucacccccugcagcuucggcgggguguccgugaucacgccgggcaccaacaccagcaaccaggucgccgugcuguaccagggcgugaacugcaccgagguccccguggccauccacgccgaccagcugacgcccaccuggcggguguacuccaccggcagcaacgucuuccagacccgcgccgggugccucaucggcgcggagcacgugaacaacuccuacgagugcgacauccccaucggggccggcaucugcgccagcuaccagacgcagaccaacucccaccggcgcgcccggagcguggcgucccagagcaucaucgccuacaccaugucccugggcgccgagaacagcgucgccuacuccaacaacagcaucgccauccccaucaacuucacgaucuccgugaccaccgagauccugcccgugagcaugaccaagacgagcgucgacugcaccauguacaucugcggggacuccaccgagugcagcaaccuccugcugcaguacggcuccuucugcacccagcucaaccgcgcgcugacggggaucgccguggagcaggacaagaacacccaggagguguucgcccaggucaagcagaucuacaagacgcccccgaucaaggacuucggcggguucaacuucagccagauccugcccgaccccuccaagcccagcaagcgguccuucaucgaggaccuccuguucaacaaggugacccuggccgacgccggcuucaucaagcaguacggcgacugccucggggacaucgcggcccgcgaccugaucugcgcccagaaguucaacggccugaccgugcucccgccccugcugaccgacgagaugaucgcccaguacaccagcgcccuccuggcggggaccaucacguccggcuggaccuucggggccggcgccgcccugcagauccccuucgcgaugcagauggccuaccgguucaacggcaucggggucacccagaacgugcucuacgagaaccagaagcugaucgccaaccaguucaacagcgccaucggcaagauccaggacucccugagcuccaccgccagcgcgcucgggaagcugcaggacguggucaaccagaacgcccaggcccugaacacgcucgugaagcagcuguccagcaacuucggcgccaucuccagcgugcugaacgacauccucgcccgccuggacaaggucgaggccgaggugcagaucgaccggcugaucaccgggcgccuccagagccugcagaccuacgugacccagcagcugauccgggcggccgagauccgcgccagcgccaaccucgccgcgaccaagauguccgagugcguccugggccagagcaagcggguggacuucugcggcaagggguaccaccugauguccuucccccagagcgccccgcacggcguggucuuccuccacgugacguacguccccgcccaggagaagaacuucaccaccgcccccgcgaucugccacgacgggaaggcccacuucccccgcgagggcguguucguguccaacgggacccacugguucgucacgcagcggaacuucuacgagccgcagaucaucaccacccacaacaccuucgugagcggcaacugcgacguggucaucggcaucgugaacaacacgguguacgacccccugcagcccgagcuggacuccuucaaggaggagcucgacaaguacuucaagaaccacaccagccccgacgucgaccugggggacaucuccggcaucaacgccagcguggugaacauccagaaggagaucgaccgccugaacgaggucgccaagaaccucaacgagucccugaucgaccugcaggagcucgggaaguacgagcaguacaucaaguggccgugguacaucuggcugggcuucaucgccggccugaucgcgaucgugauggugaccaucaugcucugcugcaugaccagcugcugcuccugccugaaggggugcugcagcugcggcuccugcugcaaguucgacgaggacgacagcgagcccguccugaagggggugaagcuccacuacacgugaggacuaguuauaagacugacuagcccgaugggccucccaacgggcccuccuccccuccuugcaccgagauuaauaaaaaaaaaaaaaaaaaaaaaaaaaaaaaaaaaaaaaaaaaaaaaaaaaaaaaaaaaaaaaaaaugcaucccccccccccccccccccccccccccccccaaaggcucuuuucagagccaccagaauu

SEQ ID NO: 23202 - RNA, 4039 nt, Artificial Sequence
  SARS-CoV-2/Wuhan/WIV05/2019__EPI_ISL_402128 spike protein mRNA gc (1-1273)(K417N_E484K_N501Y_D614G) R10358
aggagaaagcuuaccauguucguguuccugguccuccugccccuggugagcucccagugcgugaaccucaccacccgcacgcagcugccgcccgccuacaccaacagcuucacccggggcgucuacuaccccgacaagguguuccgcuccagcgugcugcacuccacccaggaccucuuccugcccuucuucagcaacgucacgugguuccacgccauccacguguccgggaccaacggcaccaagcgguucgacaacccggugcugcccuucaacgacggggucuacuucgcgagcaccgagaaguccaacaucauccgcggcuggaucuucgggacgacccucgacagcaagacccagucccugcugaucgugaacaacgccaccaacguggucaucaaggugugcgaguuccaguucugcaacgaccccuuccucggcguguacuaccacaagaacaacaagagcuggauggaguccgaguuccgggucuacagcuccgccaacaacugcacguucgaguacgugagccagcccuuccugauggaccuggagggcaagcaggggaacuucaagaaccuccgcgaguucguguucaagaacaucgacggcuacuucaagaucuacuccaagcacaccccgaucaaccugguccgggaccugccccagggguucagcgcccucgagccccugguggaccugcccaucggcaucaacaucacccgcuuccagacccuccuggcccugcaccgguccuaccucacgccgggggacagcagcuccggcuggaccgcgggcgccgccgccuacuacgugggguaccugcagccccgcaccuuccugcucaaguacaacgagaacggcaccaucacggacgcggucgacugcgcccuggacccccugagcgagaccaagugcacccucaaguccuucaccguggagaaggggaucuaccagacgagcaacuuccgggugcagcccaccgaguccaucguccgcuucccgaacaucaccaaccugugccccuucggcgagguguucaacgccacccgguucgccagcgucuacgccuggaaccgcaagcggaucuccaacugcguggcggacuacagcgugcuguacaacuccgccagcuucuccacguucaagugcuacggcgucagccccaccaagcucaacgaccugugcuucaccaacguguacgccgacuccuucgugauccgcggggacgagguccggcagaucgcccccggccagaccgggaacaucgccgacuacaacuacaagcugccggacgacuucacgggcugcgugaucgcguggaacagcaacaaccucgacuccaaggucgggggcaacuacaacuaccuguaccgccuguuccgcaagagcaaccucaagcccuucgagcgggacaucuccaccgagaucuaccaggccggcagcacccccugcaacggggugaagggcuucaacugcuacuucccccugcaguccuacggguuccagccgaccuacggcgugggguaccagcccuaccggguggucgugcugagcuucgagcuccugcacgcccccgccacggugugcggccccaagaaguccaccaaccuggucaagaacaagugcgugaacuucaacuucaacggccucaccgggaccggcgugcugaccgagagcaacaagaaguuccugccguuccagcaguucgggcgcgacaucgccgacacgaccgacgcgguccgcgacccccagacccuggagauccucgacaucacccccugcagcuucggcgggguguccgugaucacgccgggcaccaacaccagcaaccaggucgccgugcuguaccagggcgugaacugcaccgagguccccguggccauccacgccgaccagcugacgcccaccuggcggguguacuccaccggcagcaacgucuuccagacccgcgccgggugccucaucggcgcggagcacgugaacaacuccuacgagugcgacauccccaucggggccggcaucugcgccagcuaccagacgcagaccaacuccccgcggcgcgcccggagcguggcgucccagagcaucaucgccuacaccaugucccugggcgccgagaacagcgucgccuacuccaacaacagcaucgccauccccaccaacuucacgaucuccgugaccaccgagauccugcccgugagcaugaccaagacgagcgucgacugcaccauguacaucugcggggacuccaccgagugcagcaaccuccugcugcaguacggcuccuucugcacccagcucaaccgcgcgcugacggggaucgccguggagcaggacaagaacacccaggagguguucgcccaggucaagcagaucuacaagacgcccccgaucaaggacuucggcggguucaacuucagccagauccugcccgaccccuccaagcccagcaagcgguccuucaucgaggaccuccuguucaacaaggugacccuggccgacgccggcuucaucaagcaguacggcgacugccucggggacaucgcggcccgcgaccugaucugcgcccagaaguucaacggccugaccgugcucccgccccugcugaccgacgagaugaucgcccaguacaccagcgcccuccuggcggggaccaucacguccggcuggaccuucggggccggcgccgcccugcagauccccuucgcgaugcagauggccuaccgguucaacggcaucggggucacccagaacgugcucuacgagaaccagaagcugaucgccaaccaguucaacagcgccaucggcaagauccaggacucccugagcuccaccgccagcgcgcucgggaagcugcaggacguggucaaccagaacgcccaggcccugaacacgcucgugaagcagcuguccagcaacuucggcgccaucuccagcgugcugaacgacauccucucccgccuggacaaggucgaggccgaggugcagaucgaccggcugaucaccgggcgccuccagagccugcagaccuacgugacccagcagcugauccgggcggccgagauccgcgccagcgccaaccucgccgcgaccaagauguccgagugcguccugggccagagcaagcggguggacuucugcggcaagggguaccaccugauguccuucccccagagcgccccgcacggcguggucuuccuccacgugacguacguccccgcccaggagaagaacuucaccaccgcccccgcgaucugccacgacgggaaggcccacuucccccgcgagggcguguucguguccaacgggacccacugguucgucacgcagcggaacuucuacgagccgcagaucaucaccaccgacaacaccuucgugagcggcaacugcgacguggucaucggcaucgugaacaacacgguguacgacccccugcagcccgagcuggacuccuucaaggaggagcucgacaaguacuucaagaaccacaccagccccgacgucgaccugggggacaucuccggcaucaacgccagcguggugaacauccagaaggagaucgaccgccugaacgaggucgccaagaaccucaacgagucccugaucgaccugcaggagcucgggaaguacgagcaguacaucaaguggccgugguacaucuggcugggcuucaucgccggccugaucgcgaucgugauggugaccaucaugcucugcugcaugaccagcugcugcuccugccugaaggggugcugcagcugcggcuccugcugcaaguucgacgaggacgacagcgagcccguccugaagggggugaagcuccacuacacgugaggacuaguuauaagacugacuagcccgaugggccucccaacgggcccuccuccccuccuugcaccgagauuaauaaaaaaaaaaaaaaaaaaaaaaaaaaaaaaaaaaaaaaaaaaaaaaaaaaaaaaaaaaaaaaaaugcaucccccccccccccccccccccccccccccccaaaggcucuuuucagagccaccagaauu

SEQ ID NO: 23203 - RNA, 4030 nt, Artificial Sequence
  SARS-CoV-2/Wuhan/WIV05/2019__EPI_ISL_402128 spike protein mRNA gc (1-1273)(L18F_D80A_D215G_L242del_A243del_L244del_R246I_K417N_E484 K_N501Y_D614G_A701V)
aggagaaagcuuaccauguucguguuccugguccuccugccccuggugagcucccagugcgugaacuucaccacccgcacgcagcugccgcccgccuacaccaacagcuucacccggggcgucuacuaccccgacaagguguuccgcuccagcgugcugcacuccacccaggaccucuuccugcccuucuucagcaacgucacgugguuccacgccauccacguguccgggaccaacggcaccaagcgguucgccaacccggugcugcccuucaacgacggggucuacuucgcgagcaccgagaaguccaacaucauccgcggcuggaucuucgggacgacccucgacagcaagacccagucccugcugaucgugaacaacgccaccaacguggucaucaaggugugcgaguuccaguucugcaacgaccccuuccucggcguguacuaccacaagaacaacaagagcuggauggaguccgaguuccgggucuacagcuccgccaacaacugcacguucgaguacgugagccagcccuuccugauggaccuggagggcaagcaggggaacuucaagaaccuccgcgaguucguguucaagaacaucgacggcuacuucaagaucuacuccaagcacaccccgaucaaccugguccggggccugccccagggguucagcgcccucgagccccugguggaccugcccaucggcaucaacaucacccgcuuccagacccuccacaucuccuaccucacgccgggggacagcagcuccggcuggaccgcgggcgccgccgccuacuacgugggguaccugcagccccgcaccuuccugcucaaguacaacgagaacggcaccaucacggacgcggucgacugcgcccuggacccccugagcgagaccaagugcacccucaaguccuucaccguggagaaggggaucuaccagacgagcaacuuccgggugcagcccaccgaguccaucguccgcuucccgaacaucaccaaccugugccccuucggcgagguguucaacgccacccgguucgccagcgucuacgccuggaaccgcaagcggaucuccaacugcguggcggacuacagcgugcuguacaacuccgccagcuucuccacguucaagugcuacggcgucagccccaccaagcucaacgaccugugcuucaccaacguguacgccgacuccuucgugauccgcggggacgagguccggcagaucgcccccggccagaccgggaacaucgccgacuacaacuacaagcugccggacgacuucacgggcugcgugaucgcguggaacagcaacaaccucgacuccaaggucgggggcaacuacaacuaccuguaccgccuguuccgcaagagcaaccucaagcccuucgagcgggacaucuccaccgagaucuaccaggccggcagcacccccugcaacggggugaagggcuucaacugcuacuucccccugcaguccuacggguuccagccgaccuacggcgugggguaccagcccuaccggguggucgugcugagcuucgagcuccugcacgcccccgccacggugugcggccccaagaaguccaccaaccuggucaagaacaagugcgugaacuucaacuucaacggccucaccgggaccggcgugcugaccgagagcaacaagaaguuccugccguuccagcaguucgggcgcgacaucgccgacacgaccgacgcgguccgcgacccccagacccuggagauccucgacaucacccccugcagcuucggcgggguguccgugaucacgccgggcaccaacaccagcaaccaggucgccgugcuguaccagggcgugaacugcaccgagguccccguggccauccacgccgaccagcugacgcccaccuggcggguguacuccaccggcagcaacgucuuccagacccgcgccgggugccucaucggcgcggagcacgugaacaacuccuacgagugcgacauccccaucggggccggcaucugcgccagcuaccagacgcagaccaacuccccgcggcgcgcccggagcguggcgucccagagcaucaucgccuacaccaugucccugggcguggagaacagcgucgccuacuccaacaacagcaucgccauccccaccaacuucacgaucuccgugaccaccgagauccugcccgugagcaugaccaagacgagcgucgacugcaccauguacaucugcggggacuccaccgagugcagcaaccuccugcugcaguacggcuccuucugcacccagcucaaccgcgcgcugacggggaucgccguggagcaggacaagaacacccaggagguguucgcccaggucaagcagaucuacaagacgcccccgaucaaggacuucggcggguucaacuucagccagauccugcccgaccccuccaagcccagcaagcgguccuucaucgaggaccuccuguucaacaaggugacccuggccgacgccggcuucaucaagcaguacggcgacugccucggggacaucgcggcccgcgaccugaucugcgcccagaaguucaacggccugaccgugcucccgccccugcugaccgacgagaugaucgcccaguacaccagcgcccuccuggcggggaccaucacguccggcuggaccuucggggccggcgccgcccugcagauccccuucgcgaugcagauggccuaccgguucaacggcaucggggucacccagaacgugcucuacgagaaccagaagcugaucgccaaccaguucaacagcgccaucggcaagauccaggacucccugagcuccaccgccagcgcgcucgggaagcugcaggacguggucaaccagaacgcccaggcccugaacacgcucgugaagcagcuguccagcaacuucggcgccaucuccagcgugcugaacgacauccucucccgccuggacaaggucgaggccgaggugcagaucgaccggcugaucaccgggcgccuccagagccugcagaccuacgugacccagcagcugauccgggcggccgagauccgcgccagcgccaaccucgccgcgaccaagauguccgagugcguccugggccagagcaagcggguggacuucugcggcaagggguaccaccugauguccuucccccagagcgccccgcacggcguggucuuccuccacgugacguacguccccgcccaggagaagaacuucaccaccgcccccgcgaucugccacgacgggaaggcccacuucccccgcgagggcguguucguguccaacgggacccacugguucgucacgcagcggaacuucuacgagccgcagaucaucaccaccgacaacaccuucgugagcggcaacugcgacguggucaucggcaucgugaacaacacgguguacgacccccugcagcccgagcuggacuccuucaaggaggagcucgacaaguacuucaagaaccacaccagccccgacgucgaccugggggacaucuccggcaucaacgccagcguggugaacauccagaaggagaucgaccgccugaacgaggucgccaagaaccucaacgagucccugaucgaccugcaggagcucgggaaguacgagcaguacaucaaguggccgugguacaucuggcugggcuucaucgccggccugaucgcgaucgugauggugaccaucaugcucugcugcaugaccagcugcugcuccugccugaaggggugcugcagcugcggcuccugcugcaaguucgacgaggacgacagcgagcccguccugaagggggugaagcuccacuacacgugaggacuaguuauaagacugacuagcccgaugggccucccaacgggcccuccuccccuccuugcaccgagauuaauaaaaaaaaaaaaaaaaaaaaaaaaaaaaaaaaaaaaaaaaaaaaaaaaaaaaaaaaaaaaaaaaugcaucccccccccccccccccccccccccccccccaaaggcucuuuucagagccaccagaauu

SEQ ID NO: 23204 - RNA, 4039 nt, Artificial Sequence
  SARS-CoV-2/Wuhan/WIV05/2019__EPI_ISL_402128 spike protein mRNA gc (1-1273)(E484K_D614G)
aggagaaagcuuaccauguucguguuccugguccuccugccccuggugagcucccagugcgugaaccucaccacccgcacgcagcugccgcccgccuacaccaacagcuucacccggggcgucuacuaccccgacaagguguuccgcuccagcgugcugcacuccacccaggaccucuuccugcccuucuucagcaacgucacgugguuccacgccauccacguguccgggaccaacggcaccaagcgguucgacaacccggugcugcccuucaacgacggggucuacuucgcgagcaccgagaaguccaacaucauccgcggcuggaucuucgggacgacccucgacagcaagacccagucccugcugaucgugaacaacgccaccaacguggucaucaaggugugcgaguuccaguucugcaacgaccccuuccucggcguguacuaccacaagaacaacaagagcuggauggaguccgaguuccgggucuacagcuccgccaacaacugcacguucgaguacgugagccagcccuuccugauggaccuggagggcaagcaggggaacuucaagaaccuccgcgaguucguguucaagaacaucgacggcuacuucaagaucuacuccaagcacaccccgaucaaccugguccgggaccugccccagggguucagcgcccucgagccccugguggaccugcccaucggcaucaacaucacccgcuuccagacccuccuggcccugcaccgguccuaccucacgccgggggacagcagcuccggcuggaccgcgggcgccgccgccuacuacgugggguaccugcagccccgcaccuuccugcucaaguacaacgagaacggcaccaucacggacgcggucgacugcgcccuggacccccugagcgagaccaagugcacccucaaguccuucaccguggagaaggggaucuaccagacgagcaacuuccgggugcagcccaccgaguccaucguccgcuucccgaacaucaccaaccugugccccuucggcgagguguucaacgccacccgguucgccagcgucuacgccuggaaccgcaagcggaucuccaacugcguggcggacuacagcgugcuguacaacuccgccagcuucuccacguucaagugcuacggcgucagccccaccaagcucaacgaccugugcuucaccaacguguacgccgacuccuucgugauccgcggggacgagguccggcagaucgcccccggccagaccgggaagaucgccgacuacaacuacaagcugccggacgacuucacgggcugcgugaucgcguggaacagcaacaaccucgacuccaaggucgggggcaacuacaacuaccuguaccgccuguuccgcaagagcaaccucaagcccuucgagcgggacaucuccaccgagaucuaccaggccggcagcacccccugcaacggggugaagggcuucaacugcuacuucccccugcaguccuacggguuccagccgaccaacggcgugggguaccagcccuaccggguggucgugcugagcuucgagcuccugcacgcccccgccacggugugcggccccaagaaguccaccaaccuggucaagaacaagugcgugaacuucaacuucaacggccucaccgggaccggcgugcugaccgagagcaacaagaaguuccugccguuccagcaguucgggcgcgacaucgccgacacgaccgacgcgguccgcgacccccagacccuggagauccucgacaucacccccugcagcuucggcgggguguccgugaucacgccgggcaccaacaccagcaaccaggucgccgugcuguaccagggcgugaacugcaccgagguccccguggccauccacgccgaccagcugacgcccaccuggcggguguacuccaccggcagcaacgucuuccagacccgcgccgggugccucaucggcgcggagcacgugaacaacuccuacgagugcgacauccccaucggggccggcaucugcgccagcuaccagacgcagaccaacuccccgcggcgcgcccggagcguggcgucccagagcaucaucgccuacaccaugucccugggcgccgagaacagcgucgccuacuccaacaacagcaucgccauccccaccaacuucacgaucuccgugaccaccgagauccugcccgugagcaugaccaagacgagcgucgacugcaccauguacaucugcggggacuccaccgagugcagcaaccuccugcugcaguacggcuccuucugcacccagcucaaccgcgcgcugacggggaucgccguggagcaggacaagaacacccaggagguguucgcccaggucaagcagaucuacaagacgcccccgaucaaggacuucggcggguucaacuucagccagauccugcccgaccccuccaagcccagcaagcgguccuucaucgaggaccuccuguucaacaaggugacccuggccgacgccggcuucaucaagcaguacggcgacugccucggggacaucgcggcccgcgaccugaucugcgcccagaaguucaacggccugaccgugcucccgccccugcugaccgacgagaugaucgcccaguacaccagcgcccuccuggcggggaccaucacguccggcuggaccuucggggccggcgccgcccugcagauccccuucgcgaugcagauggccuaccgguucaacggcaucggggucacccagaacgugcucuacgagaaccagaagcugaucgccaaccaguucaacagcgccaucggcaagauccaggacucccugagcuccaccgccagcgcgcucgggaagcugcaggacguggucaaccagaacgcccaggcccugaacacgcucgugaagcagcuguccagcaacuucggcgccaucuccagcgugcugaacgacauccucucccgccuggacaaggucgaggccgaggugcagaucgaccggcugaucaccgggcgccuccagagccugcagaccuacgugacccagcagcugauccgggcggccgagauccgcgccagcgccaaccucgccgcgaccaagauguccgagugcguccugggccagagcaagcggguggacuucugcggcaagggguaccaccugauguccuucccccagagcgccccgcacggcguggucuuccuccacgugacguacguccccgcccaggagaagaacuucaccaccgcccccgcgaucugccacgacgggaaggcccacuucccccgcgagggcguguucguguccaacgggacccacugguucgucacgcagcggaacuucuacgagccgcagaucaucaccaccgacaacaccuucgugagcggcaacugcgacguggucaucggcaucgugaacaacacgguguacgacccccugcagcccgagcuggacuccuucaaggaggagcucgacaaguacuucaagaaccacaccagccccgacgucgaccugggggacaucuccggcaucaacgccagcguggugaacauccagaaggagaucgaccgccugaacgaggucgccaagaaccucaacgagucccugaucgaccugcaggagcucgggaaguacgagcaguacaucaaguggccgugguacaucuggcugggcuucaucgccggccugaucgcgaucgugauggugaccaucaugcucugcugcaugaccagcugcugcuccugccugaaggggugcugcagcugcggcuccugcugcaaguucgacgaggacgacagcgagcccguccugaagggggugaagcuccacuacacgugaggacuaguuauaagacugacuagcccgaugggccucccaacgggcccuccuccccuccuugcaccgagauuaauaaaaaaaaaaaaaaaaaaaaaaaaaaaaaaaaaaaaaaaaaaaaaaaaaaaaaaaaaaaaaaaaugcaucccccccccccccccccccccccccccccccaaaggcucuuuucagagccaccagaauu

SEQ ID NO: 23205 - RNA, 4039 nt, Artificial Sequence
  SARS-CoV-2/Wuhan/WIV05/2019__EPI_ISL_402128 spike protein mRNA gc (1-1273)(L18F_T20N_P26S_D138Y_R190S_K417T_E484K_N501Y_D614G_H655Y _T1027I)
aggagaaagcuuaccauguucguguuccugguccuccugccccuggugagcucccagugcgugaacuucaccaaccgcacgcagcugccgagcgccuacaccaacagcuucacccggggcgucuacuaccccgacaagguguuccgcuccagcgugcugcacuccacccaggaccucuuccugcccuucuucagcaacgucacgugguuccacgccauccacguguccgggaccaacggcaccaagcgguucgacaacccggugcugcccuucaacgacggggucuacuucgcgagcaccgagaaguccaacaucauccgcggcuggaucuucgggacgacccucgacagcaagacccagucccugcugaucgugaacaacgccaccaacguggucaucaaggugugcgaguuccaguucugcaacuaccccuuccucggcguguacuaccacaagaacaacaagagcuggauggaguccgaguuccgggucuacagcuccgccaacaacugcacguucgaguacgugagccagcccuuccugauggaccuggagggcaagcaggggaacuucaagaaccucagcgaguucguguucaagaacaucgacggcuacuucaagaucuacuccaagcacaccccgaucaaccugguccgggaccugccccagggguucagcgcccucgagccccugguggaccugcccaucggcaucaacaucacccgcuuccagacccuccuggcccugcaccgguccuaccucacgccgggggacagcagcuccggcuggaccgcgggcgccgccgccuacuacgugggguaccugcagccccgcaccuuccugcucaaguacaacgagaacggcaccaucacggacgcggucgacugcgcccuggacccccugagcgagaccaagugcacccucaaguccuucaccguggagaaggggaucuaccagacgagcaacuuccgggugcagcccaccgaguccaucguccgcuucccgaacaucaccaaccugugccccuucggcgagguguucaacgccacccgguucgccagcgucuacgccuggaaccgcaagcggaucuccaacugcguggcggacuacagcgugcuguacaacuccgccagcuucuccacguucaagugcuacggcgucagccccaccaagcucaacgaccugugcuucaccaacguguacgccgacuccuucgugauccgcggggacgagguccggcagaucgcccccggccagaccgggaccaucgccgacuacaacuacaagcugccggacgacuucacgggcugcgugaucgcguggaacagcaacaaccucgacuccaaggucgggggcaacuacaacuaccuguaccgccuguuccgcaagagcaaccucaagcccuucgagcgggacaucuccaccgagaucuaccaggccggcagcacccccugcaacggggugaagggcuucaacugcuacuucccccugcaguccuacggguuccagccgaccuacggcgugggguaccagcccuaccggguggucgugcugagcuucgagcuccugcacgcccccgccacggugugcggccccaagaaguccaccaaccuggucaagaacaagugcgugaacuucaacuucaacggccucaccgggaccggcgugcugaccgagagcaacaagaaguuccugccguuccagcaguucgggcgcgacaucgccgacacgaccgacgcgguccgcgacccccagacccuggagauccucgacaucacccccugcagcuucggcgggguguccgugaucacgccgggcaccaacaccagcaaccaggucgccgugcuguaccagggcgugaacugcaccgagguccccguggccauccacgccgaccagcugacgcccaccuggcggguguacuccaccggcagcaacgucuuccagacccgcgccgggugccucaucggcgcggaguacgugaacaacuccuacgagugcgacauccccaucggggccggcaucugcgccagcuaccagacgcagaccaacuccccgcggcgcgcccggagcguggcgucccagagcaucaucgccuacaccaugucccugggcgccgagaacagcgucgccuacuccaacaacagcaucgccauccccaccaacuucacgaucuccgugaccaccgagauccugcccgugagcaugaccaagacgagcgucgacugcaccauguacaucugcggggacuccaccgagugcagcaaccuccugcugcaguacggcuccuucugcacccagcucaaccgcgcgcugacggggaucgccguggagcaggacaagaacacccaggagguguucgcccaggucaagcagaucuacaagacgcccccgaucaaggacuucggcggguucaacuucagccagauccugcccgaccccuccaagcccagcaagcgguccuucaucgaggaccuccuguucaacaaggugacccuggccgacgccggcuucaucaagcaguacggcgacugccucggggacaucgcggcccgcgaccugaucugcgcccagaaguucaacggccugaccgugcucccgccccugcugaccgacgagaugaucgcccaguacaccagcgcccuccuggcggggaccaucacguccggcuggaccuucggggccggcgccgcccugcagauccccuucgcgaugcagauggccuaccgguucaacggcaucggggucacccagaacgugcucuacgagaaccagaagcugaucgccaaccaguucaacagcgccaucggcaagauccaggacucccugagcuccaccgccagcgcgcucgggaagcugcaggacguggucaaccagaacgcccaggcccugaacacgcucgugaagcagcuguccagcaacuucggcgccaucuccagcgugcugaacgacauccucucccgccuggacaaggucgaggccgaggugcagaucgaccggcugaucaccgggcgccuccagagccugcagaccuacgugacccagcagcugauccgggcggccgagauccgcgccagcgccaaccucgccgcgaucaagauguccgagugcguccugggccagagcaagcggguggacuucugcggcaagggguaccaccugauguccuucccccagagcgccccgcacggcguggucuuccuccacgugacguacguccccgcccaggagaagaacuucaccaccgcccccgcgaucugccacgacgggaaggcccacuucccccgcgagggcguguucguguccaacgggacccacugguucgucacgcagcggaacuucuacgagccgcagaucaucaccaccgacaacaccuucgugagcggcaacugcgacguggucaucggcaucgugaacaacacgguguacgacccccugcagcccgagcuggacuccuucaaggaggagcucgacaaguacuucaagaaccacaccagccccgacgucgaccugggggacaucuccggcaucaacgccagcguggugaacauccagaaggagaucgaccgccugaacgaggucgccaagaaccucaacgagucccugaucgaccugcaggagcucgggaaguacgagcaguacaucaaguggccgugguacaucuggcugggcuucaucgccggccugaucgcgaucgugauggugaccaucaugcucugcugcaugaccagcugcugcuccugccugaaggggugcugcagcugcggcuccugcugcaaguucgacgaggacgacagcgagcccguccugaagggggugaagcuccacuacacgugaggacuaguuauaagacugacuagcccgaugggccucccaacgggcccuccuccccuccuugcaccgagauuaauaaaaaaaaaaaaaaaaaaaaaaaaaaaaaaaaaaaaaaaaaaaaaaaaaaaaaaaaaaaaaaaaugcaucccccccccccccccccccccccccccccccaaaggcucuuuucagagccaccagaauu

SEQ ID NO: 23206 - RNA, 4039 nt, Artificial Sequence
  SARS-CoV-2/Wuhan/WIV05/2019__EPI_ISL_402128 spike protein mRNA gc (1-1273)(S13I_W152C_L452R_D614G)
aggagaaagcuuaccauguucguguuccugguccuccugccccuggugagcauccagugcgugaaccucaccacccgcacgcagcugccgcccgccuacaccaacagcuucacccggggcgucuacuaccccgacaagguguuccgcuccagcgugcugcacuccacccaggaccucuuccugcccuucuucagcaacgucacgugguuccacgccauccacguguccgggaccaacggcaccaagcgguucgacaacccggugcugcccuucaacgacggggucuacuucgcgagcaccgagaaguccaacaucauccgcggcuggaucuucgggacgacccucgacagcaagacccagucccugcugaucgugaacaacgccaccaacguggucaucaaggugugcgaguuccaguucugcaacgaccccuuccucggcguguacuaccacaagaacaacaagagcugcauggaguccgaguuccgggucuacagcuccgccaacaacugcacguucgaguacgugagccagcccuuccugauggaccuggagggcaagcaggggaacuucaagaaccuccgcgaguucguguucaagaacaucgacggcuacuucaagaucuacuccaagcacaccccgaucaaccugguccgggaccugccccagggguucagcgcccucgagccccugguggaccugcccaucggcaucaacaucacccgcuuccagacccuccuggcccugcaccgguccuaccucacgccgggggacagcagcuccggcuggaccgcgggcgccgccgccuacuacgugggguaccugcagccccgcaccuuccugcucaaguacaacgagaacggcaccaucacggacgcggucgacugcgcccuggacccccugagcgagaccaagugcacccucaaguccuucaccguggagaaggggaucuaccagacgagcaacuuccgggugcagcccaccgaguccaucguccgcuucccgaacaucaccaaccugugccccuucggcgagguguucaacgccacccgguucgccagcgucuacgccuggaaccgcaagcggaucuccaacugcguggcggacuacagcgugcuguacaacuccgccagcuucuccacguucaagugcuacggcgucagccccaccaagcucaacgaccugugcuucaccaacguguacgccgacuccuucgugauccgcggggacgagguccggcagaucgcccccggccagaccgggaagaucgccgacuacaacuacaagcugccggacgacuucacgggcugcgugaucgcguggaacagcaacaaccucgacuccaaggucgggggcaacuacaacuaccgcuaccgccuguuccgcaagagcaaccucaagcccuucgagcgggacaucuccaccgagaucuaccaggccggcagcacccccugcaacgggguggagggcuucaacugcuacuucccccugcaguccuacggguuccagccgaccaacggcgugggguaccagcccuaccggguggucgugcugagcuucgagcuccugcacgcccccgccacggugugcggccccaagaaguccaccaaccuggucaagaacaagugcgugaacuucaacuucaacggccucaccgggaccggcgugcugaccgagagcaacaagaaguuccugccguuccagcaguucgggcgcgacaucgccgacacgaccgacgcgguccgcgacccccagacccuggagauccucgacaucacccccugcagcuucggcgggguguccgugaucacgccgggcaccaacaccagcaaccaggucgccgugcuguaccagggcgugaacugcaccgagguccccguggccauccacgccgaccagcugacgcccaccuggcggguguacuccaccggcagcaacgucuuccagacccgcgccgggugccucaucggcgcggagcacgugaacaacuccuacgagugcgacauccccaucggggccggcaucugcgccagcuaccagacgcagaccaacuccccgcggcgcgcccggagcguggcgucccagagcaucaucgccuacaccaugucccugggcgccgagaacagcgucgccuacuccaacaacagcaucgccauccccaccaacuucacgaucuccgugaccaccgagauccugcccgugagcaugaccaagacgagcgucgacugcaccauguacaucugcggggacuccaccgagugcagcaaccuccugcugcaguacggcuccuucugcacccagcucaaccgcgcgcugacggggaucgccguggagcaggacaagaacacccaggagguguucgcccaggucaagcagaucuacaagacgcccccgaucaaggacuucggcggguucaacuucagccagauccugcccgaccccuccaagcccagcaagcgguccuucaucgaggaccuccuguucaacaaggugacccuggccgacgccggcuucaucaagcaguacggcgacugccucggggacaucgcggcccgcgaccugaucugcgcccagaaguucaacggccugaccgugcucccgccccugcugaccgacgagaugaucgcccaguacaccagcgcccuccuggcggggaccaucacguccggcuggaccuucggggccggcgccgcccugcagauccccuucgcgaugcagauggccuaccgguucaacggcaucggggucacccagaacgugcucuacgagaaccagaagcugaucgccaaccaguucaacagcgccaucggcaagauccaggacucccugagcuccaccgccagcgcgcucgggaagcugcaggacguggucaaccagaacgcccaggcccugaacacgcucgugaagcagcuguccagcaacuucggcgccaucuccagcgugcugaacgacauccucucccgccuggacaaggucgaggccgaggugcagaucgaccggcugaucaccgggcgccuccagagccugcagaccuacgugacccagcagcugauccgggcggccgagauccgcgccagcgccaaccucgccgcgaccaagauguccgagugcguccugggccagagcaagcggguggacuucugcggcaagggguaccaccugauguccuucccccagagcgccccgcacggcguggucuuccuccacgugacguacguccccgcccaggagaagaacuucaccaccgcccccgcgaucugccacgacgggaaggcccacuucccccgcgagggcguguucguguccaacgggacccacugguucgucacgcagcggaacuucuacgagccgcagaucaucaccaccgacaacaccuucgugagcggcaacugcgacguggucaucggcaucgugaacaacacgguguacgacccccugcagcccgagcuggacuccuucaaggaggagcucgacaaguacuucaagaaccacaccagccccgacgucgaccugggggacaucuccggcaucaacgccagcguggugaacauccagaaggagaucgaccgccugaacgaggucgccaagaaccucaacgagucccugaucgaccugcaggagcucgggaaguacgagcaguacaucaaguggccgugguacaucuggcugggcuucaucgccggccugaucgcgaucgugauggugaccaucaugcucugcugcaugaccagcugcugcuccugccugaaggggugcugcagcugcggcuccugcugcaaguucgacgaggacgacagcgagcccguccugaagggggugaagcuccacuacacgugaggacuaguuauaagacugacuagcccgaugggccucccaacgggcccuccuccccuccuugcaccgagauuaauaaaaaaaaaaaaaaaaaaaaaaaaaaaaaaaaaaaaaaaaaaaaaaaaaaaaaaaaaaaaaaaaugcaucccccccccccccccccccccccccccccccaaaggcucuuuucagagccaccagaauu

SEQ ID NO: 23207 - RNA, 4039 nt, Artificial Sequence; identical to SEQ ID NO: 162
  SARS-CoV-2/Wuhan/WIV05/2019__EPI_ISL_402128 spike protein mRNA gc (1-1273) R9514

SEQ ID NO: 23208 - RNA, 4039 nt, Artificial Sequence; identical to SEQ ID NO: 12751
  SARS-CoV-2/Wuhan/WIV05/2019__EPI_ISL_402128 spike protein mRNA gc (1-1273)(D614G)

SEQ ID NO: 23209 - RNA, 4039 nt, Artificial Sequence
  SARS-CoV-2/Wuhan/WIV05/2019__EPI_ISL_402128 spike protein mRNA gc (1-1273)(A222V_D614G)
aggagaaagcuuaccauguucguguuccugguccuccugccccuggugagcucccagugcgugaaccucaccacccgcacgcagcugccgcccgccuacaccaacagcuucacccggggcgucuacuaccccgacaagguguuccgcuccagcgugcugcacuccacccaggaccucuuccugcccuucuucagcaacgucacgugguuccacgccauccacguguccgggaccaacggcaccaagcgguucgacaacccggugcugcccuucaacgacggggucuacuucgcgagcaccgagaaguccaacaucauccgcggcuggaucuucgggacgacccucgacagcaagacccagucccugcugaucgugaacaacgccaccaacguggucaucaaggugugcgaguuccaguucugcaacgaccccuuccucggcguguacuaccacaagaacaacaagagcuggauggaguccgaguuccgggucuacagcuccgccaacaacugcacguucgaguacgugagccagcccuuccugauggaccuggagggcaagcaggggaacuucaagaaccuccgcgaguucguguucaagaacaucgacggcuacuucaagaucuacuccaagcacaccccgaucaaccugguccgggaccugccccagggguucagcgugcucgagccccugguggaccugcccaucggcaucaacaucacccgcuuccagacccuccuggcccugcaccgguccuaccucacgccgggggacagcagcuccggcuggaccgccggcgcggccgccuacuacgucggguaccugcagccccgcaccuuccugcucaaguacaacgagaacggcaccaucacggacgccguggacugcgcgcuggacccccugagcgagaccaagugcacccucaaguccuucaccguggagaaggggaucuaccagacgagcaacuuccggguccagcccaccgaguccaucgugcgcuucccgaacaucaccaaccugugccccuucggcgaggucuucaacgccacccgguucgccagcguguacgccuggaaccgcaagcggaucuccaacugcguggccgacuacagcguccuguacaacuccgcgagcuucuccacguucaagugcuacggcgugagccccaccaagcucaacgaccugugcuucaccaacguguacgccgacuccuucgucauccgcggggacgaggugcggcagaucgcccccggccagaccgggaagaucgccgacuacaacuacaagcugccggacgacuucacgggcugcgugaucgccuggaacagcaacaaccucgacuccaaggucgggggcaacuacaacuaccuguaccgccuguuccgcaagagcaaccucaagcccuucgagcgggacaucuccaccgagaucuaccaggcgggcagcacccccugcaacgggguggagggcuucaacugcuacuucccccugcaguccuacggguuccagccgaccaacggcgugggguaccagcccuaccgggucguggugcugagcuucgagcuccugcacgcccccgccacggucugcggccccaagaaguccaccaaccuggugaagaacaagugcgugaacuucaacuucaacggccucaccgggaccggcguccugaccgagagcaacaagaaguuccugccguuccagcaguucgggcgcgacaucgccgacacgaccgacgccgugcgcgacccccagacccuggagauccucgacaucacccccugcagcuucggcgggguguccgucaucacgccgggcaccaacaccagcaaccagguggcggugcuguaccagggcgucaacugcaccgaggugcccguggccauccacgccgaccagcugacgcccaccuggcgggucuacuccaccgggagcaacguguuccagacccgcgccggcugccucaucggggccgagcacgugaacaacuccuacgagugcgacauccccaucggcgcgggcaucugcgccagcuaccagacgcagaccaacuccccgcggcgcgcccggagcgucgccucccagagcaucaucgcguacaccaugucccugggggccgagaacagcguggccuacuccaacaacagcaucgccauccccaccaacuucacgaucuccgugaccaccgagauccugcccgucagcaugaccaagacgagcguggacugcaccauguacaucugcggcgacuccaccgagugcagcaaccuccugcugcaguacggguccuucugcacccagcucaaccgcgcccugacgggcaucgcgguggagcaggacaagaacacccaggaggucuucgcccaggugaagcagaucuacaagacgcccccgaucaaggacuucgggggcuucaacuucagccagauccugcccgaccccuccaagcccagcaagcgguccuucaucgaggaccuccuguucaacaaggugacccuggccgacgccggcuucaucaagcaguacggggacugccucggcgacaucgccgcgcgcgaccugaucugcgcccagaaguucaacgggcugaccguccucccgccccugcugaccgacgagaugaucgcccaguacaccagcgcccuccuggccggcaccaucacguccggguggaccuucggcgcgggcgccgcccugcagauccccuucgccaugcagauggcguaccgguucaacgggaucggcgugacccagaacgugcucuacgagaaccagaagcugaucgccaaccaguucaacagcgccaucgggaagauccaggacucccugagcuccaccgccagcgcccucggcaagcugcaggacgucgugaaccagaacgcgcaggcccugaacacgcucgugaagcagcuguccagcaacuucggggccaucuccagcguccugaacgacauccucucccgccuggacaagguggaggccgaggugcagaucgaccggcugaucaccggccgccuccagagccugcagaccuacgucacccagcagcugauccgggccgcggagauccgcgccagcgccaaccucgccgccaccaagauguccgagugcgugcugggccagagcaagcggguggacuucugcgggaagggcuaccaccugauguccuucccccagagcgcgccgcacggggucguguuccuccacgucacguacgugcccgcccaggagaagaacuucaccaccgcccccgccaucugccacgacggcaaggcgcacuucccccgcgaggggguguucgucuccaacggcacccacugguucgugacgcagcggaacuucuacgagccgcagaucaucaccaccgacaacaccuucgugagcggcaacugcgacgucgugaucgggaucgugaacaacacggucuacgacccccugcagcccgagcuggacuccuucaaggaggagcucgacaaguacuucaagaaccacaccagccccgacguggaccugggcgacaucuccgggaucaacgccagcguggucaacauccagaaggagaucgaccgccugaacgagguggccaagaaccucaacgagucccugaucgaccugcaggagcucggcaaguacgagcaguacaucaaguggccgugguacaucuggcugggcuucaucgccgggcugaucgccaucgugauggucaccaucaugcucugcugcaugaccagcugcugcuccugccugaagggcugcugcagcugcggguccugcugcaaguucgacgaggacgacagcgagcccgugcugaagggcgugaagcuccacuacacgugaggacuaguuauaagacugacuagcccgaugggccucccaacgggcccuccuccccuccuugcaccgagauuaauaaaaaaaaaaaaaaaaaaaaaaaaaaaaaaaaaaaaaaaaaaaaaaaaaaaaaaaaaaaaaaaaugcaucccccccccccccccccccccccccccccccaaaggcucuuuucagagccaccagaauu

SEQ ID NO: 23210 - RNA, 4039 nt, Artificial Sequence
  SARS-CoV-2/Wuhan/WIV05/2019__EPI_ISL_402128 spike protein mRNA gc (1-1273)(N439K_D614G)
aggagaaagcuuaccauguucguguuccugguccuccugccccuggugagcucccagugcgugaaccucaccacccgcacgcagcugccgcccgccuacaccaacagcuucacccggggcgucuacuaccccgacaagguguuccgcuccagcgugcugcacuccacccaggaccucuuccugcccuucuucagcaacgucacgugguuccacgccauccacguguccgggaccaacggcaccaagcgguucgacaacccggugcugcccuucaacgacggggucuacuucgcgagcaccgagaaguccaacaucauccgcggcuggaucuucgggacgacccucgacagcaagacccagucccugcugaucgugaacaacgccaccaacguggucaucaaggugugcgaguuccaguucugcaacgaccccuuccucggcguguacuaccacaagaacaacaagagcuggauggaguccgaguuccgggucuacagcuccgccaacaacugcacguucgaguacgugagccagcccuuccugauggaccuggagggcaagcaggggaacuucaagaaccuccgcgaguucguguucaagaacaucgacggcuacuucaagaucuacuccaagcacaccccgaucaaccugguccgggaccugccccagggguucagcgcccucgagccccugguggaccugcccaucggcaucaacaucacccgcuuccagacccuccuggcccugcaccgguccuaccucacgccgggggacagcagcuccggcuggaccgcgggcgccgccgccuacuacgugggguaccugcagccccgcaccuuccugcucaaguacaacgagaacggcaccaucacggacgcggucgacugcgcccuggacccccugagcgagaccaagugcacccucaaguccuucaccguggagaaggggaucuaccagacgagcaacuuccgggugcagcccaccgaguccaucguccgcuucccgaacaucaccaaccugugccccuucggcgagguguucaacgccacccgguucgccagcgucuacgccuggaaccgcaagcggaucuccaacugcguggcggacuacagcgugcuguacaacuccgccagcuucuccacguucaagugcuacggcgucagccccaccaagcucaacgaccugugcuucaccaacguguacgccgacuccuucgugauccgcggggacgagguccggcagaucgcccccggccagaccgggaagaucgccgacuacaacuacaagcugccggacgacuucacgggcugcgugaucgcguggaacagcaagaaccucgacuccaaggucgggggcaacuacaacuaccuguaccgccuguuccgcaagagcaaccucaagcccuucgagcgggacaucuccaccgagaucuaccaggccggcagcacccccugcaacgggguggagggcuucaacugcuacuucccccugcaguccuacggguuccagccgaccaacggcgugggguaccagcccuaccggguggucgugcugagcuucgagcuccugcacgcccccgccacggugugcggccccaagaaguccaccaaccuggucaagaacaagugcgugaacuucaacuucaacggccucaccgggaccggcgugcugaccgagagcaacaagaaguuccugccguuccagcaguucgggcgcgacaucgccgacacgaccgacgcgguccgcgacccccagacccuggagauccucgacaucacccccugcagcuucggcgggguguccgugaucacgccgggcaccaacaccagcaaccaggucgccgugcuguaccagggcgugaacugcaccgagguccccguggccauccacgccgaccagcugacgcccaccuggcggguguacuccaccgggagcaacgucuuccagacccgcgccggcugccucaucggggcggagcacgugaacaacuccuacgagugcgacauccccaucggcgccggcaucugcgccagcuaccagacgcagaccaacuccccgcggcgcgcccggagcguggcgucccagagcaucaucgccuacaccaugucccugggggccgagaacagcgucgccuacuccaacaacagcaucgccauccccaccaacuucacgaucuccgugaccaccgagauccugcccgugagcaugaccaagacgagcgucgacugcaccauguacaucugcggcgacuccaccgagugcagcaaccuccugcugcaguacggguccuucugcacccagcucaaccgcgcgcugacgggcaucgccguggagcaggacaagaacacccaggagguguucgcccaggucaagcagaucuacaagacgcccccgaucaaggacuucgggggcuucaacuucagccagauccugcccgaccccuccaagcccagcaagcgguccuucaucgaggaccuccuguucaacaaggugacccuggccgacgccggcuucaucaagcaguacggggacugccucggcgacaucgcggcccgcgaccugaucugcgcccagaaguucaacgggcugaccgugcucccgccccugcugaccgacgagaugaucgcccaguacaccagcgcccuccuggcgggcaccaucacguccggguggaccuucggcgccggcgccgcccugcagauccccuucgcgaugcagauggccuaccgguucaacgggaucggcgucacccagaacgugcucuacgagaaccagaagcugaucgccaaccaguucaacagcgccaucgggaagauccaggacucccugagcuccaccgccagcgcgcucggcaagcugcaggacguggucaaccagaacgcccaggcccugaacacgcucgugaagcagcuguccagcaacuucggggccaucuccagcgugcugaacgacauccucucccgccuggacaaggucgaggccgaggugcagaucgaccggcugaucaccggccgccuccagagccugcagaccuacgugacccagcagcugauccgggcggccgagauccgcgccagcgccaaccucgccgcgaccaagauguccgagugcguccugggccagagcaagcggguggacuucugcgggaagggcuaccaccugauguccuucccccagagcgccccgcacgggguggucuuccuccacgugacguacguccccgcccaggagaagaacuucaccaccgcccccgcgaucugccacgacggcaaggcccacuucccccgcgaggggguguucguguccaacggcacccacugguucgucacgcagcggaacuucuacgagccgcagaucaucaccaccgacaacaccuucgugagcggcaacugcgacguggucaucgggaucgugaacaacacgguguacgacccccugcagcccgagcuggacuccuucaaggaggagcucgacaaguacuucaagaaccacaccagccccgacgucgaccugggcgacaucuccgggaucaacgccagcguggugaacauccagaaggagaucgaccgccugaacgaggucgccaagaaccucaacgagucccugaucgaccugcaggagcucggcaaguacgagcaguacaucaaguggccgugguacaucuggcugggcuucaucgccgggcugaucgcgaucgugauggugaccaucaugcucugcugcaugaccagcugcugcuccugccugaagggcugcugcagcugcggguccugcugcaaguucgacgaggacgacagcgagcccguccugaagggcgugaagcuccacuacacgugaggacuaguuauaagacugacuagcccgaugggccucccaacgggcccuccuccccuccuugcaccgagauuaauaaaaaaaaaaaaaaaaaaaaaaaaaaaaaaaaaaaaaaaaaaaaaaaaaaaaaaaaaaaaaaaaugcaucccccccccccccccccccccccccccccccaaaggcucuuuucagagccaccagaauu

SEQ ID NO: 23211 - RNA, 4039 nt, Artificial Sequence
  SARS-CoV-2/Wuhan/WIV05/2019__EPI_ISL_402128 spike protein mRNA gc (1-1273)(S477N_D614G)
aggagaaagcuuaccauguucguguuccugguccuccugccccuggugagcucccagugcgugaaccucaccacccgcacgcagcugccgcccgccuacaccaacagcuucacccggggcgucuacuaccccgacaagguguuccgcuccagcgugcugcacuccacccaggaccucuuccugcccuucuucagcaacgucacgugguuccacgccauccacguguccgggaccaacggcaccaagcgguucgacaacccggugcugcccuucaacgacggggucuacuucgcgagcaccgagaaguccaacaucauccgcggcuggaucuucgggacgacccucgacagcaagacccagucccugcugaucgugaacaacgccaccaacguggucaucaaggugugcgaguuccaguucugcaacgaccccuuccucggcguguacuaccacaagaacaacaagagcuggauggaguccgaguuccgggucuacagcuccgccaacaacugcacguucgaguacgugagccagcccuuccugauggaccuggagggcaagcaggggaacuucaagaaccuccgcgaguucguguucaagaacaucgacggcuacuucaagaucuacuccaagcacaccccgaucaaccugguccgggaccugccccagggguucagcgcccucgagccccugguggaccugcccaucggcaucaacaucacccgcuuccagacccuccuggcccugcaccgguccuaccucacgccgggggacagcagcuccggcuggaccgcgggcgccgccgccuacuacgugggguaccugcagccccgcaccuuccugcucaaguacaacgagaacggcaccaucacggacgcggucgacugcgcccuggacccccugagcgagaccaagugcacccucaaguccuucaccguggagaaggggaucuaccagacgagcaacuuccgggugcagcccaccgaguccaucguccgcuucccgaacaucaccaaccugugccccuucggcgagguguucaacgccacccgguucgccagcgucuacgccuggaaccgcaagcggaucuccaacugcguggcggacuacagcgugcuguacaacuccgccagcuucuccacguucaagugcuacggcgucagccccaccaagcucaacgaccugugcuucaccaacguguacgccgacuccuucgugauccgcggggacgagguccggcagaucgcccccggccagaccgggaagaucgccgacuacaacuacaagcugccggacgacuucacgggcugcgugaucgcguggaacagcaacaaccucgacuccaaggucgggggcaacuacaacuaccuguaccgccuguuccgcaagagcaaccucaagcccuucgagcgggacaucuccaccgagaucuaccaggccggcaacacccccugcaacgggguggagggcuucaacugcuacuucccccugcagagcuacggguuccagccgaccaacggcgugggguaccagcccuaccggguggucgugcuguccuucgagcuccugcacgcccccgccacggugugcggccccaagaaguccaccaaccuggucaagaacaagugcgugaacuucaacuucaacggccucaccgggaccggcgugcugaccgagagcaacaagaaguuccugccguuccagcaguucgggcgcgacaucgccgacacgaccgacgcgguccgcgacccccagacccuggagauccucgacaucacccccugcagcuucggcggggugagcgugaucacgccgggcaccaacaccuccaaccaggucgccgugcuguaccagggcgugaacugcaccgagguccccguggccauccacgccgaccagcugacgcccaccuggcggguguacagcaccggguccaacgucuuccagacccgcgccggcugccucaucggggcggagcacgugaacaacagcuacgagugcgacauccccaucggcgccggcaucugcgccuccuaccagacgcagaccaacagcccgcggcgcgcccgguccguggcgagccaguccaucaucgccuacaccaugagccugggggccgagaacuccgucgccuacagcaacaacuccaucgccauccccaccaacuucacgaucagcgugaccaccgagauccugcccguguccaugaccaagacgagcgucgacugcaccauguacaucugcggcgacagcaccgagugcuccaaccuccugcugcaguacgggagcuucugcacccagcucaaccgcgcgcugacgggcaucgccguggagcaggacaagaacacccaggagguguucgcccaggucaagcagaucuacaagacgcccccgaucaaggacuucgggggcuucaacuucucccagauccugcccgaccccagcaagcccuccaagcggagcuucaucgaggaccuccuguucaacaaggugacccuggccgacgccggcuucaucaagcaguacggggacugccucggcgacaucgcggcccgcgaccugaucugcgcccagaaguucaacgggcugaccgugcucccgccccugcugaccgacgagaugaucgcccaguacaccuccgcccuccuggcgggcaccaucacgagcggguggaccuucggcgccggcgccgcccugcagauccccuucgcgaugcagauggccuaccgguucaacgggaucggcgucacccagaacgugcucuacgagaaccagaagcugaucgccaaccaguucaacuccgccaucgggaagauccaggacagccuguccagcaccgccuccgcgcucggcaagcugcaggacguggucaaccagaacgcccaggcccugaacacgcucgugaagcagcugagcuccaacuucggggccaucagcuccgugcugaacgacauccucagccgccuggacaaggucgaggccgaggugcagaucgaccggcugaucaccggccgccuccagucccugcagaccuacgugacccagcagcugauccgggcggccgagauccgcgccagcgccaaccucgccgcgaccaagaugagcgagugcguccugggccaguccaagcggguggacuucugcgggaagggcuaccaccugaugagcuucccccaguccgccccgcacgggguggucuuccuccacgugacguacguccccgcccaggagaagaacuucaccaccgcccccgcgaucugccacgacggcaaggcccacuucccccgcgaggggguguucgugagcaacggcacccacugguucgucacgcagcggaacuucuacgagccgcagaucaucaccaccgacaacaccuucguguccggcaacugcgacguggucaucgggaucgugaacaacacgguguacgacccccugcagcccgagcuggacagcuucaaggaggagcucgacaaguacuucaagaaccacaccucccccgacgucgaccugggcgacaucagcgggaucaacgccuccguggugaacauccagaaggagaucgaccgccugaacgaggucgccaagaaccucaacgagagccugaucgaccugcaggagcucggcaaguacgagcaguacaucaaguggccgugguacaucuggcugggcuucaucgccgggcugaucgcgaucgugauggugaccaucaugcucugcugcaugaccuccugcugcagcugccugaagggcugcugcuccugcgggagcugcugcaaguucgacgaggacgacuccgagcccguccugaagggcgugaagcuccacuacacgugaggacuaguuauaagacugacuagcccgaugggccucccaacgggcccuccuccccuccuugcaccgagauuaauaaaaaaaaaaaaaaaaaaaaaaaaaaaaaaaaaaaaaaaaaaaaaaaaaaaaaaaaaaaaaaaaugcaucccccccccccccccccccccccccccccccaaaggcucuuuucagagccaccagaauu

SEQ ID NO: 23212 - RNA, 4039 nt, Artificial Sequence
  SARS-CoV-2/Wuhan/WIV05/2019__EPI_ISL_402128 spike protein mRNA gc (1-1273)(N501Y_D614G)
aggagaaagcuuaccauguucguguuccugguccuccugccccuggugagcucccagugcgugaaccucaccacccgcacgcagcugccgcccgccuacaccaacagcuucacccggggcgucuacuaccccgacaagguguuccgcuccagcgugcugcacuccacccaggaccucuuccugcccuucuucagcaacgucacgugguuccacgccauccacguguccgggaccaacggcaccaagcgguucgacaacccggugcugcccuucaacgacggggucuacuucgcgagcaccgagaaguccaacaucauccgcggcuggaucuucgggacgacccucgacagcaagacccagucccugcugaucgugaacaacgccaccaacguggucaucaaggugugcgaguuccaguucugcaacgaccccuuccucggcguguacuaccacaagaacaacaagagcuggauggaguccgaguuccgggucuacagcuccgccaacaacugcacguucgaguacgugagccagcccuuccugauggaccuggagggcaagcaggggaacuucaagaaccuccgcgaguucguguucaagaacaucgacggcuacuucaagaucuacuccaagcacaccccgaucaaccugguccgggaccugccccagggguucagcgcccucgagccccugguggaccugcccaucggcaucaacaucacccgcuuccagacccuccuggcccugcaccgguccuaccucacgccgggggacagcagcuccggcuggaccgcgggcgccgccgccuacuacgugggguaccugcagccccgcaccuuccugcucaaguacaacgagaacggcaccaucacggacgcggucgacugcgcccuggacccccugagcgagaccaagugcacccucaaguccuucaccguggagaaggggaucuaccagacgagcaacuuccgggugcagcccaccgaguccaucguccgcuucccgaacaucaccaaccugugccccuucggcgagguguucaacgccacccgguucgccagcgucuacgccuggaaccgcaagcggaucuccaacugcguggcggacuacagcgugcuguacaacuccgccagcuucuccacguucaagugcuacggcgucagccccaccaagcucaacgaccugugcuucaccaacguguacgccgacuccuucgugauccgcggggacgagguccggcagaucgcccccggccagaccgggaagaucgccgacuacaacuacaagcugccggacgacuucacgggcugcgugaucgcguggaacagcaacaaccucgacuccaaggucgggggcaacuacaacuaccuguaccgccuguuccgcaagagcaaccucaagcccuucgagcgggacaucuccaccgagaucuaccaggccggcagcacccccugcaacgggguggagggcuucaacugcuacuucccccugcaguccuacggguuccagccgaccuacggcgugggguaccagcccuaccggguggucgugcugagcuucgagcuccugcacgcccccgccacggugugcggccccaagaaguccaccaaccuggucaagaacaagugcgugaacuucaacuucaacggccucaccgggaccggcgugcugaccgagagcaacaagaaguuccugccguuccagcaguucgggcgcgacaucgccgacacgaccgacgcgguccgcgacccccagacccuggagauccucgacaucacccccugcagcuucggcgggguguccgugaucacgccgggcaccaacaccagcaaccaggucgccgugcuguaccagggcgugaacugcaccgagguccccguggccauccacgccgaccagcugacgcccaccuggcggguguacuccaccgggagcaacgucuuccagacccgcgccggcugccucaucggggcggagcacgugaacaacuccuacgagugcgacauccccaucggcgccggcaucugcgccagcuaccagacgcagaccaacuccccgcggcgcgcccggagcguggcgucccagagcaucaucgccuacaccaugucccugggggccgagaacagcgucgccuacuccaacaacagcaucgccauccccaccaacuucacgaucuccgugaccaccgagauccugcccgugagcaugaccaagacgagcgucgacugcaccauguacaucugcggcgacuccaccgagugcagcaaccuccugcugcaguacggguccuucugcacccagcucaaccgcgcgcugacgggcaucgccguggagcaggacaagaacacccaggagguguucgcccaggucaagcagaucuacaagacgcccccgaucaaggacuucgggggcuucaacuucagccagauccugcccgaccccuccaagcccagcaagcgguccuucaucgaggaccuccuguucaacaaggugacccuggccgacgccggcuucaucaagcaguacggggacugccucggcgacaucgcggcccgcgaccugaucugcgcccagaaguucaacgggcugaccgugcucccgccccugcugaccgacgagaugaucgcccaguacaccagcgcccuccuggcgggcaccaucacguccggguggaccuucggcgccggcgccgcccugcagauccccuucgcgaugcagauggccuaccgguucaacgggaucggcgucacccagaacgugcucuacgagaaccagaagcugaucgccaaccaguucaacagcgccaucgggaagauccaggacucccugagcuccaccgccagcgcgcucggcaagcugcaggacguggucaaccagaacgcccaggcccugaacacgcucgugaagcagcuguccagcaacuucggggccaucuccagcgugcugaacgacauccucucccgccuggacaaggucgaggccgaggugcagaucgaccggcugaucaccggccgccuccagagccugcagaccuacgugacccagcagcugauccgggcggccgagauccgcgccagcgccaaccucgccgcgaccaagauguccgagugcguccugggccagagcaagcggguggacuucugcgggaagggcuaccaccugauguccuucccccagagcgccccgcacgggguggucuuccuccacgugacguacguccccgcccaggagaagaacuucaccaccgcccccgcgaucugccacgacggcaaggcccacuucccccgcgaggggguguucguguccaacggcacccacugguucgucacgcagcggaacuucuacgagccgcagaucaucaccaccgacaacaccuucgugagcggcaacugcgacguggucaucgggaucgugaacaacacgguguacgacccccugcagcccgagcuggacuccuucaaggaggagcucgacaaguacuucaagaaccacaccagccccgacgucgaccugggcgacaucuccgggaucaacgccagcguggugaacauccagaaggagaucgaccgccugaacgaggucgccaagaaccucaacgagucccugaucgaccugcaggagcucggcaaguacgagcaguacaucaaguggccgugguacaucuggcugggcuucaucgccgggcugaucgcgaucgugauggugaccaucaugcucugcugcaugaccagcugcugcuccugccugaagggcugcugcagcugcggguccugcugcaaguucgacgaggacgacagcgagcccguccugaagggcgugaagcuccacuacacgugaggacuaguuauaagacugacuagcccgaugggccucccaacgggcccuccuccccuccuugcaccgagauuaauaaaaaaaaaaaaaaaaaaaaaaaaaaaaaaaaaaaaaaaaaaaaaaaaaaaaaaaaaaaaaaaaugcaucccccccccccccccccccccccccccccccaaaggcucuuuucagagccaccagaauu

SEQ ID NO: 23213 - RNA, 4033 nt, Artificial Sequence
  SARS-CoV-2/Wuhan/WIV05/2019__EPI_ISL_402128 spike protein mRNA gc (1-1273)(H69del_V70del_D614G)
aggagaaagcuuaccauguucguguuccugguccuccugccccuggugagcucccagugcgugaaccucaccacccgcacgcagcugccgcccgccuacaccaacagcuucacccggggcgucuacuaccccgacaagguguuccgcuccagcgugcugcacuccacccaggaccucuuccugcccuucuucagcaacgucacgugguuccacgccaucuccgggaccaacggcaccaagcgguucgacaacccggugcugcccuucaacgacgggguguacuucgcgagcaccgagaaguccaacaucauccgcggcuggaucuucgggacgacccucgacagcaagacccagucccugcugaucgucaacaacgccaccaacguggugaucaaggucugcgaguuccaguucugcaacgaccccuuccucggcguguacuaccacaagaacaacaagagcuggauggaguccgaguuccggguguacagcuccgccaacaacugcacguucgaguacgucagccagcccuuccugauggaccuggagggcaagcaggggaacuucaagaaccuccgcgaguucguguucaagaacaucgacggcuacuucaagaucuacuccaagcacaccccgaucaaccuggugcgggaccugccccagggguucagcgcccucgagccccuggucgaccugcccaucggcaucaacaucacccgcuuccagacccuccuggcccugcaccgguccuaccucacgccgggggacagcagcuccggcuggaccgcgggcgccgccgccuacuacgugggguaccugcagccccgcaccuuccugcucaaguacaacgagaacggcaccaucacggacgcgguggacugcgcccuggacccccugagcgagaccaagugcacccucaaguccuucaccgucgagaaggggaucuaccagacgagcaacuuccgggugcagcccaccgaguccaucgugcgcuucccgaacaucaccaaccugugccccuucggcgaggucuucaacgccacccgguucgccagcguguacgccuggaaccgcaagcggaucuccaacugcgucgcggacuacagcgugcuguacaacuccgccagcuucuccacguucaagugcuacggcgugagccccaccaagcucaacgaccugugcuucaccaacgucuacgccgacuccuucgugauccgcggggacgaggugcggcagaucgcccccggccagaccgggaagaucgccgacuacaacuacaagcugccggacgacuucacgggcugcgucaucgcguggaacagcaacaaccucgacuccaaggucgggggcaacuacaacuaccuguaccgccuguuccgcaagagcaaccucaagcccuucgagcgggacaucuccaccgagaucuaccaggccggcagcacccccugcaacgggguggagggcuucaacugcuacuucccccugcaguccuacggguuccagccgaccaacggcgugggguaccagcccuaccggguggugguccugagcuucgagcuccugcacgcccccgccacggugugcggccccaagaaguccaccaaccuggugaagaacaagugcgucaacuucaacuucaacggccucaccgggaccggcgugcugaccgagagcaacaagaaguuccugccguuccagcaguucgggcgcgacaucgccgacacgaccgacgcggugcgcgacccccagacccuggagauccucgacaucacccccugcagcuucggcggggucuccgugaucacgccgggcaccaacaccagcaaccagguggccguccuguaccagggcgugaacugcaccgaggugcccgucgccauccacgccgaccagcugacgcccaccuggcggguguacuccaccgggagcaacguguuccagacccgcgccggcugccucaucggggcggagcacgucaacaacuccuacgagugcgacauccccaucggcgccggcaucugcgccagcuaccagacgcagaccaacuccccgcggcgcgcccggagcguggcgucccagagcaucaucgccuacaccaugucccugggggccgagaacagcguggccuacuccaacaacagcaucgccauccccaccaacuucacgaucuccgucaccaccgagauccugcccgugagcaugaccaagacgagcguggacugcaccauguacaucugcggcgacuccaccgagugcagcaaccuccugcugcaguacggguccuucugcacccagcucaaccgcgcgcugacgggcaucgccgucgagcaggacaagaacacccaggagguguucgcccaggugaagcagaucuacaagacgcccccgaucaaggacuucgggggcuucaacuucagccagauccugcccgaccccuccaagcccagcaagcgguccuucaucgaggaccuccuguucaacaaggucacccuggccgacgccggcuucaucaagcaguacggggacugccucggcgacaucgcggcccgcgaccugaucugcgcccagaaguucaacgggcugaccgugcucccgccccugcugaccgacgagaugaucgcccaguacaccagcgcccuccuggcgggcaccaucacguccggguggaccuucggcgccggcgccgcccugcagauccccuucgcgaugcagauggccuaccgguucaacgggaucggcgugacccagaacguccucuacgagaaccagaagcugaucgccaaccaguucaacagcgccaucgggaagauccaggacucccugagcuccaccgccagcgcgcucggcaagcugcaggacguggugaaccagaacgcccaggcccugaacacgcucgucaagcagcuguccagcaacuucggggccaucuccagcgugcugaacgacauccucucccgccuggacaagguggaggccgagguccagaucgaccggcugaucaccggccgccuccagagccugcagaccuacgugacccagcagcugauccgggcggccgagauccgcgccagcgccaaccucgccgcgaccaagauguccgagugcgugcugggccagagcaagcgggucgacuucugcgggaagggcuaccaccugauguccuucccccagagcgccccgcacggggugguguuccuccacgucacguacgugcccgcccaggagaagaacuucaccaccgcccccgcgaucugccacgacggcaaggcccacuucccccgcgagggggucuucguguccaacggcacccacugguucgugacgcagcggaacuucuacgagccgcagaucaucaccaccgacaacaccuucgucagcggcaacugcgacguggugaucgggaucgucaacaacacgguguacgacccccugcagcccgagcuggacuccuucaaggaggagcucgacaaguacuucaagaaccacaccagccccgacguggaccugggcgacaucuccgggaucaacgccagcgucgugaacauccagaaggagaucgaccgccugaacgagguggccaagaaccucaacgagucccugaucgaccugcaggagcucggcaaguacgagcaguacaucaaguggccgugguacaucuggcugggcuucaucgccgggcugaucgcgaucgucauggugaccaucaugcucugcugcaugaccagcugcugcuccugccugaagggcugcugcagcugcggguccugcugcaaguucgacgaggacgacagcgagcccgugcugaagggcgucaagcuccacuacacgugaggacuaguuauaagacugacuagcccgaugggccucccaacgggcccuccuccccuccuugcaccgagauuaauaaaaaaaaaaaaaaaaaaaaaaaaaaaaaaaaaaaaaaaaaaaaaaaaaaaaaaaaaaaaaaaaugcaucccccccccccccccccccccccccccccccaaaggcucuuuucagagccaccagaauu

SEQ ID NO: 23214 - RNA, 4039 nt, Artificial Sequence
  SARS-CoV-2/Wuhan/WIV05/2019__EPI_ISL_402128 spike protein mRNA gc (1-1273)(Y453F_D614G)
aggagaaagcuuaccauguucguguuccugguccuccugccccuggugagcucccagugcgugaaccucaccacccgcacgcagcugccgcccgccuacaccaacagcuucacccggggcgucuacuaccccgacaagguguuccgcuccagcgugcugcacuccacccaggaccucuuccugcccuucuucagcaacgucacgugguuccacgccauccacguguccgggaccaacggcaccaagcgguucgacaacccggugcugcccuucaacgacggggucuacuucgcgagcaccgagaaguccaacaucauccgcggcuggaucuucgggacgacccucgacagcaagacccagucccugcugaucgugaacaacgccaccaacguggucaucaaggugugcgaguuccaguucugcaacgaccccuuccucggcguguacuaccacaagaacaacaagagcuggauggaguccgaguuccgggucuacagcuccgccaacaacugcacguucgaguacgugagccagcccuuccugauggaccuggagggcaagcaggggaacuucaagaaccuccgcgaguucguguucaagaacaucgacggcuacuucaagaucuacuccaagcacaccccgaucaaccugguccgggaccugccccagggguucagcgcccucgagccccugguggaccugcccaucggcaucaacaucacccgcuuccagacccuccuggcccugcaccgguccuaccucacgccgggggacagcagcuccggcuggaccgcgggcgccgccgccuacuacgugggguaccugcagccccgcaccuuccugcucaaguacaacgagaacggcaccaucacggacgcggucgacugcgcccuggacccccugagcgagaccaagugcacccucaaguccuucaccguggagaaggggaucuaccagacgagcaacuuccgggugcagcccaccgaguccaucguccgcuucccgaacaucaccaaccugugccccuucggcgagguguucaacgccacccgguucgccagcgucuacgccuggaaccgcaagcggaucuccaacugcguggcggacuacagcgugcuguacaacuccgccagcuucuccacguucaagugcuacggcgucagccccaccaagcucaacgaccugugcuucaccaacguguacgccgacuccuucgugauccgcggggacgagguccggcagaucgcccccggccagaccgggaagaucgccgacuacaacuacaagcugccggacgacuucacgggcugcgugaucgcguggaacagcaacaaccucgacuccaaggucgggggcaacuacaacuaccuguuccgccuguuccgcaagagcaaccucaagcccuucgagcgggacaucuccaccgagaucuaccaggccggcagcacccccugcaacgggguggagggcuucaacugcuacuucccccugcaguccuacggguuccagccgaccaacggcgugggguaccagcccuaccggguggucgugcugagcuucgagcuccugcacgcccccgccacggugugcggccccaagaaguccaccaaccuggucaagaacaagugcgugaacuucaacuucaacggccucaccgggaccggcgugcugaccgagagcaacaagaaguuccugccguuccagcaguucgggcgcgacaucgccgacacgaccgacgcgguccgcgacccccagacccuggagauccucgacaucacccccugcagcuucggcgggguguccgugaucacgccgggcaccaacaccagcaaccaggucgccgugcuguaccagggcgugaacugcaccgagguccccguggccauccacgccgaccagcugacgcccaccuggcggguguacuccaccgggagcaacgucuuccagacccgcgccggcugccucaucggggcggagcacgugaacaacuccuacgagugcgacauccccaucggcgccggcaucugcgccagcuaccagacgcagaccaacuccccgcggcgcgcccggagcguggcgucccagagcaucaucgccuacaccaugucccugggggccgagaacagcgucgccuacuccaacaacagcaucgccauccccaccaacuucacgaucuccgugaccaccgagauccugcccgugagcaugaccaagacgagcgucgacugcaccauguacaucugcggcgacuccaccgagugcagcaaccuccugcugcaguacggguccuucugcacccagcucaaccgcgcgcugacgggcaucgccguggagcaggacaagaacacccaggagguguucgcccaggucaagcagaucuacaagacgcccccgaucaaggacuucgggggcuucaacuucagccagauccugcccgaccccuccaagcccagcaagcgguccuucaucgaggaccuccuguucaacaaggugacccuggccgacgccggcuucaucaagcaguacggggacugccucggcgacaucgcggcccgcgaccugaucugcgcccagaaguucaacgggcugaccgugcucccgccccugcugaccgacgagaugaucgcccaguacaccagcgcccuccuggcgggcaccaucacguccggguggaccuucggcgccggcgccgcccugcagauccccuucgcgaugcagauggccuaccgguucaacgggaucggcgucacccagaacgugcucuacgagaaccagaagcugaucgccaaccaguucaacagcgccaucgggaagauccaggacucccugagcuccaccgccagcgcgcucggcaagcugcaggacguggucaaccagaacgcccaggcccugaacacgcucgugaagcagcuguccagcaacuucggggccaucuccagcgugcugaacgacauccucucccgccuggacaaggucgaggccgaggugcagaucgaccggcugaucaccggccgccuccagagccugcagaccuacgugacccagcagcugauccgggcggccgagauccgcgccagcgccaaccucgccgcgaccaagauguccgagugcguccugggccagagcaagcggguggacuucugcgggaagggcuaccaccugauguccuucccccagagcgccccgcacgggguggucuuccuccacgugacguacguccccgcccaggagaagaacuucaccaccgcccccgcgaucugccacgacggcaaggcccacuucccccgcgaggggguguucguguccaacggcacccacugguucgucacgcagcggaacuucuacgagccgcagaucaucaccaccgacaacaccuucgugagcggcaacugcgacguggucaucgggaucgugaacaacacgguguacgacccccugcagcccgagcuggacuccuucaaggaggagcucgacaaguacuucaagaaccacaccagccccgacgucgaccugggcgacaucuccgggaucaacgccagcguggugaacauccagaaggagaucgaccgccugaacgaggucgccaagaaccucaacgagucccugaucgaccugcaggagcucggcaaguacgagcaguacaucaaguggccgugguacaucuggcugggcuucaucgccgggcugaucgcgaucgugauggugaccaucaugcucugcugcaugaccagcugcugcuccugccugaagggcugcugcagcugcggguccugcugcaaguucgacgaggacgacagcgagcccguccugaagggcgugaagcuccacuacacgugaggacuaguuauaagacugacuagcccgaugggccucccaacgggcccuccuccccuccuugcaccgagauuaauaaaaaaaaaaaaaaaaaaaaaaaaaaaaaaaaaaaaaaaaaaaaaaaaaaaaaaaaaaaaaaaaugcaucccccccccccccccccccccccccccccccaaaggcucuuuucagagccaccagaauu

SEQ ID NO: 23215 - RNA, 4039 nt, Artificial Sequence
  SARS-CoV-2/Wuhan/WIV05/2019__EPI_ISL_402128 spike protein mRNA gc (1-1273)(D614G_I692V)
aggagaaagcuuaccauguucguguuccugguccuccugccccuggugagcucccagugcgugaaccucaccacccgcacgcagcugccgcccgccuacaccaacagcuucacccggggcgucuacuaccccgacaagguguuccgcuccagcgugcugcacuccacccaggaccucuuccugcccuucuucagcaacgucacgugguuccacgccauccacguguccgggaccaacggcaccaagcgguucgacaacccggugcugcccuucaacgacggggucuacuucgcgagcaccgagaaguccaacaucauccgcggcuggaucuucgggacgacccucgacagcaagacccagucccugcugaucgugaacaacgccaccaacguggucaucaaggugugcgaguuccaguucugcaacgaccccuuccucggcguguacuaccacaagaacaacaagagcuggauggaguccgaguuccgggucuacagcuccgccaacaacugcacguucgaguacgugagccagcccuuccugauggaccuggagggcaagcaggggaacuucaagaaccuccgcgaguucguguucaagaacaucgacggcuacuucaagaucuacuccaagcacaccccgaucaaccugguccgggaccugccccagggguucagcgcccucgagccccugguggaccugcccaucggcaucaacaucacccgcuuccagacccuccuggcccugcaccgguccuaccucacgccgggggacagcagcuccggcuggaccgcgggcgccgccgccuacuacgugggguaccugcagccccgcaccuuccugcucaaguacaacgagaacggcaccaucacggacgcggucgacugcgcccuggacccccugagcgagaccaagugcacccucaaguccuucaccguggagaaggggaucuaccagacgagcaacuuccgggugcagcccaccgaguccaucguccgcuucccgaacaucaccaaccugugccccuucggcgagguguucaacgccacccgguucgccagcgucuacgccuggaaccgcaagcggaucuccaacugcguggcggacuacagcgugcuguacaacuccgccagcuucuccacguucaagugcuacggcgucagccccaccaagcucaacgaccugugcuucaccaacguguacgccgacuccuucgugauccgcggggacgagguccggcagaucgcccccggccagaccgggaagaucgccgacuacaacuacaagcugccggacgacuucacgggcugcgugaucgcguggaacagcaacaaccucgacuccaaggucgggggcaacuacaacuaccuguaccgccuguuccgcaagagcaaccucaagcccuucgagcgggacaucuccaccgagaucuaccaggccggcagcacccccugcaacgggguggagggcuucaacugcuacuucccccugcaguccuacggguuccagccgaccaacggcgugggguaccagcccuaccggguggucgugcugagcuucgagcuccugcacgcccccgccacggugugcggccccaagaaguccaccaaccuggucaagaacaagugcgugaacuucaacuucaacggccucaccgggaccggcgugcugaccgagagcaacaagaaguuccugccguuccagcaguucgggcgcgacaucgccgacacgaccgacgcgguccgcgacccccagacccuggagauccucgacaucacccccugcagcuucggcgggguguccgugaucacgccgggcaccaacaccagcaaccaggucgccgugcuguaccagggcgugaacugcaccgagguccccguggccauccacgccgaccagcugacgcccaccuggcggguguacuccaccgggagcaacgucuuccagacccgcgccggcugccucaucggggcggagcacgugaacaacuccuacgagugcgacauccccaucggcgccggcaucugcgccagcuaccagacgcagaccaacuccccgcggcgcgcccggagcguggcgucccagagcgucaucgccuacaccaugucccugggggccgagaacagcguggccuacuccaacaacagcaucgccauccccaccaacuucacgaucuccgugaccaccgagauccugcccgucagcaugaccaagacgagcguggacugcaccauguacaucugcggcgacuccaccgagugcagcaaccuccugcugcaguacggguccuucugcacccagcucaaccgcgcgcugacgggcaucgccguggagcaggacaagaacacccaggaggucuucgcccaggugaagcagaucuacaagacgcccccgaucaaggacuucgggggcuucaacuucagccagauccugcccgaccccuccaagcccagcaagcgguccuucaucgaggaccuccuguucaacaaggugacccuggccgacgccggcuucaucaagcaguacggggacugccucggcgacaucgcggcccgcgaccugaucugcgcccagaaguucaacgggcugaccguccucccgccccugcugaccgacgagaugaucgcccaguacaccagcgcccuccuggcgggcaccaucacguccggguggaccuucggcgccggcgccgcccugcagauccccuucgcgaugcagauggccuaccgguucaacgggaucggcgugacccagaacgugcucuacgagaaccagaagcugaucgccaaccaguucaacagcgccaucgggaagauccaggacucccugagcuccaccgccagcgcgcucggcaagcugcaggacgucgugaaccagaacgcccaggcccugaacacgcucgugaagcagcuguccagcaacuucggggccaucuccagcguccugaacgacauccucucccgccuggacaagguggaggccgaggugcagaucgaccggcugaucaccggccgccuccagagccugcagaccuacgucacccagcagcugauccgggcggccgagauccgcgccagcgccaaccucgccgcgaccaagauguccgagugcgugcugggccagagcaagcggguggacuucugcgggaagggcuaccaccugauguccuucccccagagcgccccgcacggggucguguuccuccacgucacguacgugcccgcccaggagaagaacuucaccaccgcccccgcgaucugccacgacggcaaggcccacuucccccgcgaggggguguucgucuccaacggcacccacugguucgugacgcagcggaacuucuacgagccgcagaucaucaccaccgacaacaccuucgugagcggcaacugcgacgucgugaucgggaucgugaacaacacggucuacgacccccugcagcccgagcuggacuccuucaaggaggagcucgacaaguacuucaagaaccacaccagccccgacguggaccugggcgacaucuccgggaucaacgccagcguggucaacauccagaaggagaucgaccgccugaacgagguggccaagaaccucaacgagucccugaucgaccugcaggagcucggcaaguacgagcaguacaucaaguggccgugguacaucuggcugggcuucaucgccgggcugaucgcgaucgugauggucaccaucaugcucugcugcaugaccagcugcugcuccugccugaagggcugcugcagcugcggguccugcugcaaguucgacgaggacgacagcgagcccgugcugaagggcgugaagcuccacuacacgugaggacuaguuauaagacugacuagcccgaugggccucccaacgggcccuccuccccuccuugcaccgagauuaauaaaaaaaaaaaaaaaaaaaaaaaaaaaaaaaaaaaaaaaaaaaaaaaaaaaaaaaaaaaaaaaaugcaucccccccccccccccccccccccccccccccaaaggcucuuuucagagccaccagaauu

SEQ ID NO: 23216 - RNA, 4039 nt, Artificial Sequence; identical to SEQ ID NO: 12796
  SARS-CoV-2/Wuhan/WIV05/2019__EPI_ISL_402128 spike protein mRNA gc (1-1273)(D614G_M1229I)

SEQ ID NO: 23217 - RNA, 4033 nt, Artificial Sequence
  SARS-CoV-2/Wuhan/WIV05/2019__EPI_ISL_402128 spike protein mRNA gc (1-1273)(H69del_V70del_A222V_Y453F_S477N_D614G_I692V)
aggagaaagcuuaccauguucguguuccugguccuccugccccuggugagcucccagugcgugaaccucaccacccgcacgcagcugccgcccgccuacaccaacagcuucacccggggcgucuacuaccccgacaagguguuccgcuccagcgugcugcacuccacccaggaccucuuccugcccuucuucagcaacgucacgugguuccacgccaucuccgggaccaacggcaccaagcgguucgacaacccggugcugcccuucaacgacgggguguacuucgcgagcaccgagaaguccaacaucauccgcggcuggaucuucgggacgacccucgacagcaagacccagucccugcugaucgucaacaacgccaccaacguggugaucaaggucugcgaguuccaguucugcaacgaccccuuccucggcguguacuaccacaagaacaacaagagcuggauggaguccgaguuccggguguacagcuccgccaacaacugcacguucgaguacgucagccagcccuuccugauggaccuggagggcaagcaggggaacuucaagaaccuccgcgaguucguguucaagaacaucgacggcuacuucaagaucuacuccaagcacaccccgaucaaccuggugcgggaccugccccagggguucagcguccucgagccccugguggaccugcccaucggcaucaacaucacccgcuuccagacccuccuggcccugcaccgguccuaccucacgccgggggacagcagcuccggcuggaccgccggcgcggccgccuacuacgugggguaccugcagccccgcaccuuccugcucaaguacaacgagaacggcaccaucacggacgccgucgacugcgcgcuggacccccugagcgagaccaagugcacccucaaguccuucaccguggagaaggggaucuaccagacgagcaacuuccgggugcagcccaccgaguccaucguccgcuucccgaacaucaccaaccugugccccuucggcgagguguucaacgccacccgguucgccagcgucuacgccuggaaccgcaagcggaucuccaacugcguggccgacuacagcgugcuguacaacuccgcgagcuucuccacguucaagugcuacggcgucagccccaccaagcucaacgaccugugcuucaccaacguguacgccgacuccuucgugauccgcggggacgagguccggcagaucgcccccggccagaccgggaagaucgccgacuacaacuacaagcugccggacgacuucacgggcugcgugaucgccuggaacagcaacaaccucgacuccaaggucgggggcaacuacaacuaccuguuccgccuguuccgcaagagcaaccucaagcccuucgagcgggacaucuccaccgagaucuaccaggcgggcaacacccccugcaacgggguggagggcuucaacugcuacuucccccugcagagcuacggguuccagccgaccaacggcgugggguaccagcccuaccggguggucgugcuguccuucgagcuccugcacgcccccgccacggugugcggccccaagaaguccaccaaccuggucaagaacaagugcgugaacuucaacuucaacggccucaccgggaccggcgugcugaccgagagcaacaagaaguuccugccguuccagcaguucgggcgcgacaucgccgacacgaccgacgccguccgcgacccccagacccuggagauccucgacaucacccccugcagcuucggcggggugagcgugaucacgccgggcaccaacaccuccaaccaggucgcggugcuguaccagggcgugaacugcaccgagguccccguggccauccacgccgaccagcugacgcccaccuggcggguguacagcaccggguccaacgucuuccagacccgcgccggcugccucaucggggccgagcacgugaacaacagcuacgagugcgacauccccaucggcgcgggcaucugcgccuccuaccagacgcagaccaacagcccgcggcgcgcccgguccguggccagccaguccgucaucgcguacaccaugagccugggggccgagaacuccguggccuacagcaacaacuccaucgccauccccaccaacuucacgaucagcgugaccaccgagauccugcccgucuccaugaccaagacgagcguggacugcaccauguacaucugcggcgacagcaccgagugcuccaaccuccugcugcaguacgggagcuucugcacccagcucaaccgcgcccugacgggcaucgcgguggagcaggacaagaacacccaggaggucuucgcccaggugaagcagaucuacaagacgcccccgaucaaggacuucgggggcuucaacuucucccagauccugcccgaccccagcaagcccuccaagcggagcuucaucgaggaccuccuguucaacaaggugacccuggccgacgccggcuucaucaagcaguacggggacugccucggcgacaucgccgcgcgcgaccugaucugcgcccagaaguucaacgggcugaccguccucccgccccugcugaccgacgagaugaucgcccaguacaccuccgcccuccuggccggcaccaucacgagcggguggaccuucggcgcgggcgccgcccugcagauccccuucgccaugcagauggcguaccgguucaacgggaucggcgugacccagaacgugcucuacgagaaccagaagcugaucgccaaccaguucaacuccgccaucgggaagauccaggacagccuguccagcaccgccuccgcccucggcaagcugcaggacgucgugaaccagaacgcgcaggcccugaacacgcucgugaagcagcugagcuccaacuucggggccaucagcuccguccugaacgacauccucagccgccuggacaagguggaggccgaggugcagaucgaccggcugaucaccggccgccuccagucccugcagaccuacgucacccagcagcugauccgggccgcggagauccgcgccagcgccaaccucgccgccaccaagaugagcgagugcgugcugggccaguccaagcggguggacuucugcgggaagggcuaccaccugaugagcuucccccaguccgcgccgcacggggucguguuccuccacgucacguacgugcccgcccaggagaagaacuucaccaccgcccccgccaucugccacgacggcaaggcgcacuucccccgcgaggggguguucgucagcaacggcacccacugguucgugacgcagcggaacuucuacgagccgcagaucaucaccaccgacaacaccuucguguccggcaacugcgacgucgugaucgggaucgugaacaacacggucuacgacccccugcagcccgagcuggacagcuucaaggaggagcucgacaaguacuucaagaaccacaccucccccgacguggaccugggcgacaucagcgggaucaacgccuccguggucaacauccagaaggagaucgaccgccugaacgagguggccaagaaccucaacgagagccugaucgaccugcaggagcucggcaaguacgagcaguacaucaaguggccgugguacaucuggcugggcuucaucgccgggcugaucgccaucgugauggucaccaucaugcucugcugcaugaccuccugcugcagcugccugaagggcugcugcuccugcgggagcugcugcaaguucgacgaggacgacuccgagcccgugcugaagggcgugaagcuccacuacacgugaggacuaguuauaagacugacuagcccgaugggccucccaacgggcccuccuccccuccuugcaccgagauuaauaaaaaaaaaaaaaaaaaaaaaaaaaaaaaaaaaaaaaaaaaaaaaaaaaaaaaaaaaaaaaaaaugcaucccccccccccccccccccccccccccccccaaaggcucuuuucagagccaccagaauu

SEQ ID NO: 23218 - RNA, 4033 nt, Artificial Sequence
  SARS-CoV-2/Wuhan/WIV05/2019__EPI_ISL_402128 spike protein mRNA gc (1-1273)(H69del_V70del_Y453F_D614G_I692V_M1229I)
aggagaaagcuuaccauguucguguuccugguccuccugccccuggugagcucccagugcgugaaccucaccacccgcacgcagcugccgcccgccuacaccaacagcuucacccggggcgucuacuaccccgacaagguguuccgcuccagcgugcugcacuccacccaggaccucuuccugcccuucuucagcaacgucacgugguuccacgccaucuccgggaccaacggcaccaagcgguucgacaacccggugcugcccuucaacgacgggguguacuucgcgagcaccgagaaguccaacaucauccgcggcuggaucuucgggacgacccucgacagcaagacccagucccugcugaucgucaacaacgccaccaacguggugaucaaggucugcgaguuccaguucugcaacgaccccuuccucggcguguacuaccacaagaacaacaagagcuggauggaguccgaguuccggguguacagcuccgccaacaacugcacguucgaguacgucagccagcccuuccugauggaccuggagggcaagcaggggaacuucaagaaccuccgcgaguucguguucaagaacaucgacggcuacuucaagaucuacuccaagcacaccccgaucaaccuggugcgggaccugccccagggguucagcgcccucgagccccuggucgaccugcccaucggcaucaacaucacccgcuuccagacccuccuggcccugcaccgguccuaccucacgccgggggacagcagcuccggcuggaccgcgggcgccgccgccuacuacgugggguaccugcagccccgcaccuuccugcucaaguacaacgagaacggcaccaucacggacgcgguggacugcgcccuggacccccugagcgagaccaagugcacccucaaguccuucaccgucgagaaggggaucuaccagacgagcaacuuccgggugcagcccaccgaguccaucgugcgcuucccgaacaucaccaaccugugccccuucggcgaggucuucaacgccacccgguucgccagcguguacgccuggaaccgcaagcggaucuccaacugcgucgcggacuacagcgugcuguacaacuccgccagcuucuccacguucaagugcuacggcgugagccccaccaagcucaacgaccugugcuucaccaacgucuacgccgacuccuucgugauccgcggggacgaggugcggcagaucgcccccggccagaccgggaagaucgccgacuacaacuacaagcugccggacgacuucacgggcugcgucaucgcguggaacagcaacaaccucgacuccaaggucgggggcaacuacaacuaccuguuccgccuguuccgcaagagcaaccucaagcccuucgagcgggacaucuccaccgagaucuaccaggccggcagcacccccugcaacgggguggagggcuucaacugcuacuucccccugcaguccuacggguuccagccgaccaacggcgugggguaccagcccuaccggguggugguccugagcuucgagcuccugcacgcccccgccacggugugcggccccaagaaguccaccaaccuggugaagaacaagugcgucaacuucaacuucaacggccucaccgggaccggcgugcugaccgagagcaacaagaaguuccugccguuccagcaguucgggcgcgacaucgccgacacgaccgacgcggugcgcgacccccagacccuggagauccucgacaucacccccugcagcuucggcggggucuccgugaucacgccgggcaccaacaccagcaaccagguggccguccuguaccagggcgugaacugcaccgaggugcccgucgccauccacgccgaccagcugacgcccaccuggcggguguacuccaccgggagcaacguguuccagacccgcgccggcugccucaucggggcggagcacgucaacaacuccuacgagugcgacauccccaucggcgccggcaucugcgccagcuaccagacgcagaccaacuccccgcggcgcgcccggagcguggcgucccagagcgugaucgccuacaccaugucccugggggccgagaacagcgucgccuacuccaacaacagcaucgccauccccaccaacuucacgaucuccgugaccaccgagauccugcccgugagcaugaccaagacgagcgucgacugcaccauguacaucugcggcgacuccaccgagugcagcaaccuccugcugcaguacggguccuucugcacccagcucaaccgcgcgcugacgggcaucgccguggagcaggacaagaacacccaggagguguucgcccaggucaagcagaucuacaagacgcccccgaucaaggacuucgggggcuucaacuucagccagauccugcccgaccccuccaagcccagcaagcgguccuucaucgaggaccuccuguucaacaaggugacccuggccgacgccggcuucaucaagcaguacggggacugccucggcgacaucgcggcccgcgaccugaucugcgcccagaaguucaacgggcugaccgugcucccgccccugcugaccgacgagaugaucgcccaguacaccagcgcccuccuggcgggcaccaucacguccggguggaccuucggcgccggcgccgcccugcagauccccuucgcgaugcagauggccuaccgguucaacgggaucggcgucacccagaacgugcucuacgagaaccagaagcugaucgccaaccaguucaacagcgccaucgggaagauccaggacucccugagcuccaccgccagcgcgcucggcaagcugcaggacguggucaaccagaacgcccaggcccugaacacgcucgugaagcagcuguccagcaacuucggggccaucuccagcgugcugaacgacauccucucccgccuggacaaggucgaggccgaggugcagaucgaccggcugaucaccggccgccuccagagccugcagaccuacgugacccagcagcugauccgggcggccgagauccgcgccagcgccaaccucgccgcgaccaagauguccgagugcguccugggccagagcaagcggguggacuucugcgggaagggcuaccaccugauguccuucccccagagcgccccgcacgggguggucuuccuccacgugacguacguccccgcccaggagaagaacuucaccaccgcccccgcgaucugccacgacggcaaggcccacuucccccgcgaggggguguucguguccaacggcacccacugguucgucacgcagcggaacuucuacgagccgcagaucaucaccaccgacaacaccuucgugagcggcaacugcgacguggucaucgggaucgugaacaacacgguguacgacccccugcagcccgagcuggacuccuucaaggaggagcucgacaaguacuucaagaaccacaccagccccgacgucgaccugggcgacaucuccgggaucaacgccagcguggugaacauccagaaggagaucgaccgccugaacgaggucgccaagaaccucaacgagucccugaucgaccugcaggagcucggcaaguacgagcaguacaucaaguggccgugguacaucuggcugggcuucaucgccgggcugaucgcgaucgugaucgugaccaucaugcucugcugcaugaccagcugcugcuccugccugaagggcugcugcagcugcggguccugcugcaaguucgacgaggacgacagcgagcccguccugaagggcgugaagcuccacuacacgugaggacuaguuauaagacugacuagcccgaugggccucccaacgggcccuccuccccuccuugcaccgagauuaauaaaaaaaaaaaaaaaaaaaaaaaaaaaaaaaaaaaaaaaaaaaaaaaaaaaaaaaaaaaaaaaaugcaucccccccccccccccccccccccccccccccaaaggcucuuuucagagccaccagaauu

SEQ ID NO: 23219 - RNA, 4030 nt, Artificial Sequence
  SARS-CoV-2/Wuhan/WIV05/2019__EPI_ISL_402128 spike protein mRNA gc (1-1273)(H69del_V70del_Y144del_N501Y_A570D_D614G_P681H_T716I_S982 A_D1118H)
aggagaaagcuuaccauguucguguuccugguccuccugccccuggugagcucccagugcgugaaccucaccacccgcacgcagcugccgcccgccuacaccaacagcuucacccggggcgucuacuaccccgacaagguguuccgcuccagcgugcugcacuccacccaggaccucuuccugcccuucuucagcaacgucacgugguuccacgccaucuccgggaccaacggcaccaagcgguucgacaacccggugcugcccuucaacgacgggguguacuucgcgagcaccgagaaguccaacaucauccgcggcuggaucuucgggacgacccucgacagcaagacccagucccugcugaucgucaacaacgccaccaacguggugaucaaggucugcgaguuccaguucugcaacgaccccuuccucggcguguaccacaagaacaacaagagcuggauggaguccgaguuccggguguacagcuccgccaacaacugcacguucgaguacgucagccagcccuuccugauggaccuggagggcaagcaggggaacuucaagaaccuccgcgaguucguguucaagaacaucgacggcuacuucaagaucuacuccaagcacaccccgaucaaccuggugcgggaccugccccagggguucagcgcccucgagccccuggucgaccugcccaucggcaucaacaucacccgcuuccagacccuccuggcccugcaccgguccuaccucacgccgggggacagcagcuccggcuggaccgcgggcgccgccgccuacuacgugggguaccugcagccccgcaccuuccugcucaaguacaacgagaacggcaccaucacggacgcgguggacugcgcccuggacccccugagcgagaccaagugcacccucaaguccuucaccgucgagaaggggaucuaccagacgagcaacuuccgggugcagcccaccgaguccaucgugcgcuucccgaacaucaccaaccugugccccuucggcgaggucuucaacgccacccgguucgccagcguguacgccuggaaccgcaagcggaucuccaacugcgucgcggacuacagcgugcuguacaacuccgccagcuucuccacguucaagugcuacggcgugagccccaccaagcucaacgaccugugcuucaccaacgucuacgccgacuccuucgugauccgcggggacgaggugcggcagaucgcccccggccagaccgggaagaucgccgacuacaacuacaagcugccggacgacuucacgggcugcgucaucgcguggaacagcaacaaccucgacuccaaggucgggggcaacuacaacuaccuguaccgccuguuccgcaagagcaaccucaagcccuucgagcgggacaucuccaccgagaucuaccaggccggcagcacccccugcaacgggguggagggcuucaacugcuacuucccccugcaguccuacggguuccagccgaccuacggcgugggguaccagcccuaccggguggugguccugagcuucgagcuccugcacgcccccgccacggugugcggccccaagaaguccaccaaccuggugaagaacaagugcgucaacuucaacuucaacggccucaccgggaccggcgugcugaccgagagcaacaagaaguuccugccguuccagcaguucgggcgcgacaucgacgacacgaccgacgccgugcgcgacccccagacccuggagauccucgacaucacccccugcagcuucggcggggucuccgugaucacgccgggcaccaacaccagcaaccagguggcgguccuguaccagggcgugaacugcaccgaggugcccgucgccauccacgccgaccagcugacgcccaccuggcggguguacuccaccgggagcaacguguuccagacccgcgccggcugccucaucggggccgagcacgucaacaacuccuacgagugcgacauccccaucggcgcgggcaucugcgccagcuaccagacgcagaccaacucccaccggcgcgcccggagcguggccucccagagcaucaucgcguacaccaugucccugggggccgagaacagcguggccuacuccaacaacagcaucgccaucccgaucaacuucaccaucuccgucacgaccgagauccugcccgugagcaugaccaagaccagcguggacugcacgauguacaucugcggcgacuccaccgagugcagcaaccuccugcugcaguacggguccuucugcacccagcucaaccgcgcccugaccggcaucgcggucgagcaggacaagaacacgcaggagguguucgcccaggugaagcagaucuacaagaccccgcccaucaaggacuucgggggcuucaacuucagccagauccugcccgaccccuccaagcccagcaagcgguccuucaucgaggaccuccuguucaacaaggucacccuggccgacgccggcuucaucaagcaguacggggacugccucggcgacaucgccgcgcgcgaccugaucugcgcccagaaguucaacgggcugaccgugcugcccccgcuccugacggacgagaugaucgcccaguacaccagcgcccuccuggccggcaccaucaccuccggguggacguucggcgcgggcgccgcccugcagauccccuucgccaugcagauggcguaccgguucaacgggaucggcgugacccagaacguccucuacgagaaccagaagcugaucgccaaccaguucaacagcgccaucgggaagauccaggacucccugagcuccaccgccagcgcccucggcaagcugcaggacguggugaaccagaacgcgcaggcccugaacacccucgucaagcagcuguccagcaacuucggggccaucuccagcgugcugaacgacauccucgcccgccuggacaagguggaggccgagguccagaucgaccggcugaucacgggccgccuccagucccugcagaccuacgugacccagcagcugauccgggcggccgagauccgcgccagcgccaaccucgccgcgaccaagaugagcgagugcgugcugggccaguccaagcgggucgacuucugcgggaagggcuaccaccugaugagcuucccccaguccgcgccccacggggugguguuccuccacgucaccuacgugccggcccaggagaagaacuucacgaccgcccccgccaucugccacgacggcaaggcccacuucccccgcgagggggucuucgugagcaacggcacccacugguucgugacccagcggaacuucuacgagccccagaucaucacgacccacaacaccuucgucuccggcaacugcgacguggugaucgggaucgucaacaacaccguguacgacccgcugcagcccgagcuggacagcuucaaggaggagcucgacaaguacuucaagaaccacacgucccccgacguggaccugggcgacaucagcgggaucaacgccuccgucgugaacauccagaaggagaucgaccgccugaacgagguggccaagaaccucaacgagagccugaucgaccugcaggagcucggcaaguacgagcaguacaucaaguggcccugguacaucuggcugggcuucaucgccgggcugaucgcgaucgucauggugaccaucaugcucugcugcaugaccuccugcugcagcugccugaagggcugcugcuccugcgggagcugcugcaaguucgacgaggacgacuccgagccggugcugaagggcgucaagcuccacuacaccugaggacuaguuauaagacugacuagcccgaugggccucccaacgggcccuccuccccuccuugcaccgagauuaauaaaaaaaaaaaaaaaaaaaaaaaaaaaaaaaaaaaaaaaaaaaaaaaaaaaaaaaaaaaaaaaaugcaucccccccccccccccccccccccccccccccaaaggcucuuuucagagccaccagaauu

SEQ ID NO: 23220 - RNA, 4039 nt, Artificial Sequence
  SARS-CoV-2/Wuhan/WIV05/2019__EPI_ISL_402128 spike protein mRNA gc (1-1273)(K417N_E484K_N501Y_D614G)
aggagaaagcuuaccauguucguguuccugguccuccugccccuggugagcucccagugcgugaaccucaccacccgcacgcagcugccgcccgccuacaccaacagcuucacccggggcgucuacuaccccgacaagguguuccgcuccagcgugcugcacuccacccaggaccucuuccugcccuucuucagcaacgucacgugguuccacgccauccacguguccgggaccaacggcaccaagcgguucgacaacccggugcugcccuucaacgacggggucuacuucgcgagcaccgagaaguccaacaucauccgcggcuggaucuucgggacgacccucgacagcaagacccagucccugcugaucgugaacaacgccaccaacguggucaucaaggugugcgaguuccaguucugcaacgaccccuuccucggcguguacuaccacaagaacaacaagagcuggauggaguccgaguuccgggucuacagcuccgccaacaacugcacguucgaguacgugagccagcccuuccugauggaccuggagggcaagcaggggaacuucaagaaccuccgcgaguucguguucaagaacaucgacggcuacuucaagaucuacuccaagcacaccccgaucaaccugguccgggaccugccccagggguucagcgcccucgagccccugguggaccugcccaucggcaucaacaucacccgcuuccagacccuccuggcccugcaccgguccuaccucacgccgggggacagcagcuccggcuggaccgcgggcgccgccgccuacuacgugggguaccugcagccccgcaccuuccugcucaaguacaacgagaacggcaccaucacggacgcggucgacugcgcccuggacccccugagcgagaccaagugcacccucaaguccuucaccguggagaaggggaucuaccagacgagcaacuuccgggugcagcccaccgaguccaucguccgcuucccgaacaucaccaaccugugccccuucggcgagguguucaacgccacccgguucgccagcgucuacgccuggaaccgcaagcggaucuccaacugcguggcggacuacagcgugcuguacaacuccgccagcuucuccacguucaagugcuacggcgucagccccaccaagcucaacgaccugugcuucaccaacguguacgccgacuccuucgugauccgcggggacgagguccggcagaucgcccccggccagaccgggaacaucgccgacuacaacuacaagcugccggacgacuucacgggcugcgugaucgcguggaacagcaacaaccucgacuccaaggucgggggcaacuacaacuaccuguaccgccuguuccgcaagagcaaccucaagcccuucgagcgggacaucuccaccgagaucuaccaggccggcagcacccccugcaacggggugaagggcuucaacugcuacuucccccugcaguccuacggguuccagccgaccuacggcgugggguaccagcccuaccggguggucgugcugagcuucgagcuccugcacgcccccgccacggugugcggccccaagaaguccaccaaccuggucaagaacaagugcgugaacuucaacuucaacggccucaccgggaccggcgugcugaccgagagcaacaagaaguuccugccguuccagcaguucgggcgcgacaucgccgacacgaccgacgcgguccgcgacccccagacccuggagauccucgacaucacccccugcagcuucggcgggguguccgugaucacgccgggcaccaacaccagcaaccaggucgccgugcuguaccagggcgugaacugcaccgagguccccguggccauccacgccgaccagcugacgcccaccuggcggguguacuccaccgggagcaacgucuuccagacccgcgccggcugccucaucggggcggagcacgugaacaacuccuacgagugcgacauccccaucggcgccggcaucugcgccagcuaccagacgcagaccaacuccccgcggcgcgcccggagcguggcgucccagagcaucaucgccuacaccaugucccugggggccgagaacagcgucgccuacuccaacaacagcaucgccauccccaccaacuucacgaucuccgugaccaccgagauccugcccgugagcaugaccaagacgagcgucgacugcaccauguacaucugcggcgacuccaccgagugcagcaaccuccugcugcaguacggguccuucugcacccagcucaaccgcgcgcugacgggcaucgccguggagcaggacaagaacacccaggagguguucgcccaggucaagcagaucuacaagacgcccccgaucaaggacuucgggggcuucaacuucagccagauccugcccgaccccuccaagcccagcaagcgguccuucaucgaggaccuccuguucaacaaggugacccuggccgacgccggcuucaucaagcaguacggggacugccucggcgacaucgcggcccgcgaccugaucugcgcccagaaguucaacgggcugaccgugcucccgccccugcugaccgacgagaugaucgcccaguacaccagcgcccuccuggcgggcaccaucacguccggguggaccuucggcgccggcgccgcccugcagauccccuucgcgaugcagauggccuaccgguucaacgggaucggcgucacccagaacgugcucuacgagaaccagaagcugaucgccaaccaguucaacagcgccaucgggaagauccaggacucccugagcuccaccgccagcgcgcucggcaagcugcaggacguggucaaccagaacgcccaggcccugaacacgcucgugaagcagcuguccagcaacuucggggccaucuccagcgugcugaacgacauccucucccgccuggacaaggucgaggccgaggugcagaucgaccggcugaucaccggccgccuccagagccugcagaccuacgugacccagcagcugauccgggcggccgagauccgcgccagcgccaaccucgccgcgaccaagauguccgagugcguccugggccagagcaagcggguggacuucugcgggaagggcuaccaccugauguccuucccccagagcgccccgcacgggguggucuuccuccacgugacguacguccccgcccaggagaagaacuucaccaccgcccccgcgaucugccacgacggcaaggcccacuucccccgcgaggggguguucguguccaacggcacccacugguucgucacgcagcggaacuucuacgagccgcagaucaucaccaccgacaacaccuucgugagcggcaacugcgacguggucaucgggaucgugaacaacacgguguacgacccccugcagcccgagcuggacuccuucaaggaggagcucgacaaguacuucaagaaccacaccagccccgacgucgaccugggcgacaucuccgggaucaacgccagcguggugaacauccagaaggagaucgaccgccugaacgaggucgccaagaaccucaacgagucccugaucgaccugcaggagcucggcaaguacgagcaguacaucaaguggccgugguacaucuggcugggcuucaucgccgggcugaucgcgaucgugauggugaccaucaugcucugcugcaugaccagcugcugcuccugccugaagggcugcugcagcugcggguccugcugcaaguucgacgaggacgacagcgagcccguccugaagggcgugaagcuccacuacacgugaggacuaguuauaagacugacuagcccgaugggccucccaacgggcccuccuccccuccuugcaccgagauuaauaaaaaaaaaaaaaaaaaaaaaaaaaaaaaaaaaaaaaaaaaaaaaaaaaaaaaaaaaaaaaaaaugcaucccccccccccccccccccccccccccccccaaaggcucuuuucagagccaccagaauu

SEQ ID NO: 23221 - RNA, 4030 nt, Artificial Sequence
  SARS-CoV-2/Wuhan/WIV05/2019__EPI_ISL_402128 spike protein mRNA gc (1-1273)(L18F_D80A_D215G_L242del_A243del_L244del_R246I_K417N_E484 K_N501Y_D614G_A701V)
aggagaaagcuuaccauguucguguuccugguccuccugccccuggugagcucccagugcgugaacuucaccacccgcacgcagcucccgcccgccuacaccaacagcuucacccggggcgucuacuaccccgacaagguguuccgcuccagcgugcugcacuccacccaggaccuguuccuccccuucuucagcaacgucacgugguuccacgccauccacguguccgggaccaacggcaccaagcgguucgcgaacccggugcugcccuucaacgacggggucuacuucgccagcaccgagaaguccaacaucauccgcggcuggaucuucgggacgacccuggacagcaagacccagucccuccugaucgugaacaacgccaccaacguggucaucaaggugugcgaguuccaguucugcaacgaccccuuccugggcguguacuaccacaagaacaacaagagcuggauggaguccgaguuccgggucuacagcuccgccaacaacugcacguucgaguacgugagccagcccuuccucauggaccuggagggcaagcaggggaacuucaagaaccugcgcgaguucguguucaagaacaucgacggcuacuucaagaucuacuccaagcacaccccgaucaaccucguccgggggcugccccagggcuucagcgcccuggagccccucguggaccugcccaucgggaucaacaucacccgcuuccagacccugcacaucuccuaccucacgccgggcgacagcagcuccggcuggaccgcgggggccgccgccuacuacgugggcuaccugcagccccggaccuuccugcucaaguacaacgagaacgggaccaucacggacgcggucgacugcgcccuggacccccugagcgagaccaagugcacccucaaguccuucaccguggagaagggcaucuaccagacgagcaacuuccgcgugcagcccaccgaguccaucguccgguucccgaacaucaccaaccugugccccuucggcgagguguucaacgccacccgcuucgccagcgucuacgccuggaaccggaagcgcaucuccaacugcguggcggacuacagcgugcuguacaacuccgccagcuucuccacguucaagugcuacggggucagccccaccaagcucaacgaccugugcuucaccaacguguacgccgacuccuucgugauccggggcgacgagguccgccagaucgcccccgggcagaccggcaacaucgccgacuacaacuacaagcugccggacgacuucacggggugcgugaucgcguggaacagcaacaaccucgacuccaaggugggcggcaacuacaacuaccuguaccggcuguuccgcaagagcaaccucaagcccuucgagcgggacaucuccaccgagaucuaccaggccgggagcacccccugcaacggcgucaagggguucaacugcuacuucccccugcaguccuacggcuuccagccgaccuacggggugggcuaccagcccuaccgcguggucgugcugagcuucgagcuccugcacgcccccgccacggugugcggccccaagaaguccaccaaccuggucaagaacaagugcgugaacuucaacuucaacgggcucaccggcaccggggugcugaccgagagcaacaagaaguuccugccguuccagcaguucggccgggacaucgccgacacgaccgacgcgguccgcgacccccagacccucgagauccuggacaucacccccugcagcuucgggggcguguccgugaucacgccgggcaccaacaccagcaaccaggucgccgugcuguaccagggggugaacugcaccgagguccccguggccauccacgccgaccagcugacgcccaccuggcgcguguacuccaccggcagcaacgucuuccagacccgggccgggugccucaucggcgcggagcacgugaacaacuccuacgagugcgacauccccaucggcgccgggaucugcgccagcuaccagacgcagaccaacuccccgcgccgggcccgcagcguggcgucccagagcaucaucgccuacaccaugucccugggcgucgagaacagcguggccuacuccaacaacagcaucgccauccccaccaacuucacgaucuccgugaccaccgagauccugcccgucagcaugaccaagacgagcguggacugcaccauguacaucugcggggacuccaccgagugcagcaaccuccugcugcaguacggcuccuucugcacccagcucaaccgggcccugacggggaucgcgguggagcaggacaagaacacccaggaggucuucgcccaggugaagcagaucuacaagacgcccccgaucaaggacuucggcggcuucaacuucagccagauccugcccgaccccuccaagcccagcaagcgcuccuucaucgaggaccuccuguucaacaaggugacccuggccgacgccggguucaucaagcaguacggcgacugccucggggacaucgccgcgcgggaccugaucugcgcccagaaguucaacggccugaccguccucccgccccugcugaccgacgagaugaucgcccaguacaccagcgcccuccuggccgggaccaucacguccggcuggaccuucggcgcgggggccgcccugcagauccccuucgccaugcagauggcguaccgcuucaacggcaucggggugacccagaacgugcucuacgagaaccagaagcugaucgccaaccaguucaacagcgccaucggcaagauccaggacucccugagcuccaccgccagcgcccucgggaagcugcaggacgucgugaaccagaacgcgcaggcccugaacacgcucgugaagcagcuguccagcaacuucggcgccaucuccagcguccugaacgacauccucucccggcuggacaagguggaggccgaggugcagaucgaccgccugaucaccggccggcuccagagccugcagaccuacgucacccagcagcugauccgcgccgcggagauccgggccagcgccaaccucgccgccaccaagauguccgagugcgugcuggggcagagcaagcgcguggacuucugcggcaagggguaccaccugauguccuucccccagagcgcgccgcacggcgucguguuccuccacgucacguacgugcccgcccaggagaagaacuucaccaccgcccccgccaucugccacgacgggaaggcgcacuucccccgggagggcguguucgucuccaacggcacccacugguucgugacgcagcgcaacuucuacgagccgcagaucaucaccaccgacaacaccuucgugagcgggaacugcgacgucgugaucggcaucgugaacaacacggucuacgacccccugcagcccgagcuggacuccuucaaggaggagcucgacaaguacuucaagaaccacaccagccccgacguggaccugggggacaucuccggcaucaacgccagcguggucaacauccagaaggagaucgaccggcugaacgagguggccaagaaccucaacgagucccugaucgaccugcaggagcucggcaaguacgagcaguacaucaaguggccgugguacaucuggcugggguucaucgccggccugaucgccaucgugauggucaccaucaugcucugcugcaugaccagcugcugcuccugccugaaggggugcugcagcugcggcuccugcugcaaguucgacgaggacgacagcgagcccgugcugaagggggugaagcuccacuacacgugaggacuaguuauaagacugacuagcccgaugggccucccaacgggcccuccuccccuccuugcaccgagauuaauaaaaaaaaaaaaaaaaaaaaaaaaaaaaaaaaaaaaaaaaaaaaaaaaaaaaaaaaaaaaaaaaugcaucccccccccccccccccccccccccccccccaaaggcucuuuucagagccaccagaauu

SEQ ID NO: 23222 - RNA, 4039 nt, Artificial Sequence
  SARS-CoV-2/Wuhan/WIV05/2019__EPI_ISL_402128 spike protein mRNA gc (1-1273)(E484K_D614G)
aggagaaagcuuaccauguucguguuccugguccuccugccccuggugagcucccagugcgugaaccucaccacccgcacgcagcugccgcccgccuacaccaacagcuucacccggggcgucuacuaccccgacaagguguuccgcuccagcgugcugcacuccacccaggaccucuuccugcccuucuucagcaacgucacgugguuccacgccauccacguguccgggaccaacggcaccaagcgguucgacaacccggugcugcccuucaacgacggggucuacuucgcgagcaccgagaaguccaacaucauccgcggcuggaucuucgggacgacccucgacagcaagacccagucccugcugaucgugaacaacgccaccaacguggucaucaaggugugcgaguuccaguucugcaacgaccccuuccucggcguguacuaccacaagaacaacaagagcuggauggaguccgaguuccgggucuacagcuccgccaacaacugcacguucgaguacgugagccagcccuuccugauggaccuggagggcaagcaggggaacuucaagaaccuccgcgaguucguguucaagaacaucgacggcuacuucaagaucuacuccaagcacaccccgaucaaccugguccgggaccugccccagggguucagcgcccucgagccccugguggaccugcccaucggcaucaacaucacccgcuuccagacccuccuggcccugcaccgguccuaccucacgccgggggacagcagcuccggcuggaccgcgggcgccgccgccuacuacgugggguaccugcagccccgcaccuuccugcucaaguacaacgagaacggcaccaucacggacgcggucgacugcgcccuggacccccugagcgagaccaagugcacccucaaguccuucaccguggagaaggggaucuaccagacgagcaacuuccgggugcagcccaccgaguccaucguccgcuucccgaacaucaccaaccugugccccuucggcgagguguucaacgccacccgguucgccagcgucuacgccuggaaccgcaagcggaucuccaacugcguggcggacuacagcgugcuguacaacuccgccagcuucuccacguucaagugcuacggcgucagccccaccaagcucaacgaccugugcuucaccaacguguacgccgacuccuucgugauccgcggggacgagguccggcagaucgcccccggccagaccgggaagaucgccgacuacaacuacaagcugccggacgacuucacgggcugcgugaucgcguggaacagcaacaaccucgacuccaaggucgggggcaacuacaacuaccuguaccgccuguuccgcaagagcaaccucaagcccuucgagcgggacaucuccaccgagaucuaccaggccggcagcacccccugcaacggggugaagggcuucaacugcuacuucccccugcaguccuacggguuccagccgaccaacggcgugggguaccagcccuaccggguggucgugcugagcuucgagcuccugcacgcccccgccacggugugcggccccaagaaguccaccaaccuggucaagaacaagugcgugaacuucaacuucaacggccucaccgggaccggcgugcugaccgagagcaacaagaaguuccugccguuccagcaguucgggcgcgacaucgccgacacgaccgacgcgguccgcgacccccagacccuggagauccucgacaucacccccugcagcuucggcgggguguccgugaucacgccgggcaccaacaccagcaaccaggucgccgugcuguaccagggcgugaacugcaccgagguccccguggccauccacgccgaccagcugacgcccaccuggcggguguacuccaccgggagcaacgucuuccagacccgcgccggcugccucaucggggcggagcacgugaacaacuccuacgagugcgacauccccaucggcgccggcaucugcgccagcuaccagacgcagaccaacuccccgcggcgcgcccggagcguggcgucccagagcaucaucgccuacaccaugucccugggggccgagaacagcgucgccuacuccaacaacagcaucgccauccccaccaacuucacgaucuccgugaccaccgagauccugcccgugagcaugaccaagacgagcgucgacugcaccauguacaucugcggcgacuccaccgagugcagcaaccuccugcugcaguacggguccuucugcacccagcucaaccgcgcgcugacgggcaucgccguggagcaggacaagaacacccaggagguguucgcccaggucaagcagaucuacaagacgcccccgaucaaggacuucgggggcuucaacuucagccagauccugcccgaccccuccaagcccagcaagcgguccuucaucgaggaccuccuguucaacaaggugacccuggccgacgccggcuucaucaagcaguacggggacugccucggcgacaucgcggcccgcgaccugaucugcgcccagaaguucaacgggcugaccgugcucccgccccugcugaccgacgagaugaucgcccaguacaccagcgcccuccuggcgggcaccaucacguccggguggaccuucggcgccggcgccgcccugcagauccccuucgcgaugcagauggccuaccgguucaacgggaucggcgucacccagaacgugcucuacgagaaccagaagcugaucgccaaccaguucaacagcgccaucgggaagauccaggacucccugagcuccaccgccagcgcgcucggcaagcugcaggacguggucaaccagaacgcccaggcccugaacacgcucgugaagcagcuguccagcaacuucggggccaucuccagcgugcugaacgacauccucucccgccuggacaaggucgaggccgaggugcagaucgaccggcugaucaccggccgccuccagagccugcagaccuacgugacccagcagcugauccgggcggccgagauccgcgccagcgccaaccucgccgcgaccaagauguccgagugcguccugggccagagcaagcggguggacuucugcgggaagggcuaccaccugauguccuucccccagagcgccccgcacgggguggucuuccuccacgugacguacguccccgcccaggagaagaacuucaccaccgcccccgcgaucugccacgacggcaaggcccacuucccccgcgaggggguguucguguccaacggcacccacugguucgucacgcagcggaacuucuacgagccgcagaucaucaccaccgacaacaccuucgugagcggcaacugcgacguggucaucgggaucgugaacaacacgguguacgacccccugcagcccgagcuggacuccuucaaggaggagcucgacaaguacuucaagaaccacaccagccccgacgucgaccugggcgacaucuccgggaucaacgccagcguggugaacauccagaaggagaucgaccgccugaacgaggucgccaagaaccucaacgagucccugaucgaccugcaggagcucggcaaguacgagcaguacaucaaguggccgugguacaucuggcugggcuucaucgccgggcugaucgcgaucgugauggugaccaucaugcucugcugcaugaccagcugcugcuccugccugaagggcugcugcagcugcggguccugcugcaaguucgacgaggacgacagcgagcccguccugaagggcgugaagcuccacuacacgugaggacuaguuauaagacugacuagcccgaugggccucccaacgggcccuccuccccuccuugcaccgagauuaauaaaaaaaaaaaaaaaaaaaaaaaaaaaaaaaaaaaaaaaaaaaaaaaaaaaaaaaaaaaaaaaaugcaucccccccccccccccccccccccccccccccaaaggcucuuuucagagccaccagaauu

SEQ ID NO: 23223 - RNA, 4039 nt, Artificial Sequence
  SARS-CoV-2/Wuhan/WIV05/2019__EPI_ISL_402128 spike protein mRNA gc (1-1273)(L18F_T20N_P26S_D138Y_R190S_K417T_E484K_N501Y_D614G_H655Y _T1027I)
aggagaaagcuuaccauguucguguuccugguccuccugccccuggugagcucccagugcgugaacuucaccaaccgcacccagcucccgagcgccuacacgaacuccuucacccggggcgucuacuaccccgacaagguguuccgcagcuccgugcugcacagcacccaggaccuguuccuccccuucuucuccaacgucaccugguuccacgccauccacgugagcgggacgaacggcaccaagcgguucgacaaccccgugcugccguucaacgacggggucuacuucgcguccaccgagaaguccaacaucauccgcggcuggaucuucgggaccacgcuggacuccaagacccagagccuccugaucgugaacaacgccaccaacguggucaucaaggugugcgaguuccaguucugcaacuaccccuuccugggcguguacuaccacaagaacaacaaguccuggauggagagcgaguuccgggucuacuccagcgccaacaacugcaccuucgaguacgugucccagcccuuccucauggaccuggagggcaagcaggggaacuucaagaaccugagcgaguucguguucaagaacaucgacggcuacuucaagaucuacuccaagcacacgcccaucaaccucguccgcgaccugccgcagggguucagcgcccuggagccccucguggaccugcccaucggcaucaacaucacccgguuccagacccugcucgcccugcaccgcagcuaccugacccccggggacuccagcuccggcuggacggcgggcgccgccgccuacuacgugggguaccuccagccgcggaccuuccugcugaaguacaacgagaacggcaccaucaccgacgcggucgacugcgcccucgacccccugagcgagacgaagugcacccugaaguccuucaccguggagaaggggaucuaccagaccagcaacuuccgcgugcagcccacggaguccaucguccgguuccccaacaucaccaaccucugcccguucggcgagguguucaacgccacccgcuucgccagcgucuacgccuggaaccggaagcgcaucuccaacugcguggcggacuacagcgugcuguacaacuccgccagcuucuccaccuucaagugcuacggcgucagccccacgaagcugaacgaccucugcuucaccaacguguacgccgacuccuucgugauccgcggggacgagguccggcagaucgcccccggccagaccgggaccaucgccgacuacaacuacaagcugcccgacgacuucacgggcugcgugaucgcguggaacagcaacaaccuggacuccaaggucgggggcaacuacaacuaccucuaccggcuguuccgcaagagcaaccugaagccguucgagcgggacaucuccaccgagaucuaccaggccggcagcacccccugcaacggggugaagggcuucaacugcuacuucccccuccagagcuacggguuccagcccaccuacggcgugggguaccagccguaccgcguggucgugcuguccuucgagcugcuccacgcccccgccacggugugcggccccaagaaguccaccaaccuggucaagaacaagugcgugaacuucaacuucaacggccugaccgggaccggcgugcucaccgagagcaacaagaaguuccugcccuuccagcaguucgggcgggacaucgccgacacgaccgacgcgguccgcgacccgcagacccuggagauccuggacaucacccccugcagcuucggcgggguguccgugaucacgcccggcaccaacaccagcaaccaggucgccgugcucuaccagggcgugaacugcaccgaggucccgguggccauccacgccgaccagcugacgcccaccuggcgcguguacuccaccgggagcaacgucuuccagacccgggccggcugccugaucggggcggaguacgugaacaacuccuacgagugcgacauccccaucggcgccggcaucugcgccagcuaccagacgcagaccaacagcccccgccgggcccgcagcguggcgucccagagcaucaucgccuacaccaugucccucggggccgagaacagcgucgccuacuccaacaacagcaucgccaucccgaccaacuucacgaucagcgugaccaccgagauccugcccguguccaugaccaagacgagcgucgacugcaccauguacaucugcggcgacuccaccgagugcagcaaccugcuccugcaguacggguccuucugcacccagcugaaccgggcgcucacgggcaucgccguggagcaggacaagaacacccaggagguguucgcccaggucaagcagaucuacaagaccccgcccaucaaggacuucgggggcuucaacuucagccagauccugcccgaccccuccaagcccagcaagcgcuccuucaucgaggaccuccuguucaacaaggugacccuggccgacgccggcuucaucaagcaguacggggacugccugggcgacaucgcggcccgggaccucaucugcgcccagaaguucaacgggcugacggugcugcccccgcuccugaccgacgagaugaucgcccaguacaccagcgcccugcucgcgggcaccaucacguccggguggaccuucggcgccggcgccgcccugcagauccccuucgcgaugcagauggccuaccgcuucaacgggaucggcgucacccagaacgugcuguacgagaaccagaagcucaucgccaaccaguucaacagcgccaucgggaagauccaggacucccugagcuccaccgccagcgcgcugggcaagcuccaggacguggucaaccagaacgcccaggcccugaacacgcuggugaagcagcucuccagcaacuucggggccaucuccagcgugcugaacgacauccugagccggcucgacaaggucgaggccgaggugcagaucgaccgccugaucaccggccggcugcagucccuccagaccuacgugacccagcagcugauccgcgcggccgagauccgggccagcgccaaccuggccgcgaucaagauguccgagugcguccucggccagagcaagcgcguggacuucugcgggaagggcuaccaccugauguccuucccccagagcgcgccccacgggguggucuuccugcacgugaccuacgucccggcccaggagaagaacuucacgaccgcccccgccaucugccacgacggcaaggcccacuucccccgggaggggguguucguguccaacggcacccacugguucgucacccagcgcaacuucuacgagccccagaucaucacgaccgacaacaccuucgugagcggcaacugcgacguggucaucgggaucgugaacaacaccguguacgacccgcuccagcccgagcuggacuccuucaaggaggagcuggacaaguacuucaagaaccacacgagccccgacgucgaccucggcgacaucuccgggaucaacgccagcguggugaacauccagaaggagaucgaccggcugaacgaggucgccaagaaccugaacgagucccucaucgaccugcaggagcugggcaaguacgagcaguacaucaaguggcccugguacaucuggcucggcuucaucgccgggcugaucgcgaucgugauggugaccaucaugcugugcugcaugaccagcugcugcuccugccucaagggcugcugcagcugcggguccugcugcaaguucgacgaggacgacagcgagccgguccugaagggcgugaagcugcacuacaccugaggacuaguuauaagacugacuagcccgaugggccucccaacgggcccuccuccccuccuugcaccgagauuaauaaaaaaaaaaaaaaaaaaaaaaaaaaaaaaaaaaaaaaaaaaaaaaaaaaaaaaaaaaaaaaaaugcaucccccccccccccccccccccccccccccccaaaggcucuuuucagagccaccagaauu

SEQ ID NO: 23224 - RNA, 4039 nt, Artificial Sequence
  SARS-CoV-2/Wuhan/WIV05/2019__EPI_ISL_402128 spike protein mRNA gc (1-1273)(S13I_W152C_L452R_D614G)
aggagaaagcuuaccauguucguguuccugguccuccugccccuggugagcauccagugcgugaaccucaccacccgcacgcagcugccgcccgccuacaccaacuccuucacccggggcgucuacuaccccgacaagguguuccgcagcuccgugcugcacagcacccaggaccucuuccugcccuucuucuccaacgucacgugguuccacgccauccacgugagcgggaccaacggcaccaagcgguucgacaacccggugcugcccuucaacgacggggucuacuucgcguccaccgagaaguccaacaucauccgcggcuggaucuucgggacgacccucgacagcaagacccagagccugcugaucgugaacaacgccaccaacguggucaucaaggugugcgaguuccaguucugcaacgaccccuuccucggcguguacuaccacaagaacaacaaguccugcauggagagcgaguuccgggucuacuccagcgccaacaacugcacguucgaguacgugucccagcccuuccugauggaccuggagggcaagcaggggaacuucaagaaccuccgcgaguucguguucaagaacaucgacggcuacuucaagaucuacagcaagcacaccccgaucaaccugguccgggaccugccccagggguucuccgcccucgagccccugguggaccugcccaucggcaucaacaucacccgcuuccagacccuccuggcccugcaccggagcuaccucacgccgggggacuccagcagcggcuggaccgcgggcgccgccgccuacuacgugggguaccugcagccccgcaccuuccugcucaaguacaacgagaacggcaccaucacggacgcggucgacugcgcccuggacccccuguccgagaccaagugcacccucaagagcuucaccguggagaaggggaucuaccagacguccaacuuccgggugcagcccaccgagagcaucguccgcuucccgaacaucaccaaccugugccccuucggcgagguguucaacgccacccgguucgccuccgucuacgccuggaaccgcaagcggaucagcaacugcguggcggacuacuccgugcuguacaacagcgccuccuucagcacguucaagugcuacggcgucucccccaccaagcucaacgaccugugcuucaccaacguguacgccgacagcuucgugauccgcggggacgagguccggcagaucgcccccggccagaccgggaagaucgccgacuacaacuacaagcugccggacgacuucacgggcugcgugaucgcguggaacuccaacaaccucgacagcaaggucgggggcaacuacaacuaccgcuaccggcuguuccgcaaguccaaccugaagcccuucgagcgggacaucagcaccgagaucuaccaggccggcuccacccccugcaacgggguggagggcuucaacugcuacuucccccuccagagcuacggguuccagccgaccaacggcgugggguaccagcccuaccgcguggucgugcuguccuucgagcugcuccacgcccccgccacggugugcggccccaagaaguccaccaaccuggucaagaacaagugcgugaacuucaacuucaacggccugaccgggaccggcgugcucaccgagagcaacaagaaguuccugccguuccagcaguucgggcgcgacaucgccgacacgaccgacgcgguccgggacccccagacccuggagauccuggacaucacccccugcagcuucggcggggugagcgugaucacgccgggcaccaacaccuccaaccaggucgccgugcucuaccagggcgugaacugcaccgagguccccguggccauccacgccgaccagcugacgcccaccuggcgcguguacagcaccggguccaacgucuuccagacccgggccggcugccugaucggggcggagcacgugaacaacagcuacgagugcgacauccccaucggcgccggcaucugcgccuccuaccagacgcagaccaacagcccgcgccgggcccgcuccguggcgagccaguccaucaucgccuacaccaugagccucggggccgagaacuccgucgccuacagcaacaacuccaucgccauccccaccaacuucacgaucagcgugaccaccgagauccugcccguguccaugaccaagacgagcgucgacugcaccauguacaucugcggcgacagcaccgagugcuccaaccugcuccugcaguacgggagcuucugcacccagcugaaccgggcgcucacgggcaucgccguggagcaggacaagaacacccaggagguguucgcccaggucaagcagaucuacaagacgcccccgaucaaggacuucgggggcuucaacuucucccagauccugcccgaccccagcaagcccuccaagcgcagcuucaucgaggaccuccuguucaacaaggugacccuggccgacgccggcuucaucaagcaguacggggacugccugggcgacaucgcggcccgggaccucaucugcgcccagaaguucaacgggcugaccgugcugccgccccuccugaccgacgagaugaucgcccaguacaccuccgcccugcucgcgggcaccaucacgagcggguggaccuucggcgccggcgccgcccugcagauccccuucgcgaugcagauggccuaccgcuucaacgggaucggcgucacccagaacgugcuguacgagaaccagaagcucaucgccaaccaguucaacuccgccaucgggaagauccaggacagccuguccagcaccgccuccgcgcugggcaagcuccaggacguggucaaccagaacgcccaggcccugaacacgcuggugaagcagcucagcuccaacuucggggccaucagcuccgugcugaacgacauccugagccggcucgacaaggucgaggccgaggugcagaucgaccgccugaucaccggccggcugcagucccuccagaccuacgugacccagcagcugauccgcgcggccgagauccgggccagcgccaaccuggccgcgaccaagaugagcgagugcguccucggccaguccaagcgcguggacuucugcgggaagggcuaccaccugaugagcuucccccaguccgccccgcacgggguggucuuccugcacgugacguacguccccgcccaggagaagaacuucaccaccgcccccgcgaucugccacgacggcaaggcccacuucccccgggaggggguguucgugagcaacggcacccacugguucgucacgcagcgcaacuucuacgagccgcagaucaucaccaccgacaacaccuucguguccggcaacugcgacguggucaucgggaucgugaacaacacgguguacgacccccuccagcccgagcuggacagcuucaaggaggagcuggacaaguacuucaagaaccacaccucccccgacgucgaccucggcgacaucagcgggaucaacgccuccguggugaacauccagaaggagaucgaccggcugaacgaggucgccaagaaccugaacgagagccucaucgaccugcaggagcugggcaaguacgagcaguacaucaaguggccgugguacaucuggcucggcuucaucgccgggcugaucgcgaucgugauggugaccaucaugcugugcugcaugaccuccugcugcagcugccucaagggcugcugcuccugcgggagcugcugcaaguucgacgaggacgacuccgagcccguccugaagggcgugaagcugcacuacacgugaggacuaguuauaagacugacuagcccgaugggccucccaacgggcccuccuccccuccuugcaccgagauuaauaaaaaaaaaaaaaaaaaaaaaaaaaaaaaaaaaaaaaaaaaaaaaaaaaaaaaaaaaaaaaaaaugcaucccccccccccccccccccccccccccccccaaaggcucuuuucagagccaccagaauu

SEQ ID NO: 23225 - RNA, 4039 nt, Artificial Sequence
  SARS-CoV-2/Wuhan/WIV05/2019__EPI_ISL_402128 spike protein mRNA gc (1-1273)
aggagaaagcuuaccauguucguguuccuggugcugcugccccuggugagcagccagugcgugaaccugaccacccggacccagcugccaccagccuacaccaacagcuucacccggggcgucuacuaccccgacaagguguuccggagcagcguccugcacagcacccaggaccuguuccugcccuucuucagcaacgugaccugguuccacgccauccacgugagcggcaccaacggcaccaagcgguucgacaaccccgugcugcccuucaacgacggcguguacuucgccagcaccgagaagagcaacaucauccggggcuggaucuucggcaccacccuggacagcaagacccagagccugcugaucgugaauaacgccaccaacguggugaucaaggugugcgaguuccaguucugcaacgaccccuuccugggcguguacuaccacaagaacaacaagagcuggauggagagcgaguuccggguguacagcagcgccaacaacugcaccuucgaguacgugagccagcccuuccugauggaccuggagggcaagcagggcaacuucaagaaccugcgggaguucguguucaagaacaucgacggcuacuucaagaucuacagcaagcacaccccaaucaaccuggugcgggaucugccccagggcuucucagcccuggagccccugguggaccugcccaucggcaucaacaucacccgguuccagacccugcuggcccugcaccggagcuaccugaccccaggcgacagcagcagcggguggacagcaggcgcggcugcuuacuacgugggcuaccugcagccccggaccuuccugcugaaguacaacgagaacggcaccaucaccgacgccguggacugcgcccuggacccucugagcgagaccaagugcacccugaagagcuucaccguggagaagggcaucuaccagaccagcaacuuccgggugcagcccaccgagagcaucgugcgguuccccaacaucaccaaccugugccccuucggcgagguguucaacgccacccgguucgccagcguguacgccuggaaccggaagcggaucagcaacugcguggccgacuacagcgugcuguacaacagcgccagcuucagcaccuucaagugcuacggcgugagccccaccaagcugaacgaccugugcuucaccaacguguacgccgacagcuucgugauccguggcgacgaggugcggcagaucgcacccggccagacaggcaagaucgccgacuacaacuacaagcugcccgacgacuucaccggcugcgugaucgccuggaacagcaacaaccucgacagcaaggugggcggcaacuacaacuaccuguaccggcuguuccggaagagcaaccugaagcccuucgagcgggacaucagcaccgagaucuaccaagccggcuccaccccuugcaacggcguggagggcuucaacugcuacuucccucugcagagcuacggcuuccagcccaccaacggcgugggcuaccagcccuaccgggugguggugcugagcuucgagcugcugcacgccccagccaccguguguggccccaagaagagcaccaaccuggugaagaacaagugcgugaacuucaacuucaacggccuuaccggcaccggcgugcugaccgagagcaacaagaaauuccugcccuuucagcaguucggccgggacaucgccgacaccaccgacgcugugcgggauccccagacccuggagauccuggacaucaccccuugcagcuucggcggcgugagcgugaucaccccaggcaccaacaccagcaaccagguggccgugcuguaccaggacgugaacugcaccgaggugcccguggccauccacgccgaccagcugacacccaccuggcgggucuacagcaccggcagcaacguguuccagacccgggccgguugccugaucggcgccgagcacgugaacaacagcuacgagugcgacauccccaucggcgccggcaucugugccagcuaccagacccagaccaauucaccccggagggcaaggagcguggccagccagagcaucaucgccuacaccaugagccugggcgccgagaacagcguggccuacagcaacaacagcaucgccauccccaccaacuucaccaucagcgugaccaccgagauucugcccgugagcaugaccaagaccagcguggacugcaccauguacaucugcggcgacagcaccgagugcagcaaccugcugcugcaguacggcagcuucugcacccagcugaaccgggcccugaccggcaucgccguggagcaggacaagaacacccaggagguguucgcccaggugaagcagaucuacaagaccccucccaucaaggacuucggcggcuucaacuucagccagauccugcccgaccccagcaagcccagcaagcggagcuucaucgaggaccugcuguucaacaaggugacccuagccgacgccggcuucaucaagcaguacggcgacugccucggcgacauagccgcccgggaccugaucugcgcccagaaguucaacggccugaccgugcugccuccccugcugaccgacgagaugaucgcccaguacaccagcgcccuguuagccggaaccaucaccagcggcuggacuuucggcgcuggagccgcucugcagauccccuucgccaugcagauggccuaccgguucaacggcaucggcgugacccagaacgugcuguacgagaaccagaagcugaucgccaaccaguucaacagcgccaucggcaagauccaggacagccugagcagcaccgcuagcgcccugggcaagcugcaggacguggugaaccagaacgcccaggcccugaacacccuggugaagcagcugagcagcaacuucggcgccaucagcagcgugcugaacgacauccugagccggcuggacaaggucgaggccgaggugcagaucgaccggcugaucacuggccggcugcagagccugcagaccuacgugacccagcagcugauccgggccgccgagauucgggccagcgccaaccuggccgccaccaagaugagcgagugcgugcugggccagagcaagcggguggacuucugcggcaagggcuaccaccugaugagcuuuccccagagcgcaccccacggagugguguuccugcacgugaccuacgugcccgcccaggagaagaacuucaccaccgccccagccaucugccacgacggcaaggcccacuuuccccgggagggcguguucgugagcaacggcacccacugguucgugacccagcggaacuucuacgagccccagaucaucaccaccgacaacaccuucgugagcggcaacugcgacguggugaucggcaucgugaacaacaccguguacgauccccugcagcccgagcuggacagcuucaaggaggagcuggacaaguacuucaagaaucacaccagccccgacguggaccugggcgacaucagcggcaucaacgccagcguggugaacauccagaaggagaucgaucggcugaacgagguggccaagaaccugaacgagagccugaucgaccugcaggagcugggcaaguacgagcaguacaucaaguggcccugguacaucuggcugggcuucaucgccggccugaucgccaucgugauggugaccaucaugcugugcugcaugaccagcugcugcagcugccugaagggcuguugcagcugcggcagcugcugcaaguucgacgaggacgacagcgagcccgugcugaagggcgugaagcugcacuacaccugaggacuaguuauaagacugacuagcccgaugggccucccaacgggcccuccuccccuccuugcaccgagauuaauaaaaaaaaaaaaaaaaaaaaaaaaaaaaaaaaaaaaaaaaaaaaaaaaaaaaaaaaaaaaaaaaugcaucccccccccccccccccccccccccccccccaaaggcucuuuucagagccaccagaauu

SEQ ID NO: 23226 - RNA, 4039 nt, Artificial Sequence
  SARS-CoV-2/Wuhan/WIV05/2019__EPI_ISL_402128 spike protein mRNA gc (1-1273)(D614G)
aggagaaagcuuaccauguucguguuccuggugcugcugccccuggugagcagccagugcgugaaccugaccacccggacccagcugccaccagccuacaccaacagcuucacccggggcgucuacuaccccgacaagguguuccggagcagcguccugcacagcacccaggaccuguuccugcccuucuucagcaacgugaccugguuccacgccauccacgugagcggcaccaacggcaccaagcgguucgacaaccccgugcugcccuucaacgacggcguguacuucgccagcaccgagaagagcaacaucauccggggcuggaucuucggcaccacccuggacagcaagacccagagccugcugaucgugaauaacgccaccaacguggugaucaaggugugcgaguuccaguucugcaacgaccccuuccugggcguguacuaccacaagaacaacaagagcuggauggagagcgaguuccggguguacagcagcgccaacaacugcaccuucgaguacgugagccagcccuuccugauggaccuggagggcaagcagggcaacuucaagaaccugcgggaguucguguucaagaacaucgacggcuacuucaagaucuacagcaagcacaccccaaucaaccuggugcgggaucugccccagggcuucucagcccuggagccccugguggaccugcccaucggcaucaacaucacccgguuccagacccugcuggcccugcaccggagcuaccugaccccaggcgacagcagcagcggguggacagcaggcgcggcugcuuacuacgugggcuaccugcagccccggaccuuccugcugaaguacaacgagaacggcaccaucaccgacgccguggacugcgcccuggacccucugagcgagaccaagugcacccugaagagcuucaccguggagaagggcaucuaccagaccagcaacuuccgggugcagcccaccgagagcaucgugcgguuccccaacaucaccaaccugugccccuucggcgagguguucaacgccacccgguucgccagcguguacgccuggaaccggaagcggaucagcaacugcguggccgacuacagcgugcuguacaacagcgccagcuucagcaccuucaagugcuacggcgugagccccaccaagcugaacgaccugugcuucaccaacguguacgccgacagcuucgugauccguggcgacgaggugcggcagaucgcacccggccagacaggcaagaucgccgacuacaacuacaagcugcccgacgacuucaccggcugcgugaucgccuggaacagcaacaaccucgacagcaaggugggcggcaacuacaacuaccuguaccggcuguuccggaagagcaaccugaagcccuucgagcgggacaucagcaccgagaucuaccaagccggcuccaccccuugcaacggcguggagggcuucaacugcuacuucccucugcagagcuacggcuuccagcccaccaacggcgugggcuaccagcccuaccgggugguggugcugagcuucgagcugcugcacgccccagccaccguguguggccccaagaagagcaccaaccuggugaagaacaagugcgugaacuucaacuucaacggccuuaccggcaccggcgugcugaccgagagcaacaagaaauuccugcccuuucagcaguucggccgggacaucgccgacaccaccgacgcugugcgggauccccagacccuggagauccuggacaucaccccuugcagcuucggcggcgugagcgugaucaccccaggcaccaacaccagcaaccagguggccgugcuguaccagggcgugaacugcaccgaggugcccguggccauccacgccgaccagcugacacccaccuggcgggucuacagcaccggcagcaacguguuccagacccgggccgguugccugaucggcgccgagcacgugaacaacagcuacgagugcgacauccccaucggcgccggcaucugugccagcuaccagacccagaccaauucaccccggagggcaaggagcguggccagccagagcaucaucgccuacaccaugagccugggcgccgagaacagcguggccuacagcaacaacagcaucgccauccccaccaacuucaccaucagcgugaccaccgagauucugcccgugagcaugaccaagaccagcguggacugcaccauguacaucugcggcgacagcaccgagugcagcaaccugcugcugcaguacggcagcuucugcacccagcugaaccgggcccugaccggcaucgccguggagcaggacaagaacacccaggagguguucgcccaggugaagcagaucuacaagaccccucccaucaaggacuucggcggcuucaacuucagccagauccugcccgaccccagcaagcccagcaagcggagcuucaucgaggaccugcuguucaacaaggugacccuagccgacgccggcuucaucaagcaguacggcgacugccucggcgacauagccgcccgggaccugaucugcgcccagaaguucaacggccugaccgugcugccuccccugcugaccgacgagaugaucgcccaguacaccagcgcccuguuagccggaaccaucaccagcggcuggacuuucggcgcuggagccgcucugcagauccccuucgccaugcagauggccuaccgguucaacggcaucggcgugacccagaacgugcuguacgagaaccagaagcugaucgccaaccaguucaacagcgccaucggcaagauccaggacagccugagcagcaccgcuagcgcccugggcaagcugcaggacguggugaaccagaacgcccaggcccugaacacccuggugaagcagcugagcagcaacuucggcgccaucagcagcgugcugaacgacauccugagccggcuggacaaggucgaggccgaggugcagaucgaccggcugaucacuggccggcugcagagccugcagaccuacgugacccagcagcugauccgggccgccgagauucgggccagcgccaaccuggccgccaccaagaugagcgagugcgugcugggccagagcaagcggguggacuucugcggcaagggcuaccaccugaugagcuuuccccagagcgcaccccacggagugguguuccugcacgugaccuacgugcccgcccaggagaagaacuucaccaccgccccagccaucugccacgacggcaaggcccacuuuccccgggagggcguguucgugagcaacggcacccacugguucgugacccagcggaacuucuacgagccccagaucaucaccaccgacaacaccuucgugagcggcaacugcgacguggugaucggcaucgugaacaacaccguguacgauccccugcagcccgagcuggacagcuucaaggaggagcuggacaaguacuucaagaaucacaccagccccgacguggaccugggcgacaucagcggcaucaacgccagcguggugaacauccagaaggagaucgaucggcugaacgagguggccaagaaccugaacgagagccugaucgaccugcaggagcugggcaaguacgagcaguacaucaaguggcccugguacaucuggcugggcuucaucgccggccugaucgccaucgugauggugaccaucaugcugugcugcaugaccagcugcugcagcugccugaagggcuguugcagcugcggcagcugcugcaaguucgacgaggacgacagcgagcccgugcugaagggcgugaagcugcacuacaccugaggacuaguuauaagacugacuagcccgaugggccucccaacgggcccuccuccccuccuugcaccgagauuaauaaaaaaaaaaaaaaaaaaaaaaaaaaaaaaaaaaaaaaaaaaaaaaaaaaaaaaaaaaaaaaaaugcaucccccccccccccccccccccccccccccccaaaggcucuuuucagagccaccagaauu

SEQ ID NO: 23227 - RNA, 4039 nt, Artificial Sequence
  SARS-CoV-2/Wuhan/WIV05/2019__EPI_ISL_402128 spike protein mRNA gc (1-1273)(A222V_D614G)
aggagaaagcuuaccauguucguguuccuggugcugcugccccuggugagcagccagugcgugaaccugaccacccggacccagcugccaccagccuacaccaacagcuucacccggggcgucuacuaccccgacaagguguuccggagcagcguccugcacagcacccaggaccuguuccugcccuucuucagcaacgugaccugguuccacgccauccacgugagcggcaccaacggcaccaagcgguucgacaaccccgugcugcccuucaacgacggcguguacuucgccagcaccgagaagagcaacaucauccggggcuggaucuucggcaccacccuggacagcaagacccagagccugcugaucgugaauaacgccaccaacguggugaucaaggugugcgaguuccaguucugcaacgaccccuuccugggcguguacuaccacaagaacaacaagagcuggauggagagcgaguuccggguguacagcagcgccaacaacugcaccuucgaguacgugagccagcccuuccugauggaccuggagggcaagcagggcaacuucaagaaccugcgggaguucguguucaagaacaucgacggcuacuucaagaucuacagcaagcacaccccaaucaaccuggugcgggaucugccccagggcuucucagugcuggagccccugguggaccugcccaucggcaucaacaucacccgguuccagacccugcuggcccugcaccggagcuaccugaccccaggcgacagcagcagcggguggacagcaggcgcggcugcuuacuacgugggcuaccugcagccccggaccuuccugcugaaguacaacgagaacggcaccaucaccgacgccguggacugcgcccuggacccucugagcgagaccaagugcacccugaagagcuucaccguggagaagggcaucuaccagaccagcaacuuccgggugcagcccaccgagagcaucgugcgguuccccaacaucaccaaccugugccccuucggcgagguguucaacgccacccgguucgccagcguguacgccuggaaccggaagcggaucagcaacugcguggccgacuacagcgugcuguacaacagcgccagcuucagcaccuucaagugcuacggcgugagccccaccaagcugaacgaccugugcuucaccaacguguacgccgacagcuucgugauccguggcgacgaggugcggcagaucgcacccggccagacaggcaagaucgccgacuacaacuacaagcugcccgacgacuucaccggcugcgugaucgccuggaacagcaacaaccucgacagcaaggugggcggcaacuacaacuaccuguaccggcuguuccggaagagcaaccugaagcccuucgagcgggacaucagcaccgagaucuaccaagccggcuccaccccuugcaacggcguggagggcuucaacugcuacuucccucugcagagcuacggcuuccagcccaccaacggcgugggcuaccagcccuaccgggugguggugcugagcuucgagcugcugcacgccccagccaccguguguggccccaagaagagcaccaaccuggugaagaacaagugcgugaacuucaacuucaacggccuuaccggcaccggcgugcugaccgagagcaacaagaaauuccugcccuuucagcaguucggccgggacaucgccgacaccaccgacgcugugcgggauccccagacccuggagauccuggacaucaccccuugcagcuucggcggcgugagcgugaucaccccaggcaccaacaccagcaaccagguggccgugcuguaccagggcgugaacugcaccgaggugcccguggccauccacgccgaccagcugacacccaccuggcgggucuacagcaccggcagcaacguguuccagacccgggccgguugccugaucggcgccgagcacgugaacaacagcuacgagugcgacauccccaucggcgccggcaucugugccagcuaccagacccagaccaauucaccccggagggcaaggagcguggccagccagagcaucaucgccuacaccaugagccugggcgccgagaacagcguggccuacagcaacaacagcaucgccauccccaccaacuucaccaucagcgugaccaccgagauucugcccgugagcaugaccaagaccagcguggacugcaccauguacaucugcggcgacagcaccgagugcagcaaccugcugcugcaguacggcagcuucugcacccagcugaaccgggcccugaccggcaucgccguggagcaggacaagaacacccaggagguguucgcccaggugaagcagaucuacaagaccccucccaucaaggacuucggcggcuucaacuucagccagauccugcccgaccccagcaagcccagcaagcggagcuucaucgaggaccugcuguucaacaaggugacccuagccgacgccggcuucaucaagcaguacggcgacugccucggcgacauagccgcccgggaccugaucugcgcccagaaguucaacggccugaccgugcugccuccccugcugaccgacgagaugaucgcccaguacaccagcgcccuguuagccggaaccaucaccagcggcuggacuuucggcgcuggagccgcucugcagauccccuucgccaugcagauggccuaccgguucaacggcaucggcgugacccagaacgugcuguacgagaaccagaagcugaucgccaaccaguucaacagcgccaucggcaagauccaggacagccugagcagcaccgcuagcgcccugggcaagcugcaggacguggugaaccagaacgcccaggcccugaacacccuggugaagcagcugagcagcaacuucggcgccaucagcagcgugcugaacgacauccugagccggcuggacaaggucgaggccgaggugcagaucgaccggcugaucacuggccggcugcagagccugcagaccuacgugacccagcagcugauccgggccgccgagauucgggccagcgccaaccuggccgccaccaagaugagcgagugcgugcugggccagagcaagcggguggacuucugcggcaagggcuaccaccugaugagcuuuccccagagcgcaccccacggagugguguuccugcacgugaccuacgugcccgcccaggagaagaacuucaccaccgccccagccaucugccacgacggcaaggcccacuuuccccgggagggcguguucgugagcaacggcacccacugguucgugacccagcggaacuucuacgagccccagaucaucaccaccgacaacaccuucgugagcggcaacugcgacguggugaucggcaucgugaacaacaccguguacgauccccugcagcccgagcuggacagcuucaaggaggagcuggacaaguacuucaagaaucacaccagccccgacguggaccugggcgacaucagcggcaucaacgccagcguggugaacauccagaaggagaucgaucggcugaacgagguggccaagaaccugaacgagagccugaucgaccugcaggagcugggcaaguacgagcaguacaucaaguggcccugguacaucuggcugggcuucaucgccggccugaucgccaucgugauggugaccaucaugcugugcugcaugaccagcugcugcagcugccugaagggcuguugcagcugcggcagcugcugcaaguucgacgaggacgacagcgagcccgugcugaagggcgugaagcugcacuacaccugaggacuaguuauaagacugacuagcccgaugggccucccaacgggcccuccuccccuccuugcaccgagauuaauaaaaaaaaaaaaaaaaaaaaaaaaaaaaaaaaaaaaaaaaaaaaaaaaaaaaaaaaaaaaaaaaugcaucccccccccccccccccccccccccccccccaaaggcucuuuucagagccaccagaauu

SEQ ID NO: 23228 - RNA, 4039 nt, Artificial Sequence
  SARS-CoV-2/Wuhan/WIV05/2019__EPI_ISL_402128 spike protein mRNA gc (1-1273)(N439K_D614G)
aggagaaagcuuaccauguucguguuccuggugcugcugccccuggugagcagccagugcgugaaccugaccacccggacccagcugccaccagccuacaccaacagcuucacccggggcgucuacuaccccgacaagguguuccggagcagcguccugcacagcacccaggaccuguuccugcccuucuucagcaacgugaccugguuccacgccauccacgugagcggcaccaacggcaccaagcgguucgacaaccccgugcugcccuucaacgacggcguguacuucgccagcaccgagaagagcaacaucauccggggcuggaucuucggcaccacccuggacagcaagacccagagccugcugaucgugaauaacgccaccaacguggugaucaaggugugcgaguuccaguucugcaacgaccccuuccugggcguguacuaccacaagaacaacaagagcuggauggagagcgaguuccggguguacagcagcgccaacaacugcaccuucgaguacgugagccagcccuuccugauggaccuggagggcaagcagggcaacuucaagaaccugcgggaguucguguucaagaacaucgacggcuacuucaagaucuacagcaagcacaccccaaucaaccuggugcgggaucugccccagggcuucucagcccuggagccccugguggaccugcccaucggcaucaacaucacccgguuccagacccugcuggcccugcaccggagcuaccugaccccaggcgacagcagcagcggguggacagcaggcgcggcugcuuacuacgugggcuaccugcagccccggaccuuccugcugaaguacaacgagaacggcaccaucaccgacgccguggacugcgcccuggacccucugagcgagaccaagugcacccugaagagcuucaccguggagaagggcaucuaccagaccagcaacuuccgggugcagcccaccgagagcaucgugcgguuccccaacaucaccaaccugugccccuucggcgagguguucaacgccacccgguucgccagcguguacgccuggaaccggaagcggaucagcaacugcguggccgacuacagcgugcuguacaacagcgccagcuucagcaccuucaagugcuacggcgugagccccaccaagcugaacgaccugugcuucaccaacguguacgccgacagcuucgugauccguggcgacgaggugcggcagaucgcacccggccagacaggcaagaucgccgacuacaacuacaagcugcccgacgacuucaccggcugcgugaucgccuggaacagcaagaaccucgacagcaaggugggcggcaacuacaacuaccuguaccggcuguuccggaagagcaaccugaagcccuucgagcgggacaucagcaccgagaucuaccaagccggcuccaccccuugcaacggcguggagggcuucaacugcuacuucccucugcagagcuacggcuuccagcccaccaacggcgugggcuaccagcccuaccgggugguggugcugagcuucgagcugcugcacgccccagccaccguguguggccccaagaagagcaccaaccuggugaagaacaagugcgugaacuucaacuucaacggccuuaccggcaccggcgugcugaccgagagcaacaagaaauuccugcccuuucagcaguucggccgggacaucgccgacaccaccgacgcugugcgggauccccagacccuggagauccuggacaucaccccuugcagcuucggcggcgugagcgugaucaccccaggcaccaacaccagcaaccagguggccgugcuguaccagggcgugaacugcaccgaggugcccguggccauccacgccgaccagcugacacccaccuggcgggucuacagcaccggcagcaacguguuccagacccgggccgguugccugaucggcgccgagcacgugaacaacagcuacgagugcgacauccccaucggcgccggcaucugugccagcuaccagacccagaccaauucaccccggagggcaaggagcguggccagccagagcaucaucgccuacaccaugagccugggcgccgagaacagcguggccuacagcaacaacagcaucgccauccccaccaacuucaccaucagcgugaccaccgagauucugcccgugagcaugaccaagaccagcguggacugcaccauguacaucugcggcgacagcaccgagugcagcaaccugcugcugcaguacggcagcuucugcacccagcugaaccgggcccugaccggcaucgccguggagcaggacaagaacacccaggagguguucgcccaggugaagcagaucuacaagaccccucccaucaaggacuucggcggcuucaacuucagccagauccugcccgaccccagcaagcccagcaagcggagcuucaucgaggaccugcuguucaacaaggugacccuagccgacgccggcuucaucaagcaguacggcgacugccucggcgacauagccgcccgggaccugaucugcgcccagaaguucaacggccugaccgugcugccuccccugcugaccgacgagaugaucgcccaguacaccagcgcccuguuagccggaaccaucaccagcggcuggacuuucggcgcuggagccgcucugcagauccccuucgccaugcagauggccuaccgguucaacggcaucggcgugacccagaacgugcuguacgagaaccagaagcugaucgccaaccaguucaacagcgccaucggcaagauccaggacagccugagcagcaccgcuagcgcccugggcaagcugcaggacguggugaaccagaacgcccaggcccugaacacccuggugaagcagcugagcagcaacuucggcgccaucagcagcgugcugaacgacauccugagccggcuggacaaggucgaggccgaggugcagaucgaccggcugaucacuggccggcugcagagccugcagaccuacgugacccagcagcugauccgggccgccgagauucgggccagcgccaaccuggccgccaccaagaugagcgagugcgugcugggccagagcaagcggguggacuucugcggcaagggcuaccaccugaugagcuuuccccagagcgcaccccacggagugguguuccugcacgugaccuacgugcccgcccaggagaagaacuucaccaccgccccagccaucugccacgacggcaaggcccacuuuccccgggagggcguguucgugagcaacggcacccacugguucgugacccagcggaacuucuacgagccccagaucaucaccaccgacaacaccuucgugagcggcaacugcgacguggugaucggcaucgugaacaacaccguguacgauccccugcagcccgagcuggacagcuucaaggaggagcuggacaaguacuucaagaaucacaccagccccgacguggaccugggcgacaucagcggcaucaacgccagcguggugaacauccagaaggagaucgaucggcugaacgagguggccaagaaccugaacgagagccugaucgaccugcaggagcugggcaaguacgagcaguacaucaaguggcccugguacaucuggcugggcuucaucgccggccugaucgccaucgugauggugaccaucaugcugugcugcaugaccagcugcugcagcugccugaagggcuguugcagcugcggcagcugcugcaaguucgacgaggacgacagcgagcccgugcugaagggcgugaagcugcacuacaccugaggacuaguuauaagacugacuagcccgaugggccucccaacgggcccuccuccccuccuugcaccgagauuaauaaaaaaaaaaaaaaaaaaaaaaaaaaaaaaaaaaaaaaaaaaaaaaaaaaaaaaaaaaaaaaaaugcaucccccccccccccccccccccccccccccccaaaggcucuuuucagagccaccagaauu

SEQ ID NO: 23229 - RNA, 4039 nt, Artificial Sequence
  SARS-CoV-2/Wuhan/WIV05/2019__EPI_ISL_402128 spike protein mRNA gc (1-1273)(S477N_D614G)
aggagaaagcuuaccauguucguguuccuggugcugcugccccuggugagcagccagugcgugaaccugaccacccggacccagcugccaccagccuacaccaacagcuucacccggggcgucuacuaccccgacaagguguuccggagcagcguccugcacagcacccaggaccuguuccugcccuucuucagcaacgugaccugguuccacgccauccacgugagcggcaccaacggcaccaagcgguucgacaaccccgugcugcccuucaacgacggcguguacuucgccagcaccgagaagagcaacaucauccggggcuggaucuucggcaccacccuggacagcaagacccagagccugcugaucgugaauaacgccaccaacguggugaucaaggugugcgaguuccaguucugcaacgaccccuuccugggcguguacuaccacaagaacaacaagagcuggauggagagcgaguuccggguguacagcagcgccaacaacugcaccuucgaguacgugagccagcccuuccugauggaccuggagggcaagcagggcaacuucaagaaccugcgggaguucguguucaagaacaucgacggcuacuucaagaucuacagcaagcacaccccaaucaaccuggugcgggaucugccccagggcuucucagcccuggagccccugguggaccugcccaucggcaucaacaucacccgguuccagacccugcuggcccugcaccggagcuaccugaccccaggcgacagcagcagcggguggacagcaggcgcggcugcuuacuacgugggcuaccugcagccccggaccuuccugcugaaguacaacgagaacggcaccaucaccgacgccguggacugcgcccuggacccucugagcgagaccaagugcacccugaagagcuucaccguggagaagggcaucuaccagaccagcaacuuccgggugcagcccaccgagagcaucgugcgguuccccaacaucaccaaccugugccccuucggcgagguguucaacgccacccgguucgccagcguguacgccuggaaccggaagcggaucagcaacugcguggccgacuacagcgugcuguacaacagcgccagcuucagcaccuucaagugcuacggcgugagccccaccaagcugaacgaccugugcuucaccaacguguacgccgacagcuucgugauccguggcgacgaggugcggcagaucgcacccggccagacaggcaagaucgccgacuacaacuacaagcugcccgacgacuucaccggcugcgugaucgccuggaacagcaacaaccucgacagcaaggugggcggcaacuacaacuaccuguaccggcuguuccggaagagcaaccugaagcccuucgagcgggacaucagcaccgagaucuaccaagccggcaacaccccuugcaacggcguggagggcuucaacugcuacuucccucugcagagcuacggcuuccagcccaccaacggcgugggcuaccagcccuaccgggugguggugcugagcuucgagcugcugcacgccccagccaccguguguggccccaagaagagcaccaaccuggugaagaacaagugcgugaacuucaacuucaacggccuuaccggcaccggcgugcugaccgagagcaacaagaaauuccugcccuuucagcaguucggccgggacaucgccgacaccaccgacgcugugcgggauccccagacccuggagauccuggacaucaccccuugcagcuucggcggcgugagcgugaucaccccaggcaccaacaccagcaaccagguggccgugcuguaccagggcgugaacugcaccgaggugcccguggccauccacgccgaccagcugacacccaccuggcgggucuacagcaccggcagcaacguguuccagacccgggccgguugccugaucggcgccgagcacgugaacaacagcuacgagugcgacauccccaucggcgccggcaucugugccagcuaccagacccagaccaauucaccccggagggcaaggagcguggccagccagagcaucaucgccuacaccaugagccugggcgccgagaacagcguggccuacagcaacaacagcaucgccauccccaccaacuucaccaucagcgugaccaccgagauucugcccgugagcaugaccaagaccagcguggacugcaccauguacaucugcggcgacagcaccgagugcagcaaccugcugcugcaguacggcagcuucugcacccagcugaaccgggcccugaccggcaucgccguggagcaggacaagaacacccaggagguguucgcccaggugaagcagaucuacaagaccccucccaucaaggacuucggcggcuucaacuucagccagauccugcccgaccccagcaagcccagcaagcggagcuucaucgaggaccugcuguucaacaaggugacccuagccgacgccggcuucaucaagcaguacggcgacugccucggcgacauagccgcccgggaccugaucugcgcccagaaguucaacggccugaccgugcugccuccccugcugaccgacgagaugaucgcccaguacaccagcgcccuguuagccggaaccaucaccagcggcuggacuuucggcgcuggagccgcucugcagauccccuucgccaugcagauggccuaccgguucaacggcaucggcgugacccagaacgugcuguacgagaaccagaagcugaucgccaaccaguucaacagcgccaucggcaagauccaggacagccugagcagcaccgcuagcgcccugggcaagcugcaggacguggugaaccagaacgcccaggcccugaacacccuggugaagcagcugagcagcaacuucggcgccaucagcagcgugcugaacgacauccugagccggcuggacaaggucgaggccgaggugcagaucgaccggcugaucacuggccggcugcagagccugcagaccuacgugacccagcagcugauccgggccgccgagauucgggccagcgccaaccuggccgccaccaagaugagcgagugcgugcugggccagagcaagcggguggacuucugcggcaagggcuaccaccugaugagcuuuccccagagcgcaccccacggagugguguuccugcacgugaccuacgugcccgcccaggagaagaacuucaccaccgccccagccaucugccacgacggcaaggcccacuuuccccgggagggcguguucgugagcaacggcacccacugguucgugacccagcggaacuucuacgagccccagaucaucaccaccgacaacaccuucgugagcggcaacugcgacguggugaucggcaucgugaacaacaccguguacgauccccugcagcccgagcuggacagcuucaaggaggagcuggacaaguacuucaagaaucacaccagccccgacguggaccugggcgacaucagcggcaucaacgccagcguggugaacauccagaaggagaucgaucggcugaacgagguggccaagaaccugaacgagagccugaucgaccugcaggagcugggcaaguacgagcaguacaucaaguggcccugguacaucuggcugggcuucaucgccggccugaucgccaucgugauggugaccaucaugcugugcugcaugaccagcugcugcagcugccugaagggcuguugcagcugcggcagcugcugcaaguucgacgaggacgacagcgagcccgugcugaagggcgugaagcugcacuacaccugaggacuaguuauaagacugacuagcccgaugggccucccaacgggcccuccuccccuccuugcaccgagauuaauaaaaaaaaaaaaaaaaaaaaaaaaaaaaaaaaaaaaaaaaaaaaaaaaaaaaaaaaaaaaaaaaugcaucccccccccccccccccccccccccccccccaaaggcucuuuucagagccaccagaauu

SEQ ID NO: 23230 - RNA, 4039 nt, Artificial Sequence
  SARS-CoV-2/Wuhan/WIV05/2019__EPI_ISL_402128 spike protein mRNA gc (1-1273)(N501Y_D614G)
aggagaaagcuuaccauguucguguuccuggugcugcugccccuggugagcagccagugcgugaaccugaccacccggacccagcugccaccagccuacaccaacagcuucacccggggcgucuacuaccccgacaagguguuccggagcagcguccugcacagcacccaggaccuguuccugcccuucuucagcaacgugaccugguuccacgccauccacgugagcggcaccaacggcaccaagcgguucgacaaccccgugcugcccuucaacgacggcguguacuucgccagcaccgagaagagcaacaucauccggggcuggaucuucggcaccacccuggacagcaagacccagagccugcugaucgugaauaacgccaccaacguggugaucaaggugugcgaguuccaguucugcaacgaccccuuccugggcguguacuaccacaagaacaacaagagcuggauggagagcgaguuccggguguacagcagcgccaacaacugcaccuucgaguacgugagccagcccuuccugauggaccuggagggcaagcagggcaacuucaagaaccugcgggaguucguguucaagaacaucgacggcuacuucaagaucuacagcaagcacaccccaaucaaccuggugcgggaucugccccagggcuucucagcccuggagccccugguggaccugcccaucggcaucaacaucacccgguuccagacccugcuggcccugcaccggagcuaccugaccccaggcgacagcagcagcggguggacagcaggcgcggcugcuuacuacgugggcuaccugcagccccggaccuuccugcugaaguacaacgagaacggcaccaucaccgacgccguggacugcgcccuggacccucugagcgagaccaagugcacccugaagagcuucaccguggagaagggcaucuaccagaccagcaacuuccgggugcagcccaccgagagcaucgugcgguuccccaacaucaccaaccugugccccuucggcgagguguucaacgccacccgguucgccagcguguacgccuggaaccggaagcggaucagcaacugcguggccgacuacagcgugcuguacaacagcgccagcuucagcaccuucaagugcuacggcgugagccccaccaagcugaacgaccugugcuucaccaacguguacgccgacagcuucgugauccguggcgacgaggugcggcagaucgcacccggccagacaggcaagaucgccgacuacaacuacaagcugcccgacgacuucaccggcugcgugaucgccuggaacagcaacaaccucgacagcaaggugggcggcaacuacaacuaccuguaccggcuguuccggaagagcaaccugaagcccuucgagcgggacaucagcaccgagaucuaccaagccggcuccaccccuugcaacggcguggagggcuucaacugcuacuucccucugcagagcuacggcuuccagcccaccuacggcgugggcuaccagcccuaccgggugguggugcugagcuucgagcugcugcacgccccagccaccguguguggccccaagaagagcaccaaccuggugaagaacaagugcgugaacuucaacuucaacggccuuaccggcaccggcgugcugaccgagagcaacaagaaauuccugcccuuucagcaguucggccgggacaucgccgacaccaccgacgcugugcgggauccccagacccuggagauccuggacaucaccccuugcagcuucggcggcgugagcgugaucaccccaggcaccaacaccagcaaccagguggccgugcuguaccagggcgugaacugcaccgaggugcccguggccauccacgccgaccagcugacacccaccuggcgggucuacagcaccggcagcaacguguuccagacccgggccgguugccugaucggcgccgagcacgugaacaacagcuacgagugcgacauccccaucggcgccggcaucugugccagcuaccagacccagaccaauucaccccggagggcaaggagcguggccagccagagcaucaucgccuacaccaugagccugggcgccgagaacagcguggccuacagcaacaacagcaucgccauccccaccaacuucaccaucagcgugaccaccgagauucugcccgugagcaugaccaagaccagcguggacugcaccauguacaucugcggcgacagcaccgagugcagcaaccugcugcugcaguacggcagcuucugcacccagcugaaccgggcccugaccggcaucgccguggagcaggacaagaacacccaggagguguucgcccaggugaagcagaucuacaagaccccucccaucaaggacuucggcggcuucaacuucagccagauccugcccgaccccagcaagcccagcaagcggagcuucaucgaggaccugcuguucaacaaggugacccuagccgacgccggcuucaucaagcaguacggcgacugccucggcgacauagccgcccgggaccugaucugcgcccagaaguucaacggccugaccgugcugccuccccugcugaccgacgagaugaucgcccaguacaccagcgcccuguuagccggaaccaucaccagcggcuggacuuucggcgcuggagccgcucugcagauccccuucgccaugcagauggccuaccgguucaacggcaucggcgugacccagaacgugcuguacgagaaccagaagcugaucgccaaccaguucaacagcgccaucggcaagauccaggacagccugagcagcaccgcuagcgcccugggcaagcugcaggacguggugaaccagaacgcccaggcccugaacacccuggugaagcagcugagcagcaacuucggcgccaucagcagcgugcugaacgacauccugagccggcuggacaaggucgaggccgaggugcagaucgaccggcugaucacuggccggcugcagagccugcagaccuacgugacccagcagcugauccgggccgccgagauucgggccagcgccaaccuggccgccaccaagaugagcgagugcgugcugggccagagcaagcggguggacuucugcggcaagggcuaccaccugaugagcuuuccccagagcgcaccccacggagugguguuccugcacgugaccuacgugcccgcccaggagaagaacuucaccaccgccccagccaucugccacgacggcaaggcccacuuuccccgggagggcguguucgugagcaacggcacccacugguucgugacccagcggaacuucuacgagccccagaucaucaccaccgacaacaccuucgugagcggcaacugcgacguggugaucggcaucgugaacaacaccguguacgauccccugcagcccgagcuggacagcuucaaggaggagcuggacaaguacuucaagaaucacaccagccccgacguggaccugggcgacaucagcggcaucaacgccagcguggugaacauccagaaggagaucgaucggcugaacgagguggccaagaaccugaacgagagccugaucgaccugcaggagcugggcaaguacgagcaguacaucaaguggcccugguacaucuggcugggcuucaucgccggccugaucgccaucgugauggugaccaucaugcugugcugcaugaccagcugcugcagcugccugaagggcuguugcagcugcggcagcugcugcaaguucgacgaggacgacagcgagcccgugcugaagggcgugaagcugcacuacaccugaggacuaguuauaagacugacuagcccgaugggccucccaacgggcccuccuccccuccuugcaccgagauuaauaaaaaaaaaaaaaaaaaaaaaaaaaaaaaaaaaaaaaaaaaaaaaaaaaaaaaaaaaaaaaaaaugcaucccccccccccccccccccccccccccccccaaaggcucuuuucagagccaccagaauu

SEQ ID NO: 23231 - RNA, 4033 nt, Artificial Sequence
  SARS-CoV-2/Wuhan/WIV05/2019__EPI_ISL_402128 spike protein mRNA gc (1-1273)(H69del_V70del_D614G)
aggagaaagcuuaccauguucguguuccuggugcugcugccccuggugagcagccagugcgugaaccugaccacccggacccagcugccaccagccuacaccaacagcuucacccggggcgucuacuaccccgacaagguguuccggagcagcguccugcacagcacccaggaccuguuccugcccuucuucagcaacgugaccugguuccacgccaucagcggcaccaacggcaccaagcgguucgacaaccccgugcugcccuucaacgacggcguguacuucgccagcaccgagaagagcaacaucauccggggcuggaucuucggcaccacccuggacagcaagacccagagccugcugaucgugaauaacgccaccaacguggugaucaaggugugcgaguuccaguucugcaacgaccccuuccugggcguguacuaccacaagaacaacaagagcuggauggagagcgaguuccggguguacagcagcgccaacaacugcaccuucgaguacgugagccagcccuuccugauggaccuggagggcaagcagggcaacuucaagaaccugcgggaguucguguucaagaacaucgacggcuacuucaagaucuacagcaagcacaccccaaucaaccuggugcgggaucugccccagggcuucucagcccuggagccccugguggaccugcccaucggcaucaacaucacccgguuccagacccugcuggcccugcaccggagcuaccugaccccaggcgacagcagcagcggguggacagcaggcgcggcugcuuacuacgugggcuaccugcagccccggaccuuccugcugaaguacaacgagaacggcaccaucaccgacgccguggacugcgcccuggacccucugagcgagaccaagugcacccugaagagcuucaccguggagaagggcaucuaccagaccagcaacuuccgggugcagcccaccgagagcaucgugcgguuccccaacaucaccaaccugugccccuucggcgagguguucaacgccacccgguucgccagcguguacgccuggaaccggaagcggaucagcaacugcguggccgacuacagcgugcuguacaacagcgccagcuucagcaccuucaagugcuacggcgugagccccaccaagcugaacgaccugugcuucaccaacguguacgccgacagcuucgugauccguggcgacgaggugcggcagaucgcacccggccagacaggcaagaucgccgacuacaacuacaagcugcccgacgacuucaccggcugcgugaucgccuggaacagcaacaaccucgacagcaaggugggcggcaacuacaacuaccuguaccggcuguuccggaagagcaaccugaagcccuucgagcgggacaucagcaccgagaucuaccaagccggcuccaccccuugcaacggcguggagggcuucaacugcuacuucccucugcagagcuacggcuuccagcccaccaacggcgugggcuaccagcccuaccgggugguggugcugagcuucgagcugcugcacgccccagccaccguguguggccccaagaagagcaccaaccuggugaagaacaagugcgugaacuucaacuucaacggccuuaccggcaccggcgugcugaccgagagcaacaagaaauuccugcccuuucagcaguucggccgggacaucgccgacaccaccgacgcugugcgggauccccagacccuggagauccuggacaucaccccuugcagcuucggcggcgugagcgugaucaccccaggcaccaacaccagcaaccagguggccgugcuguaccagggcgugaacugcaccgaggugcccguggccauccacgccgaccagcugacacccaccuggcgggucuacagcaccggcagcaacguguuccagacccgggccgguugccugaucggcgccgagcacgugaacaacagcuacgagugcgacauccccaucggcgccggcaucugugccagcuaccagacccagaccaauucaccccggagggcaaggagcguggccagccagagcaucaucgccuacaccaugagccugggcgccgagaacagcguggccuacagcaacaacagcaucgccauccccaccaacuucaccaucagcgugaccaccgagauucugcccgugagcaugaccaagaccagcguggacugcaccauguacaucugcggcgacagcaccgagugcagcaaccugcugcugcaguacggcagcuucugcacccagcugaaccgggcccugaccggcaucgccguggagcaggacaagaacacccaggagguguucgcccaggugaagcagaucuacaagaccccucccaucaaggacuucggcggcuucaacuucagccagauccugcccgaccccagcaagcccagcaagcggagcuucaucgaggaccugcuguucaacaaggugacccuagccgacgccggcuucaucaagcaguacggcgacugccucggcgacauagccgcccgggaccugaucugcgcccagaaguucaacggccugaccgugcugccuccccugcugaccgacgagaugaucgcccaguacaccagcgcccuguuagccggaaccaucaccagcggcuggacuuucggcgcuggagccgcucugcagauccccuucgccaugcagauggccuaccgguucaacggcaucggcgugacccagaacgugcuguacgagaaccagaagcugaucgccaaccaguucaacagcgccaucggcaagauccaggacagccugagcagcaccgcuagcgcccugggcaagcugcaggacguggugaaccagaacgcccaggcccugaacacccuggugaagcagcugagcagcaacuucggcgccaucagcagcgugcugaacgacauccugagccggcuggacaaggucgaggccgaggugcagaucgaccggcugaucacuggccggcugcagagccugcagaccuacgugacccagcagcugauccgggccgccgagauucgggccagcgccaaccuggccgccaccaagaugagcgagugcgugcugggccagagcaagcggguggacuucugcggcaagggcuaccaccugaugagcuuuccccagagcgcaccccacggagugguguuccugcacgugaccuacgugcccgcccaggagaagaacuucaccaccgccccagccaucugccacgacggcaaggcccacuuuccccgggagggcguguucgugagcaacggcacccacugguucgugacccagcggaacuucuacgagccccagaucaucaccaccgacaacaccuucgugagcggcaacugcgacguggugaucggcaucgugaacaacaccguguacgauccccugcagcccgagcuggacagcuucaaggaggagcuggacaaguacuucaagaaucacaccagccccgacguggaccugggcgacaucagcggcaucaacgccagcguggugaacauccagaaggagaucgaucggcugaacgagguggccaagaaccugaacgagagccugaucgaccugcaggagcugggcaaguacgagcaguacaucaaguggcccugguacaucuggcugggcuucaucgccggccugaucgccaucgugauggugaccaucaugcugugcugcaugaccagcugcugcagcugccugaagggcuguugcagcugcggcagcugcugcaaguucgacgaggacgacagcgagcccgugcugaagggcgugaagcugcacuacaccugaggacuaguuauaagacugacuagcccgaugggccucccaacgggcccuccuccccuccuugcaccgagauuaauaaaaaaaaaaaaaaaaaaaaaaaaaaaaaaaaaaaaaaaaaaaaaaaaaaaaaaaaaaaaaaaaugcaucccccccccccccccccccccccccccccccaaaggcucuuuucagagccaccagaauu

SEQ ID NO: 23232 - RNA, 4039 nt, Artificial Sequence
  SARS-CoV-2/Wuhan/WIV05/2019__EPI_ISL_402128 spike protein mRNA gc (1-1273)(Y453F_D614G)
aggagaaagcuuaccauguucguguuccuggugcugcugccccuggugagcagccagugcgugaaccugaccacccggacccagcugccaccagccuacaccaacagcuucacccggggcgucuacuaccccgacaagguguuccggagcagcguccugcacagcacccaggaccuguuccugcccuucuucagcaacgugaccugguuccacgccauccacgugagcggcaccaacggcaccaagcgguucgacaaccccgugcugcccuucaacgacggcguguacuucgccagcaccgagaagagcaacaucauccggggcuggaucuucggcaccacccuggacagcaagacccagagccugcugaucgugaauaacgccaccaacguggugaucaaggugugcgaguuccaguucugcaacgaccccuuccugggcguguacuaccacaagaacaacaagagcuggauggagagcgaguuccggguguacagcagcgccaacaacugcaccuucgaguacgugagccagcccuuccugauggaccuggagggcaagcagggcaacuucaagaaccugcgggaguucguguucaagaacaucgacggcuacuucaagaucuacagcaagcacaccccaaucaaccuggugcgggaucugccccagggcuucucagcccuggagccccugguggaccugcccaucggcaucaacaucacccgguuccagacccugcuggcccugcaccggagcuaccugaccccaggcgacagcagcagcggguggacagcaggcgcggcugcuuacuacgugggcuaccugcagccccggaccuuccugcugaaguacaacgagaacggcaccaucaccgacgccguggacugcgcccuggacccucugagcgagaccaagugcacccugaagagcuucaccguggagaagggcaucuaccagaccagcaacuuccgggugcagcccaccgagagcaucgugcgguuccccaacaucaccaaccugugccccuucggcgagguguucaacgccacccgguucgccagcguguacgccuggaaccggaagcggaucagcaacugcguggccgacuacagcgugcuguacaacagcgccagcuucagcaccuucaagugcuacggcgugagccccaccaagcugaacgaccugugcuucaccaacguguacgccgacagcuucgugauccguggcgacgaggugcggcagaucgcacccggccagacaggcaagaucgccgacuacaacuacaagcugcccgacgacuucaccggcugcgugaucgccuggaacagcaacaaccucgacagcaaggugggcggcaacuacaacuaccuguuccggcuguuccggaagagcaaccugaagcccuucgagcgggacaucagcaccgagaucuaccaagccggcuccaccccuugcaacggcguggagggcuucaacugcuacuucccucugcagagcuacggcuuccagcccaccaacggcgugggcuaccagcccuaccgggugguggugcugagcuucgagcugcugcacgccccagccaccguguguggccccaagaagagcaccaaccuggugaagaacaagugcgugaacuucaacuucaacggccuuaccggcaccggcgugcugaccgagagcaacaagaaauuccugcccuuucagcaguucggccgggacaucgccgacaccaccgacgcugugcgggauccccagacccuggagauccuggacaucaccccuugcagcuucggcggcgugagcgugaucaccccaggcaccaacaccagcaaccagguggccgugcuguaccagggcgugaacugcaccgaggugcccguggccauccacgccgaccagcugacacccaccuggcgggucuacagcaccggcagcaacguguuccagacccgggccgguugccugaucggcgccgagcacgugaacaacagcuacgagugcgacauccccaucggcgccggcaucugugccagcuaccagacccagaccaauucaccccggagggcaaggagcguggccagccagagcaucaucgccuacaccaugagccugggcgccgagaacagcguggccuacagcaacaacagcaucgccauccccaccaacuucaccaucagcgugaccaccgagauucugcccgugagcaugaccaagaccagcguggacugcaccauguacaucugcggcgacagcaccgagugcagcaaccugcugcugcaguacggcagcuucugcacccagcugaaccgggcccugaccggcaucgccguggagcaggacaagaacacccaggagguguucgcccaggugaagcagaucuacaagaccccucccaucaaggacuucggcggcuucaacuucagccagauccugcccgaccccagcaagcccagcaagcggagcuucaucgaggaccugcuguucaacaaggugacccuagccgacgccggcuucaucaagcaguacggcgacugccucggcgacauagccgcccgggaccugaucugcgcccagaaguucaacggccugaccgugcugccuccccugcugaccgacgagaugaucgcccaguacaccagcgcccuguuagccggaaccaucaccagcggcuggacuuucggcgcuggagccgcucugcagauccccuucgccaugcagauggccuaccgguucaacggcaucggcgugacccagaacgugcuguacgagaaccagaagcugaucgccaaccaguucaacagcgccaucggcaagauccaggacagccugagcagcaccgcuagcgcccugggcaagcugcaggacguggugaaccagaacgcccaggcccugaacacccuggugaagcagcugagcagcaacuucggcgccaucagcagcgugcugaacgacauccugagccggcuggacaaggucgaggccgaggugcagaucgaccggcugaucacuggccggcugcagagccugcagaccuacgugacccagcagcugauccgggccgccgagauucgggccagcgccaaccuggccgccaccaagaugagcgagugcgugcugggccagagcaagcggguggacuucugcggcaagggcuaccaccugaugagcuuuccccagagcgcaccccacggagugguguuccugcacgugaccuacgugcccgcccaggagaagaacuucaccaccgccccagccaucugccacgacggcaaggcccacuuuccccgggagggcguguucgugagcaacggcacccacugguucgugacccagcggaacuucuacgagccccagaucaucaccaccgacaacaccuucgugagcggcaacugcgacguggugaucggcaucgugaacaacaccguguacgauccccugcagcccgagcuggacagcuucaaggaggagcuggacaaguacuucaagaaucacaccagccccgacguggaccugggcgacaucagcggcaucaacgccagcguggugaacauccagaaggagaucgaucggcugaacgagguggccaagaaccugaacgagagccugaucgaccugcaggagcugggcaaguacgagcaguacaucaaguggcccugguacaucuggcugggcuucaucgccggccugaucgccaucgugauggugaccaucaugcugugcugcaugaccagcugcugcagcugccugaagggcuguugcagcugcggcagcugcugcaaguucgacgaggacgacagcgagcccgugcugaagggcgugaagcugcacuacaccugaggacuaguuauaagacugacuagcccgaugggccucccaacgggcccuccuccccuccuugcaccgagauuaauaaaaaaaaaaaaaaaaaaaaaaaaaaaaaaaaaaaaaaaaaaaaaaaaaaaaaaaaaaaaaaaaugcaucccccccccccccccccccccccccccccccaaaggcucuuuucagagccaccagaauu

SEQ ID NO: 23233 - RNA, 4039 nt, Artificial Sequence
  SARS-CoV-2/Wuhan/WIV05/2019__EPI_ISL_402128 spike protein mRNA gc (1-1273)(D614G_I692V)
aggagaaagcuuaccauguucguguuccuggugcugcugccccuggugagcagccagugcgugaaccugaccacccggacccagcugccaccagccuacaccaacagcuucacccggggcgucuacuaccccgacaagguguuccggagcagcguccugcacagcacccaggaccuguuccugcccuucuucagcaacgugaccugguuccacgccauccacgugagcggcaccaacggcaccaagcgguucgacaaccccgugcugcccuucaacgacggcguguacuucgccagcaccgagaagagcaacaucauccggggcuggaucuucggcaccacccuggacagcaagacccagagccugcugaucgugaauaacgccaccaacguggugaucaaggugugcgaguuccaguucugcaacgaccccuuccugggcguguacuaccacaagaacaacaagagcuggauggagagcgaguuccggguguacagcagcgccaacaacugcaccuucgaguacgugagccagcccuuccugauggaccuggagggcaagcagggcaacuucaagaaccugcgggaguucguguucaagaacaucgacggcuacuucaagaucuacagcaagcacaccccaaucaaccuggugcgggaucugccccagggcuucucagcccuggagccccugguggaccugcccaucggcaucaacaucacccgguuccagacccugcuggcccugcaccggagcuaccugaccccaggcgacagcagcagcggguggacagcaggcgcggcugcuuacuacgugggcuaccugcagccccggaccuuccugcugaaguacaacgagaacggcaccaucaccgacgccguggacugcgcccuggacccucugagcgagaccaagugcacccugaagagcuucaccguggagaagggcaucuaccagaccagcaacuuccgggugcagcccaccgagagcaucgugcgguuccccaacaucaccaaccugugccccuucggcgagguguucaacgccacccgguucgccagcguguacgccuggaaccggaagcggaucagcaacugcguggccgacuacagcgugcuguacaacagcgccagcuucagcaccuucaagugcuacggcgugagccccaccaagcugaacgaccugugcuucaccaacguguacgccgacagcuucgugauccguggcgacgaggugcggcagaucgcacccggccagacaggcaagaucgccgacuacaacuacaagcugcccgacgacuucaccggcugcgugaucgccuggaacagcaacaaccucgacagcaaggugggcggcaacuacaacuaccuguaccggcuguuccggaagagcaaccugaagcccuucgagcgggacaucagcaccgagaucuaccaagccggcuccaccccuugcaacggcguggagggcuucaacugcuacuucccucugcagagcuacggcuuccagcccaccaacggcgugggcuaccagcccuaccgggugguggugcugagcuucgagcugcugcacgccccagccaccguguguggccccaagaagagcaccaaccuggugaagaacaagugcgugaacuucaacuucaacggccuuaccggcaccggcgugcugaccgagagcaacaagaaauuccugcccuuucagcaguucggccgggacaucgccgacaccaccgacgcugugcgggauccccagacccuggagauccuggacaucaccccuugcagcuucggcggcgugagcgugaucaccccaggcaccaacaccagcaaccagguggccgugcuguaccagggcgugaacugcaccgaggugcccguggccauccacgccgaccagcugacacccaccuggcgggucuacagcaccggcagcaacguguuccagacccgggccgguugccugaucggcgccgagcacgugaacaacagcuacgagugcgacauccccaucggcgccggcaucugugccagcuaccagacccagaccaauucaccccggagggcaaggagcguggccagccagagcgugaucgccuacaccaugagccugggcgccgagaacagcguggccuacagcaacaacagcaucgccauccccaccaacuucaccaucagcgugaccaccgagauucugcccgugagcaugaccaagaccagcguggacugcaccauguacaucugcggcgacagcaccgagugcagcaaccugcugcugcaguacggcagcuucugcacccagcugaaccgggcccugaccggcaucgccguggagcaggacaagaacacccaggagguguucgcccaggugaagcagaucuacaagaccccucccaucaaggacuucggcggcuucaacuucagccagauccugcccgaccccagcaagcccagcaagcggagcuucaucgaggaccugcuguucaacaaggugacccuagccgacgccggcuucaucaagcaguacggcgacugccucggcgacauagccgcccgggaccugaucugcgcccagaaguucaacggccugaccgugcugccuccccugcugaccgacgagaugaucgcccaguacaccagcgcccuguuagccggaaccaucaccagcggcuggacuuucggcgcuggagccgcucugcagauccccuucgccaugcagauggccuaccgguucaacggcaucggcgugacccagaacgugcuguacgagaaccagaagcugaucgccaaccaguucaacagcgccaucggcaagauccaggacagccugagcagcaccgcuagcgcccugggcaagcugcaggacguggugaaccagaacgcccaggcccugaacacccuggugaagcagcugagcagcaacuucggcgccaucagcagcgugcugaacgacauccugagccggcuggacaaggucgaggccgaggugcagaucgaccggcugaucacuggccggcugcagagccugcagaccuacgugacccagcagcugauccgggccgccgagauucgggccagcgccaaccuggccgccaccaagaugagcgagugcgugcugggccagagcaagcggguggacuucugcggcaagggcuaccaccugaugagcuuuccccagagcgcaccccacggagugguguuccugcacgugaccuacgugcccgcccaggagaagaacuucaccaccgccccagccaucugccacgacggcaaggcccacuuuccccgggagggcguguucgugagcaacggcacccacugguucgugacccagcggaacuucuacgagccccagaucaucaccaccgacaacaccuucgugagcggcaacugcgacguggugaucggcaucgugaacaacaccguguacgauccccugcagcccgagcuggacagcuucaaggaggagcuggacaaguacuucaagaaucacaccagccccgacguggaccugggcgacaucagcggcaucaacgccagcguggugaacauccagaaggagaucgaucggcugaacgagguggccaagaaccugaacgagagccugaucgaccugcaggagcugggcaaguacgagcaguacaucaaguggcccugguacaucuggcugggcuucaucgccggccugaucgccaucgugauggugaccaucaugcugugcugcaugaccagcugcugcagcugccugaagggcuguugcagcugcggcagcugcugcaaguucgacgaggacgacagcgagcccgugcugaagggcgugaagcugcacuacaccugaggacuaguuauaagacugacuagcccgaugggccucccaacgggcccuccuccccuccuugcaccgagauuaauaaaaaaaaaaaaaaaaaaaaaaaaaaaaaaaaaaaaaaaaaaaaaaaaaaaaaaaaaaaaaaaaugcaucccccccccccccccccccccccccccccccaaaggcucuuuucagagccaccagaauu

SEQ ID NO: 23234 - RNA, 4039 nt, Artificial Sequence
  SARS-CoV-2/Wuhan/WIV05/2019__EPI_ISL_402128 spike protein mRNA gc (1-1273)(D614G_M1229I)
aggagaaagcuuaccauguucguguuccuggugcugcugccccuggugagcagccagugcgugaaccugaccacccggacccagcugccaccagccuacaccaacagcuucacccggggcgucuacuaccccgacaagguguuccggagcagcguccugcacagcacccaggaccuguuccugcccuucuucagcaacgugaccugguuccacgccauccacgugagcggcaccaacggcaccaagcgguucgacaaccccgugcugcccuucaacgacggcguguacuucgccagcaccgagaagagcaacaucauccggggcuggaucuucggcaccacccuggacagcaagacccagagccugcugaucgugaauaacgccaccaacguggugaucaaggugugcgaguuccaguucugcaacgaccccuuccugggcguguacuaccacaagaacaacaagagcuggauggagagcgaguuccggguguacagcagcgccaacaacugcaccuucgaguacgugagccagcccuuccugauggaccuggagggcaagcagggcaacuucaagaaccugcgggaguucguguucaagaacaucgacggcuacuucaagaucuacagcaagcacaccccaaucaaccuggugcgggaucugccccagggcuucucagcccuggagccccugguggaccugcccaucggcaucaacaucacccgguuccagacccugcuggcccugcaccggagcuaccugaccccaggcgacagcagcagcggguggacagcaggcgcggcugcuuacuacgugggcuaccugcagccccggaccuuccugcugaaguacaacgagaacggcaccaucaccgacgccguggacugcgcccuggacccucugagcgagaccaagugcacccugaagagcuucaccguggagaagggcaucuaccagaccagcaacuuccgggugcagcccaccgagagcaucgugcgguuccccaacaucaccaaccugugccccuucggcgagguguucaacgccacccgguucgccagcguguacgccuggaaccggaagcggaucagcaacugcguggccgacuacagcgugcuguacaacagcgccagcuucagcaccuucaagugcuacggcgugagccccaccaagcugaacgaccugugcuucaccaacguguacgccgacagcuucgugauccguggcgacgaggugcggcagaucgcacccggccagacaggcaagaucgccgacuacaacuacaagcugcccgacgacuucaccggcugcgugaucgccuggaacagcaacaaccucgacagcaaggugggcggcaacuacaacuaccuguaccggcuguuccggaagagcaaccugaagcccuucgagcgggacaucagcaccgagaucuaccaagccggcuccaccccuugcaacggcguggagggcuucaacugcuacuucccucugcagagcuacggcuuccagcccaccaacggcgugggcuaccagcccuaccgggugguggugcugagcuucgagcugcugcacgccccagccaccguguguggccccaagaagagcaccaaccuggugaagaacaagugcgugaacuucaacuucaacggccuuaccggcaccggcgugcugaccgagagcaacaagaaauuccugcccuuucagcaguucggccgggacaucgccgacaccaccgacgcugugcgggauccccagacccuggagauccuggacaucaccccuugcagcuucggcggcgugagcgugaucaccccaggcaccaacaccagcaaccagguggccgugcuguaccagggcgugaacugcaccgaggugcccguggccauccacgccgaccagcugacacccaccuggcgggucuacagcaccggcagcaacguguuccagacccgggccgguugccugaucggcgccgagcacgugaacaacagcuacgagugcgacauccccaucggcgccggcaucugugccagcuaccagacccagaccaauucaccccggagggcaaggagcguggccagccagagcaucaucgccuacaccaugagccugggcgccgagaacagcguggccuacagcaacaacagcaucgccauccccaccaacuucaccaucagcgugaccaccgagauucugcccgugagcaugaccaagaccagcguggacugcaccauguacaucugcggcgacagcaccgagugcagcaaccugcugcugcaguacggcagcuucugcacccagcugaaccgggcccugaccggcaucgccguggagcaggacaagaacacccaggagguguucgcccaggugaagcagaucuacaagaccccucccaucaaggacuucggcggcuucaacuucagccagauccugcccgaccccagcaagcccagcaagcggagcuucaucgaggaccugcuguucaacaaggugacccuagccgacgccggcuucaucaagcaguacggcgacugccucggcgacauagccgcccgggaccugaucugcgcccagaaguucaacggccugaccgugcugccuccccugcugaccgacgagaugaucgcccaguacaccagcgcccuguuagccggaaccaucaccagcggcuggacuuucggcgcuggagccgcucugcagauccccuucgccaugcagauggccuaccgguucaacggcaucggcgugacccagaacgugcuguacgagaaccagaagcugaucgccaaccaguucaacagcgccaucggcaagauccaggacagccugagcagcaccgcuagcgcccugggcaagcugcaggacguggugaaccagaacgcccaggcccugaacacccuggugaagcagcugagcagcaacuucggcgccaucagcagcgugcugaacgacauccugagccggcuggacaaggucgaggccgaggugcagaucgaccggcugaucacuggccggcugcagagccugcagaccuacgugacccagcagcugauccgggccgccgagauucgggccagcgccaaccuggccgccaccaagaugagcgagugcgugcugggccagagcaagcggguggacuucugcggcaagggcuaccaccugaugagcuuuccccagagcgcaccccacggagugguguuccugcacgugaccuacgugcccgcccaggagaagaacuucaccaccgccccagccaucugccacgacggcaaggcccacuuuccccgggagggcguguucgugagcaacggcacccacugguucgugacccagcggaacuucuacgagccccagaucaucaccaccgacaacaccuucgugagcggcaacugcgacguggugaucggcaucgugaacaacaccguguacgauccccugcagcccgagcuggacagcuucaaggaggagcuggacaaguacuucaagaaucacaccagccccgacguggaccugggcgacaucagcggcaucaacgccagcguggugaacauccagaaggagaucgaucggcugaacgagguggccaagaaccugaacgagagccugaucgaccugcaggagcugggcaaguacgagcaguacaucaaguggcccugguacaucuggcugggcuucaucgccggccugaucgccaucgugaucgugaccaucaugcugugcugcaugaccagcugcugcagcugccugaagggcuguugcagcugcggcagcugcugcaaguucgacgaggacgacagcgagcccgugcugaagggcgugaagcugcacuacaccugaggacuaguuauaagacugacuagcccgaugggccucccaacgggcccuccuccccuccuugcaccgagauuaauaaaaaaaaaaaaaaaaaaaaaaaaaaaaaaaaaaaaaaaaaaaaaaaaaaaaaaaaaaaaaaaaugcaucccccccccccccccccccccccccccccccaaaggcucuuuucagagccaccagaauu

SEQ ID NO: 23235 - RNA, 4033 nt, Artificial Sequence
  SARS-CoV-2/Wuhan/WIV05/2019__EPI_ISL_402128 spike protein mRNA gc (1-1273)(H69del_V70del_A222V_Y453F_S477N_D614G_I692V)
aggagaaagcuuaccauguucguguuccuggugcugcugccccuggugagcagccagugcgugaaccugaccacccggacccagcugccaccagccuacaccaacagcuucacccggggcgucuacuaccccgacaagguguuccggagcagcguccugcacagcacccaggaccuguuccugcccuucuucagcaacgugaccugguuccacgccaucagcggcaccaacggcaccaagcgguucgacaaccccgugcugcccuucaacgacggcguguacuucgccagcaccgagaagagcaacaucauccggggcuggaucuucggcaccacccuggacagcaagacccagagccugcugaucgugaauaacgccaccaacguggugaucaaggugugcgaguuccaguucugcaacgaccccuuccugggcguguacuaccacaagaacaacaagagcuggauggagagcgaguuccggguguacagcagcgccaacaacugcaccuucgaguacgugagccagcccuuccugauggaccuggagggcaagcagggcaacuucaagaaccugcgggaguucguguucaagaacaucgacggcuacuucaagaucuacagcaagcacaccccaaucaaccuggugcgggaucugccccagggcuucucagugcuggagccccugguggaccugcccaucggcaucaacaucacccgguuccagacccugcuggcccugcaccggagcuaccugaccccaggcgacagcagcagcggguggacagcaggcgcggcugcuuacuacgugggcuaccugcagccccggaccuuccugcugaaguacaacgagaacggcaccaucaccgacgccguggacugcgcccuggacccucugagcgagaccaagugcacccugaagagcuucaccguggagaagggcaucuaccagaccagcaacuuccgggugcagcccaccgagagcaucgugcgguuccccaacaucaccaaccugugccccuucggcgagguguucaacgccacccgguucgccagcguguacgccuggaaccggaagcggaucagcaacugcguggccgacuacagcgugcuguacaacagcgccagcuucagcaccuucaagugcuacggcgugagccccaccaagcugaacgaccugugcuucaccaacguguacgccgacagcuucgugauccguggcgacgaggugcggcagaucgcacccggccagacaggcaagaucgccgacuacaacuacaagcugcccgacgacuucaccggcugcgugaucgccuggaacagcaacaaccucgacagcaaggugggcggcaacuacaacuaccuguuccggcuguuccggaagagcaaccugaagcccuucgagcgggacaucagcaccgagaucuaccaagccggcaacaccccuugcaacggcguggagggcuucaacugcuacuucccucugcagagcuacggcuuccagcccaccaacggcgugggcuaccagcccuaccgggugguggugcugagcuucgagcugcugcacgccccagccaccguguguggccccaagaagagcaccaaccuggugaagaacaagugcgugaacuucaacuucaacggccuuaccggcaccggcgugcugaccgagagcaacaagaaauuccugcccuuucagcaguucggccgggacaucgccgacaccaccgacgcugugcgggauccccagacccuggagauccuggacaucaccccuugcagcuucggcggcgugagcgugaucaccccaggcaccaacaccagcaaccagguggccgugcuguaccagggcgugaacugcaccgaggugcccguggccauccacgccgaccagcugacacccaccuggcgggucuacagcaccggcagcaacguguuccagacccgggccgguugccugaucggcgccgagcacgugaacaacagcuacgagugcgacauccccaucggcgccggcaucugugccagcuaccagacccagaccaauucaccccggagggcaaggagcguggccagccagagcgugaucgccuacaccaugagccugggcgccgagaacagcguggccuacagcaacaacagcaucgccauccccaccaacuucaccaucagcgugaccaccgagauucugcccgugagcaugaccaagaccagcguggacugcaccauguacaucugcggcgacagcaccgagugcagcaaccugcugcugcaguacggcagcuucugcacccagcugaaccgggcccugaccggcaucgccguggagcaggacaagaacacccaggagguguucgcccaggugaagcagaucuacaagaccccucccaucaaggacuucggcggcuucaacuucagccagauccugcccgaccccagcaagcccagcaagcggagcuucaucgaggaccugcuguucaacaaggugacccuagccgacgccggcuucaucaagcaguacggcgacugccucggcgacauagccgcccgggaccugaucugcgcccagaaguucaacggccugaccgugcugccuccccugcugaccgacgagaugaucgcccaguacaccagcgcccuguuagccggaaccaucaccagcggcuggacuuucggcgcuggagccgcucugcagauccccuucgccaugcagauggccuaccgguucaacggcaucggcgugacccagaacgugcuguacgagaaccagaagcugaucgccaaccaguucaacagcgccaucggcaagauccaggacagccugagcagcaccgcuagcgcccugggcaagcugcaggacguggugaaccagaacgcccaggcccugaacacccuggugaagcagcugagcagcaacuucggcgccaucagcagcgugcugaacgacauccugagccggcuggacaaggucgaggccgaggugcagaucgaccggcugaucacuggccggcugcagagccugcagaccuacgugacccagcagcugauccgggccgccgagauucgggccagcgccaaccuggccgccaccaagaugagcgagugcgugcugggccagagcaagcggguggacuucugcggcaagggcuaccaccugaugagcuuuccccagagcgcaccccacggagugguguuccugcacgugaccuacgugcccgcccaggagaagaacuucaccaccgccccagccaucugccacgacggcaaggcccacuuuccccgggagggcguguucgugagcaacggcacccacugguucgugacccagcggaacuucuacgagccccagaucaucaccaccgacaacaccuucgugagcggcaacugcgacguggugaucggcaucgugaacaacaccguguacgauccccugcagcccgagcuggacagcuucaaggaggagcuggacaaguacuucaagaaucacaccagccccgacguggaccugggcgacaucagcggcaucaacgccagcguggugaacauccagaaggagaucgaucggcugaacgagguggccaagaaccugaacgagagccugaucgaccugcaggagcugggcaaguacgagcaguacaucaaguggcccugguacaucuggcugggcuucaucgccggccugaucgccaucgugauggugaccaucaugcugugcugcaugaccagcugcugcagcugccugaagggcuguugcagcugcggcagcugcugcaaguucgacgaggacgacagcgagcccgugcugaagggcgugaagcugcacuacaccugaggacuaguuauaagacugacuagcccgaugggccucccaacgggcccuccuccccuccuugcaccgagauuaauaaaaaaaaaaaaaaaaaaaaaaaaaaaaaaaaaaaaaaaaaaaaaaaaaaaaaaaaaaaaaaaaugcaucccccccccccccccccccccccccccccccaaaggcucuuuucagagccaccagaauu

SEQ ID NO: 23236 - RNA, 4033 nt, Artificial Sequence
  SARS-CoV-2/Wuhan/WIV05/2019__EPI_ISL_402128 spike protein mRNA gc (1-1273)(H69del_V70del_Y453F_D614G_I692V_M1229I)
aggagaaagcuuaccauguucguguuccuggugcugcugccccuggugagcagccagugcgugaaccugaccacccggacccagcugccaccagccuacaccaacagcuucacccggggcgucuacuaccccgacaagguguuccggagcagcguccugcacagcacccaggaccuguuccugcccuucuucagcaacgugaccugguuccacgccaucagcggcaccaacggcaccaagcgguucgacaaccccgugcugcccuucaacgacggcguguacuucgccagcaccgagaagagcaacaucauccggggcuggaucuucggcaccacccuggacagcaagacccagagccugcugaucgugaauaacgccaccaacguggugaucaaggugugcgaguuccaguucugcaacgaccccuuccugggcguguacuaccacaagaacaacaagagcuggauggagagcgaguuccggguguacagcagcgccaacaacugcaccuucgaguacgugagccagcccuuccugauggaccuggagggcaagcagggcaacuucaagaaccugcgggaguucguguucaagaacaucgacggcuacuucaagaucuacagcaagcacaccccaaucaaccuggugcgggaucugccccagggcuucucagcccuggagccccugguggaccugcccaucggcaucaacaucacccgguuccagacccugcuggcccugcaccggagcuaccugaccccaggcgacagcagcagcggguggacagcaggcgcggcugcuuacuacgugggcuaccugcagccccggaccuuccugcugaaguacaacgagaacggcaccaucaccgacgccguggacugcgcccuggacccucugagcgagaccaagugcacccugaagagcuucaccguggagaagggcaucuaccagaccagcaacuuccgggugcagcccaccgagagcaucgugcgguuccccaacaucaccaaccugugccccuucggcgagguguucaacgccacccgguucgccagcguguacgccuggaaccggaagcggaucagcaacugcguggccgacuacagcgugcuguacaacagcgccagcuucagcaccuucaagugcuacggcgugagccccaccaagcugaacgaccugugcuucaccaacguguacgccgacagcuucgugauccguggcgacgaggugcggcagaucgcacccggccagacaggcaagaucgccgacuacaacuacaagcugcccgacgacuucaccggcugcgugaucgccuggaacagcaacaaccucgacagcaaggugggcggcaacuacaacuaccuguuccggcuguuccggaagagcaaccugaagcccuucgagcgggacaucagcaccgagaucuaccaagccggcuccaccccuugcaacggcguggagggcuucaacugcuacuucccucugcagagcuacggcuuccagcccaccaacggcgugggcuaccagcccuaccgggugguggugcugagcuucgagcugcugcacgccccagccaccguguguggccccaagaagagcaccaaccuggugaagaacaagugcgugaacuucaacuucaacggccuuaccggcaccggcgugcugaccgagagcaacaagaaauuccugcccuuucagcaguucggccgggacaucgccgacaccaccgacgcugugcgggauccccagacccuggagauccuggacaucaccccuugcagcuucggcggcgugagcgugaucaccccaggcaccaacaccagcaaccagguggccgugcuguaccagggcgugaacugcaccgaggugcccguggccauccacgccgaccagcugacacccaccuggcgggucuacagcaccggcagcaacguguuccagacccgggccgguugccugaucggcgccgagcacgugaacaacagcuacgagugcgacauccccaucggcgccggcaucugugccagcuaccagacccagaccaauucaccccggagggcaaggagcguggccagccagagcgugaucgccuacaccaugagccugggcgccgagaacagcguggccuacagcaacaacagcaucgccauccccaccaacuucaccaucagcgugaccaccgagauucugcccgugagcaugaccaagaccagcguggacugcaccauguacaucugcggcgacagcaccgagugcagcaaccugcugcugcaguacggcagcuucugcacccagcugaaccgggcccugaccggcaucgccguggagcaggacaagaacacccaggagguguucgcccaggugaagcagaucuacaagaccccucccaucaaggacuucggcggcuucaacuucagccagauccugcccgaccccagcaagcccagcaagcggagcuucaucgaggaccugcuguucaacaaggugacccuagccgacgccggcuucaucaagcaguacggcgacugccucggcgacauagccgcccgggaccugaucugcgcccagaaguucaacggccugaccgugcugccuccccugcugaccgacgagaugaucgcccaguacaccagcgcccuguuagccggaaccaucaccagcggcuggacuuucggcgcuggagccgcucugcagauccccuucgccaugcagauggccuaccgguucaacggcaucggcgugacccagaacgugcuguacgagaaccagaagcugaucgccaaccaguucaacagcgccaucggcaagauccaggacagccugagcagcaccgcuagcgcccugggcaagcugcaggacguggugaaccagaacgcccaggcccugaacacccuggugaagcagcugagcagcaacuucggcgccaucagcagcgugcugaacgacauccugagccggcuggacaaggucgaggccgaggugcagaucgaccggcugaucacuggccggcugcagagccugcagaccuacgugacccagcagcugauccgggccgccgagauucgggccagcgccaaccuggccgccaccaagaugagcgagugcgugcugggccagagcaagcggguggacuucugcggcaagggcuaccaccugaugagcuuuccccagagcgcaccccacggagugguguuccugcacgugaccuacgugcccgcccaggagaagaacuucaccaccgccccagccaucugccacgacggcaaggcccacuuuccccgggagggcguguucgugagcaacggcacccacugguucgugacccagcggaacuucuacgagccccagaucaucaccaccgacaacaccuucgugagcggcaacugcgacguggugaucggcaucgugaacaacaccguguacgauccccugcagcccgagcuggacagcuucaaggaggagcuggacaaguacuucaagaaucacaccagccccgacguggaccugggcgacaucagcggcaucaacgccagcguggugaacauccagaaggagaucgaucggcugaacgagguggccaagaaccugaacgagagccugaucgaccugcaggagcugggcaaguacgagcaguacaucaaguggcccugguacaucuggcugggcuucaucgccggccugaucgccaucgugaucgugaccaucaugcugugcugcaugaccagcugcugcagcugccugaagggcuguugcagcugcggcagcugcugcaaguucgacgaggacgacagcgagcccgugcugaagggcgugaagcugcacuacaccugaggacuaguuauaagacugacuagcccgaugggccucccaacgggcccuccuccccuccuugcaccgagauuaauaaaaaaaaaaaaaaaaaaaaaaaaaaaaaaaaaaaaaaaaaaaaaaaaaaaaaaaaaaaaaaaaugcaucccccccccccccccccccccccccccccccaaaggcucuuuucagagccaccagaauu

SEQ ID NO: 23237 - RNA, 4030 nt, Artificial Sequence
  SARS-CoV-2/Wuhan/WIV05/2019__EPI_ISL_402128 spike protein mRNA gc (1-1273)(H69del_V70del_Y144del_N501Y_A570D_D614G_P681H_T716I_S982 A_D1118H)
aggagaaagcuuaccauguucguguuccuggugcugcugccccuggugagcagccagugcgugaaccugaccacccggacccagcugccaccagccuacaccaacagcuucacccggggcgucuacuaccccgacaagguguuccggagcagcguccugcacagcacccaggaccuguuccugcccuucuucagcaacgugaccugguuccacgccaucagcggcaccaacggcaccaagcgguucgacaaccccgugcugcccuucaacgacggcguguacuucgccagcaccgagaagagcaacaucauccggggcuggaucuucggcaccacccuggacagcaagacccagagccugcugaucgugaauaacgccaccaacguggugaucaaggugugcgaguuccaguucugcaacgaccccuuccugggcguguaccacaagaacaacaagagcuggauggagagcgaguuccggguguacagcagcgccaacaacugcaccuucgaguacgugagccagcccuuccugauggaccuggagggcaagcagggcaacuucaagaaccugcgggaguucguguucaagaacaucgacggcuacuucaagaucuacagcaagcacaccccaaucaaccuggugcgggaucugccccagggcuucucagcccuggagccccugguggaccugcccaucggcaucaacaucacccgguuccagacccugcuggcccugcaccggagcuaccugaccccaggcgacagcagcagcggguggacagcaggcgcggcugcuuacuacgugggcuaccugcagccccggaccuuccugcugaaguacaacgagaacggcaccaucaccgacgccguggacugcgcccuggacccucugagcgagaccaagugcacccugaagagcuucaccguggagaagggcaucuaccagaccagcaacuuccgggugcagcccaccgagagcaucgugcgguuccccaacaucaccaaccugugccccuucggcgagguguucaacgccacccgguucgccagcguguacgccuggaaccggaagcggaucagcaacugcguggccgacuacagcgugcuguacaacagcgccagcuucagcaccuucaagugcuacggcgugagccccaccaagcugaacgaccugugcuucaccaacguguacgccgacagcuucgugauccguggcgacgaggugcggcagaucgcacccggccagacaggcaagaucgccgacuacaacuacaagcugcccgacgacuucaccggcugcgugaucgccuggaacagcaacaaccucgacagcaaggugggcggcaacuacaacuaccuguaccggcuguuccggaagagcaaccugaagcccuucgagcgggacaucagcaccgagaucuaccaagccggcuccaccccuugcaacggcguggagggcuucaacugcuacuucccucugcagagcuacggcuuccagcccaccuacggcgugggcuaccagcccuaccgggugguggugcugagcuucgagcugcugcacgccccagccaccguguguggccccaagaagagcaccaaccuggugaagaacaagugcgugaacuucaacuucaacggccuuaccggcaccggcgugcugaccgagagcaacaagaaauuccugcccuuucagcaguucggccgggacaucgacgacaccaccgacgcugugcgggauccccagacccuggagauccuggacaucaccccuugcagcuucggcggcgugagcgugaucaccccaggcaccaacaccagcaaccagguggccgugcuguaccagggcgugaacugcaccgaggugcccguggccauccacgccgaccagcugacacccaccuggcgggucuacagcaccggcagcaacguguuccagacccgggccgguugccugaucggcgccgagcacgugaacaacagcuacgagugcgacauccccaucggcgccggcaucugugccagcuaccagacccagaccaauucacaccggagggcaaggagcguggccagccagagcaucaucgccuacaccaugagccugggcgccgagaacagcguggccuacagcaacaacagcaucgccauccccaucaacuucaccaucagcgugaccaccgagauucugcccgugagcaugaccaagaccagcguggacugcaccauguacaucugcggcgacagcaccgagugcagcaaccugcugcugcaguacggcagcuucugcacccagcugaaccgggcccugaccggcaucgccguggagcaggacaagaacacccaggagguguucgcccaggugaagcagaucuacaagaccccucccaucaaggacuucggcggcuucaacuucagccagauccugcccgaccccagcaagcccagcaagcggagcuucaucgaggaccugcuguucaacaaggugacccuagccgacgccggcuucaucaagcaguacggcgacugccucggcgacauagccgcccgggaccugaucugcgcccagaaguucaacggccugaccgugcugccuccccugcugaccgacgagaugaucgcccaguacaccagcgcccuguuagccggaaccaucaccagcggcuggacuuucggcgcuggagccgcucugcagauccccuucgccaugcagauggccuaccgguucaacggcaucggcgugacccagaacgugcuguacgagaaccagaagcugaucgccaaccaguucaacagcgccaucggcaagauccaggacagccugagcagcaccgcuagcgcccugggcaagcugcaggacguggugaaccagaacgcccaggcccugaacacccuggugaagcagcugagcagcaacuucggcgccaucagcagcgugcugaacgacauccuggcccggcuggacaaggucgaggccgaggugcagaucgaccggcugaucacuggccggcugcagagccugcagaccuacgugacccagcagcugauccgggccgccgagauucgggccagcgccaaccuggccgccaccaagaugagcgagugcgugcugggccagagcaagcggguggacuucugcggcaagggcuaccaccugaugagcuuuccccagagcgcaccccacggagugguguuccugcacgugaccuacgugcccgcccaggagaagaacuucaccaccgccccagccaucugccacgacggcaaggcccacuuuccccgggagggcguguucgugagcaacggcacccacugguucgugacccagcggaacuucuacgagccccagaucaucaccacccacaacaccuucgugagcggcaacugcgacguggugaucggcaucgugaacaacaccguguacgauccccugcagcccgagcuggacagcuucaaggaggagcuggacaaguacuucaagaaucacaccagccccgacguggaccugggcgacaucagcggcaucaacgccagcguggugaacauccagaaggagaucgaucggcugaacgagguggccaagaaccugaacgagagccugaucgaccugcaggagcugggcaaguacgagcaguacaucaaguggcccugguacaucuggcugggcuucaucgccggccugaucgccaucgugauggugaccaucaugcugugcugcaugaccagcugcugcagcugccugaagggcuguugcagcugcggcagcugcugcaaguucgacgaggacgacagcgagcccgugcugaagggcgugaagcugcacuacaccugaggacuaguuauaagacugacuagcccgaugggccucccaacgggcccuccuccccuccuugcaccgagauuaauaaaaaaaaaaaaaaaaaaaaaaaaaaaaaaaaaaaaaaaaaaaaaaaaaaaaaaaaaaaaaaaaugcaucccccccccccccccccccccccccccccccaaaggcucuuuucagagccaccagaauu

SEQ ID NO: 23238 - RNA, 4039 nt, Artificial Sequence
  SARS-CoV-2/Wuhan/WIV05/2019__EPI_ISL_402128 spike protein mRNA gc (1-1273)(K417N_E484K_N501Y_D614G)
aggagaaagcuuaccauguucguguuccuggugcugcugccccuggugagcagccagugcgugaaccugaccacccggacccagcugccaccagccuacaccaacagcuucacccggggcgucuacuaccccgacaagguguuccggagcagcguccugcacagcacccaggaccuguuccugcccuucuucagcaacgugaccugguuccacgccauccacgugagcggcaccaacggcaccaagcgguucgacaaccccgugcugcccuucaacgacggcguguacuucgccagcaccgagaagagcaacaucauccggggcuggaucuucggcaccacccuggacagcaagacccagagccugcugaucgugaauaacgccaccaacguggugaucaaggugugcgaguuccaguucugcaacgaccccuuccugggcguguacuaccacaagaacaacaagagcuggauggagagcgaguuccggguguacagcagcgccaacaacugcaccuucgaguacgugagccagcccuuccugauggaccuggagggcaagcagggcaacuucaagaaccugcgggaguucguguucaagaacaucgacggcuacuucaagaucuacagcaagcacaccccaaucaaccuggugcgggaucugccccagggcuucucagcccuggagccccugguggaccugcccaucggcaucaacaucacccgguuccagacccugcuggcccugcaccggagcuaccugaccccaggcgacagcagcagcggguggacagcaggcgcggcugcuuacuacgugggcuaccugcagccccggaccuuccugcugaaguacaacgagaacggcaccaucaccgacgccguggacugcgcccuggacccucugagcgagaccaagugcacccugaagagcuucaccguggagaagggcaucuaccagaccagcaacuuccgggugcagcccaccgagagcaucgugcgguuccccaacaucaccaaccugugccccuucggcgagguguucaacgccacccgguucgccagcguguacgccuggaaccggaagcggaucagcaacugcguggccgacuacagcgugcuguacaacagcgccagcuucagcaccuucaagugcuacggcgugagccccaccaagcugaacgaccugugcuucaccaacguguacgccgacagcuucgugauccguggcgacgaggugcggcagaucgcacccggccagacaggcaacaucgccgacuacaacuacaagcugcccgacgacuucaccggcugcgugaucgccuggaacagcaacaaccucgacagcaaggugggcggcaacuacaacuaccuguaccggcuguuccggaagagcaaccugaagcccuucgagcgggacaucagcaccgagaucuaccaagccggcuccaccccuugcaacggcgugaagggcuucaacugcuacuucccucugcagagcuacggcuuccagcccaccuacggcgugggcuaccagcccuaccgggugguggugcugagcuucgagcugcugcacgccccagccaccguguguggccccaagaagagcaccaaccuggugaagaacaagugcgugaacuucaacuucaacggccuuaccggcaccggcgugcugaccgagagcaacaagaaauuccugcccuuucagcaguucggccgggacaucgccgacaccaccgacgcugugcgggauccccagacccuggagauccuggacaucaccccuugcagcuucggcggcgugagcgugaucaccccaggcaccaacaccagcaaccagguggccgugcuguaccagggcgugaacugcaccgaggugcccguggccauccacgccgaccagcugacacccaccuggcgggucuacagcaccggcagcaacguguuccagacccgggccgguugccugaucggcgccgagcacgugaacaacagcuacgagugcgacauccccaucggcgccggcaucugugccagcuaccagacccagaccaauucaccccggagggcaaggagcguggccagccagagcaucaucgccuacaccaugagccugggcgccgagaacagcguggccuacagcaacaacagcaucgccauccccaccaacuucaccaucagcgugaccaccgagauucugcccgugagcaugaccaagaccagcguggacugcaccauguacaucugcggcgacagcaccgagugcagcaaccugcugcugcaguacggcagcuucugcacccagcugaaccgggcccugaccggcaucgccguggagcaggacaagaacacccaggagguguucgcccaggugaagcagaucuacaagaccccucccaucaaggacuucggcggcuucaacuucagccagauccugcccgaccccagcaagcccagcaagcggagcuucaucgaggaccugcuguucaacaaggugacccuagccgacgccggcuucaucaagcaguacggcgacugccucggcgacauagccgcccgggaccugaucugcgcccagaaguucaacggccugaccgugcugccuccccugcugaccgacgagaugaucgcccaguacaccagcgcccuguuagccggaaccaucaccagcggcuggacuuucggcgcuggagccgcucugcagauccccuucgccaugcagauggccuaccgguucaacggcaucggcgugacccagaacgugcuguacgagaaccagaagcugaucgccaaccaguucaacagcgccaucggcaagauccaggacagccugagcagcaccgcuagcgcccugggcaagcugcaggacguggugaaccagaacgcccaggcccugaacacccuggugaagcagcugagcagcaacuucggcgccaucagcagcgugcugaacgacauccugagccggcuggacaaggucgaggccgaggugcagaucgaccggcugaucacuggccggcugcagagccugcagaccuacgugacccagcagcugauccgggccgccgagauucgggccagcgccaaccuggccgccaccaagaugagcgagugcgugcugggccagagcaagcggguggacuucugcggcaagggcuaccaccugaugagcuuuccccagagcgcaccccacggagugguguuccugcacgugaccuacgugcccgcccaggagaagaacuucaccaccgccccagccaucugccacgacggcaaggcccacuuuccccgggagggcguguucgugagcaacggcacccacugguucgugacccagcggaacuucuacgagccccagaucaucaccaccgacaacaccuucgugagcggcaacugcgacguggugaucggcaucgugaacaacaccguguacgauccccugcagcccgagcuggacagcuucaaggaggagcuggacaaguacuucaagaaucacaccagccccgacguggaccugggcgacaucagcggcaucaacgccagcguggugaacauccagaaggagaucgaucggcugaacgagguggccaagaaccugaacgagagccugaucgaccugcaggagcugggcaaguacgagcaguacaucaaguggcccugguacaucuggcugggcuucaucgccggccugaucgccaucgugauggugaccaucaugcugugcugcaugaccagcugcugcagcugccugaagggcuguugcagcugcggcagcugcugcaaguucgacgaggacgacagcgagcccgugcugaagggcgugaagcugcacuacaccugaggacuaguuauaagacugacuagcccgaugggccucccaacgggcccuccuccccuccuugcaccgagauuaauaaaaaaaaaaaaaaaaaaaaaaaaaaaaaaaaaaaaaaaaaaaaaaaaaaaaaaaaaaaaaaaaugcaucccccccccccccccccccccccccccccccaaaggcucuuuucagagccaccagaauu

SEQ ID NO: 23239 - RNA, 4030 nt, Artificial Sequence
  SARS-CoV-2/Wuhan/WIV05/2019__EPI_ISL_402128 spike protein mRNA gc (1-1273)(L18F_D80A_D215G_L242del_A243del_L244del_R246I_K417N_E484 K_N501Y_D614G_A701V)
aggagaaagcuuaccauguucguguuccuggugcugcugccccuggugagcagccagugcgugaacuucaccacccggacccagcugccaccagccuacaccaacagcuucacccggggcgucuacuaccccgacaagguguuccggagcagcguccugcacagcacccaggaccuguuccugcccuucuucagcaacgugaccugguuccacgccauccacgugagcggcaccaacggcaccaagcgguucgccaaccccgugcugcccuucaacgacggcguguacuucgccagcaccgagaagagcaacaucauccggggcuggaucuucggcaccacccuggacagcaagacccagagccugcugaucgugaauaacgccaccaacguggugaucaaggugugcgaguuccaguucugcaacgaccccuuccugggcguguacuaccacaagaacaacaagagcuggauggagagcgaguuccggguguacagcagcgccaacaacugcaccuucgaguacgugagccagcccuuccugauggaccuggagggcaagcagggcaacuucaagaaccugcgggaguucguguucaagaacaucgacggcuacuucaagaucuacagcaagcacaccccaaucaaccuggugcggggccugccccagggcuucucagcccuggagccccugguggaccugcccaucggcaucaacaucacccgguuccagacccugcacaucagcuaccugaccccaggcgacagcagcagcggguggacagcaggcgcggcugcuuacuacgugggcuaccugcagccccggaccuuccugcugaaguacaacgagaacggcaccaucaccgacgccguggacugcgcccuggacccucugagcgagaccaagugcacccugaagagcuucaccguggagaagggcaucuaccagaccagcaacuuccgggugcagcccaccgagagcaucgugcgguuccccaacaucaccaaccugugccccuucggcgagguguucaacgccacccgguucgccagcguguacgccuggaaccggaagcggaucagcaacugcguggccgacuacagcgugcuguacaacagcgccagcuucagcaccuucaagugcuacggcgugagccccaccaagcugaacgaccugugcuucaccaacguguacgccgacagcuucgugauccguggcgacgaggugcggcagaucgcacccggccagacaggcaacaucgccgacuacaacuacaagcugcccgacgacuucaccggcugcgugaucgccuggaacagcaacaaccucgacagcaaggugggcggcaacuacaacuaccuguaccggcuguuccggaagagcaaccugaagcccuucgagcgggacaucagcaccgagaucuaccaagccggcuccaccccuugcaacggcgugaagggcuucaacugcuacuucccucugcagagcuacggcuuccagcccaccuacggcgugggcuaccagcccuaccgggugguggugcugagcuucgagcugcugcacgccccagccaccguguguggccccaagaagagcaccaaccuggugaagaacaagugcgugaacuucaacuucaacggccuuaccggcaccggcgugcugaccgagagcaacaagaaauuccugcccuuucagcaguucggccgggacaucgccgacaccaccgacgcugugcgggauccccagacccuggagauccuggacaucaccccuugcagcuucggcggcgugagcgugaucaccccaggcaccaacaccagcaaccagguggccgugcuguaccagggcgugaacugcaccgaggugcccguggccauccacgccgaccagcugacacccaccuggcgggucuacagcaccggcagcaacguguuccagacccgggccgguugccugaucggcgccgagcacgugaacaacagcuacgagugcgacauccccaucggcgccggcaucugugccagcuaccagacccagaccaauucaccccggagggcaaggagcguggccagccagagcaucaucgccuacaccaugagccugggcguggagaacagcguggccuacagcaacaacagcaucgccauccccaccaacuucaccaucagcgugaccaccgagauucugcccgugagcaugaccaagaccagcguggacugcaccauguacaucugcggcgacagcaccgagugcagcaaccugcugcugcaguacggcagcuucugcacccagcugaaccgggcccugaccggcaucgccguggagcaggacaagaacacccaggagguguucgcccaggugaagcagaucuacaagaccccucccaucaaggacuucggcggcuucaacuucagccagauccugcccgaccccagcaagcccagcaagcggagcuucaucgaggaccugcuguucaacaaggugacccuagccgacgccggcuucaucaagcaguacggcgacugccucggcgacauagccgcccgggaccugaucugcgcccagaaguucaacggccugaccgugcugccuccccugcugaccgacgagaugaucgcccaguacaccagcgcccuguuagccggaaccaucaccagcggcuggacuuucggcgcuggagccgcucugcagauccccuucgccaugcagauggccuaccgguucaacggcaucggcgugacccagaacgugcuguacgagaaccagaagcugaucgccaaccaguucaacagcgccaucggcaagauccaggacagccugagcagcaccgcuagcgcccugggcaagcugcaggacguggugaaccagaacgcccaggcccugaacacccuggugaagcagcugagcagcaacuucggcgccaucagcagcgugcugaacgacauccugagccggcuggacaaggucgaggccgaggugcagaucgaccggcugaucacuggccggcugcagagccugcagaccuacgugacccagcagcugauccgggccgccgagauucgggccagcgccaaccuggccgccaccaagaugagcgagugcgugcugggccagagcaagcggguggacuucugcggcaagggcuaccaccugaugagcuuuccccagagcgcaccccacggagugguguuccugcacgugaccuacgugcccgcccaggagaagaacuucaccaccgccccagccaucugccacgacggcaaggcccacuuuccccgggagggcguguucgugagcaacggcacccacugguucgugacccagcggaacuucuacgagccccagaucaucaccaccgacaacaccuucgugagcggcaacugcgacguggugaucggcaucgugaacaacaccguguacgauccccugcagcccgagcuggacagcuucaaggaggagcuggacaaguacuucaagaaucacaccagccccgacguggaccugggcgacaucagcggcaucaacgccagcguggugaacauccagaaggagaucgaucggcugaacgagguggccaagaaccugaacgagagccugaucgaccugcaggagcugggcaaguacgagcaguacaucaaguggcccugguacaucuggcugggcuucaucgccggccugaucgccaucgugauggugaccaucaugcugugcugcaugaccagcugcugcagcugccugaagggcuguugcagcugcggcagcugcugcaaguucgacgaggacgacagcgagcccgugcugaagggcgugaagcugcacuacaccugaggacuaguuauaagacugacuagcccgaugggccucccaacgggcccuccuccccuccuugcaccgagauuaauaaaaaaaaaaaaaaaaaaaaaaaaaaaaaaaaaaaaaaaaaaaaaaaaaaaaaaaaaaaaaaaaugcaucccccccccccccccccccccccccccccccaaaggcucuuuucagagccaccagaauu

SEQ ID NO: 23240 - RNA, 4039 nt, Artificial Sequence
  SARS-CoV-2/Wuhan/WIV05/2019__EPI_ISL_402128 spike protein mRNA gc (1-1273)(E484K_D614G)
aggagaaagcuuaccauguucguguuccuggugcugcugccccuggugagcagccagugcgugaaccugaccacccggacccagcugccaccagccuacaccaacagcuucacccggggcgucuacuaccccgacaagguguuccggagcagcguccugcacagcacccaggaccuguuccugcccuucuucagcaacgugaccugguuccacgccauccacgugagcggcaccaacggcaccaagcgguucgacaaccccgugcugcccuucaacgacggcguguacuucgccagcaccgagaagagcaacaucauccggggcuggaucuucggcaccacccuggacagcaagacccagagccugcugaucgugaauaacgccaccaacguggugaucaaggugugcgaguuccaguucugcaacgaccccuuccugggcguguacuaccacaagaacaacaagagcuggauggagagcgaguuccggguguacagcagcgccaacaacugcaccuucgaguacgugagccagcccuuccugauggaccuggagggcaagcagggcaacuucaagaaccugcgggaguucguguucaagaacaucgacggcuacuucaagaucuacagcaagcacaccccaaucaaccuggugcgggaucugccccagggcuucucagcccuggagccccugguggaccugcccaucggcaucaacaucacccgguuccagacccugcuggcccugcaccggagcuaccugaccccaggcgacagcagcagcggguggacagcaggcgcggcugcuuacuacgugggcuaccugcagccccggaccuuccugcugaaguacaacgagaacggcaccaucaccgacgccguggacugcgcccuggacccucugagcgagaccaagugcacccugaagagcuucaccguggagaagggcaucuaccagaccagcaacuuccgggugcagcccaccgagagcaucgugcgguuccccaacaucaccaaccugugccccuucggcgagguguucaacgccacccgguucgccagcguguacgccuggaaccggaagcggaucagcaacugcguggccgacuacagcgugcuguacaacagcgccagcuucagcaccuucaagugcuacggcgugagccccaccaagcugaacgaccugugcuucaccaacguguacgccgacagcuucgugauccguggcgacgaggugcggcagaucgcacccggccagacaggcaagaucgccgacuacaacuacaagcugcccgacgacuucaccggcugcgugaucgccuggaacagcaacaaccucgacagcaaggugggcggcaacuacaacuaccuguaccggcuguuccggaagagcaaccugaagcccuucgagcgggacaucagcaccgagaucuaccaagccggcuccaccccuugcaacggcgugaagggcuucaacugcuacuucccucugcagagcuacggcuuccagcccaccaacggcgugggcuaccagcccuaccgggugguggugcugagcuucgagcugcugcacgccccagccaccguguguggccccaagaagagcaccaaccuggugaagaacaagugcgugaacuucaacuucaacggccuuaccggcaccggcgugcugaccgagagcaacaagaaauuccugcccuuucagcaguucggccgggacaucgccgacaccaccgacgcugugcgggauccccagacccuggagauccuggacaucaccccuugcagcuucggcggcgugagcgugaucaccccaggcaccaacaccagcaaccagguggccgugcuguaccagggcgugaacugcaccgaggugcccguggccauccacgccgaccagcugacacccaccuggcgggucuacagcaccggcagcaacguguuccagacccgggccgguugccugaucggcgccgagcacgugaacaacagcuacgagugcgacauccccaucggcgccggcaucugugccagcuaccagacccagaccaauucaccccggagggcaaggagcguggccagccagagcaucaucgccuacaccaugagccugggcgccgagaacagcguggccuacagcaacaacagcaucgccauccccaccaacuucaccaucagcgugaccaccgagauucugcccgugagcaugaccaagaccagcguggacugcaccauguacaucugcggcgacagcaccgagugcagcaaccugcugcugcaguacggcagcuucugcacccagcugaaccgggcccugaccggcaucgccguggagcaggacaagaacacccaggagguguucgcccaggugaagcagaucuacaagaccccucccaucaaggacuucggcggcuucaacuucagccagauccugcccgaccccagcaagcccagcaagcggagcuucaucgaggaccugcuguucaacaaggugacccuagccgacgccggcuucaucaagcaguacggcgacugccucggcgacauagccgcccgggaccugaucugcgcccagaaguucaacggccugaccgugcugccuccccugcugaccgacgagaugaucgcccaguacaccagcgcccuguuagccggaaccaucaccagcggcuggacuuucggcgcuggagccgcucugcagauccccuucgccaugcagauggccuaccgguucaacggcaucggcgugacccagaacgugcuguacgagaaccagaagcugaucgccaaccaguucaacagcgccaucggcaagauccaggacagccugagcagcaccgcuagcgcccugggcaagcugcaggacguggugaaccagaacgcccaggcccugaacacccuggugaagcagcugagcagcaacuucggcgccaucagcagcgugcugaacgacauccugagccggcuggacaaggucgaggccgaggugcagaucgaccggcugaucacuggccggcugcagagccugcagaccuacgugacccagcagcugauccgggccgccgagauucgggccagcgccaaccuggccgccaccaagaugagcgagugcgugcugggccagagcaagcggguggacuucugcggcaagggcuaccaccugaugagcuuuccccagagcgcaccccacggagugguguuccugcacgugaccuacgugcccgcccaggagaagaacuucaccaccgccccagccaucugccacgacggcaaggcccacuuuccccgggagggcguguucgugagcaacggcacccacugguucgugacccagcggaacuucuacgagccccagaucaucaccaccgacaacaccuucgugagcggcaacugcgacguggugaucggcaucgugaacaacaccguguacgauccccugcagcccgagcuggacagcuucaaggaggagcuggacaaguacuucaagaaucacaccagccccgacguggaccugggcgacaucagcggcaucaacgccagcguggugaacauccagaaggagaucgaucggcugaacgagguggccaagaaccugaacgagagccugaucgaccugcaggagcugggcaaguacgagcaguacaucaaguggcccugguacaucuggcugggcuucaucgccggccugaucgccaucgugauggugaccaucaugcugugcugcaugaccagcugcugcagcugccugaagggcuguugcagcugcggcagcugcugcaaguucgacgaggacgacagcgagcccgugcugaagggcgugaagcugcacuacaccugaggacuaguuauaagacugacuagcccgaugggccucccaacgggcccuccuccccuccuugcaccgagauuaauaaaaaaaaaaaaaaaaaaaaaaaaaaaaaaaaaaaaaaaaaaaaaaaaaaaaaaaaaaaaaaaaugcaucccccccccccccccccccccccccccccccaaaggcucuuuucagagccaccagaauu

SEQ ID NO: 23241 - RNA, 4039 nt, Artificial Sequence
  SARS-CoV-2/Wuhan/WIV05/2019__EPI_ISL_402128 spike protein mRNA gc (1-1273)(L18F_T20N_P26S_D138Y_R190S_K417T_E484K_N501Y_D614G_H655Y _T1027I)
aggagaaagcuuaccauguucguguuccuggugcugcugccccuggugagcagccagugcgugaacuucaccaaccggacccagcugccaagcgccuacaccaacagcuucacccggggcgucuacuaccccgacaagguguuccggagcagcguccugcacagcacccaggaccuguuccugcccuucuucagcaacgugaccugguuccacgccauccacgugagcggcaccaacggcaccaagcgguucgacaaccccgugcugcccuucaacgacggcguguacuucgccagcaccgagaagagcaacaucauccggggcuggaucuucggcaccacccuggacagcaagacccagagccugcugaucgugaauaacgccaccaacguggugaucaaggugugcgaguuccaguucugcaacuaccccuuccugggcguguacuaccacaagaacaacaagagcuggauggagagcgaguuccggguguacagcagcgccaacaacugcaccuucgaguacgugagccagcccuuccugauggaccuggagggcaagcagggcaacuucaagaaccugagcgaguucguguucaagaacaucgacggcuacuucaagaucuacagcaagcacaccccaaucaaccuggugcgggaucugccccagggcuucucagcccuggagccccugguggaccugcccaucggcaucaacaucacccgguuccagacccugcuggcccugcaccggagcuaccugaccccaggcgacagcagcagcggguggacagcaggcgcggcugcuuacuacgugggcuaccugcagccccggaccuuccugcugaaguacaacgagaacggcaccaucaccgacgccguggacugcgcccuggacccucugagcgagaccaagugcacccugaagagcuucaccguggagaagggcaucuaccagaccagcaacuuccgggugcagcccaccgagagcaucgugcgguuccccaacaucaccaaccugugccccuucggcgagguguucaacgccacccgguucgccagcguguacgccuggaaccggaagcggaucagcaacugcguggccgacuacagcgugcuguacaacagcgccagcuucagcaccuucaagugcuacggcgugagccccaccaagcugaacgaccugugcuucaccaacguguacgccgacagcuucgugauccguggcgacgaggugcggcagaucgcacccggccagacaggcaccaucgccgacuacaacuacaagcugcccgacgacuucaccggcugcgugaucgccuggaacagcaacaaccucgacagcaaggugggcggcaacuacaacuaccuguaccggcuguuccggaagagcaaccugaagcccuucgagcgggacaucagcaccgagaucuaccaagccggcuccaccccuugcaacggcgugaagggcuucaacugcuacuucccucugcagagcuacggcuuccagcccaccuacggcgugggcuaccagcccuaccgggugguggugcugagcuucgagcugcugcacgccccagccaccguguguggccccaagaagagcaccaaccuggugaagaacaagugcgugaacuucaacuucaacggccuuaccggcaccggcgugcugaccgagagcaacaagaaauuccugcccuuucagcaguucggccgggacaucgccgacaccaccgacgcugugcgggauccccagacccuggagauccuggacaucaccccuugcagcuucggcggcgugagcgugaucaccccaggcaccaacaccagcaaccagguggccgugcuguaccagggcgugaacugcaccgaggugcccguggccauccacgccgaccagcugacacccaccuggcgggucuacagcaccggcagcaacguguuccagacccgggccgguugccugaucggcgccgaguacgugaacaacagcuacgagugcgacauccccaucggcgccggcaucugugccagcuaccagacccagaccaauucaccccggagggcaaggagcguggccagccagagcaucaucgccuacaccaugagccugggcgccgagaacagcguggccuacagcaacaacagcaucgccauccccaccaacuucaccaucagcgugaccaccgagauucugcccgugagcaugaccaagaccagcguggacugcaccauguacaucugcggcgacagcaccgagugcagcaaccugcugcugcaguacggcagcuucugcacccagcugaaccgggcccugaccggcaucgccguggagcaggacaagaacacccaggagguguucgcccaggugaagcagaucuacaagaccccucccaucaaggacuucggcggcuucaacuucagccagauccugcccgaccccagcaagcccagcaagcggagcuucaucgaggaccugcuguucaacaaggugacccuagccgacgccggcuucaucaagcaguacggcgacugccucggcgacauagccgcccgggaccugaucugcgcccagaaguucaacggccugaccgugcugccuccccugcugaccgacgagaugaucgcccaguacaccagcgcccuguuagccggaaccaucaccagcggcuggacuuucggcgcuggagccgcucugcagauccccuucgccaugcagauggccuaccgguucaacggcaucggcgugacccagaacgugcuguacgagaaccagaagcugaucgccaaccaguucaacagcgccaucggcaagauccaggacagccugagcagcaccgcuagcgcccugggcaagcugcaggacguggugaaccagaacgcccaggcccugaacacccuggugaagcagcugagcagcaacuucggcgccaucagcagcgugcugaacgacauccugagccggcuggacaaggucgaggccgaggugcagaucgaccggcugaucacuggccggcugcagagccugcagaccuacgugacccagcagcugauccgggccgccgagauucgggccagcgccaaccuggccgccaucaagaugagcgagugcgugcugggccagagcaagcggguggacuucugcggcaagggcuaccaccugaugagcuuuccccagagcgcaccccacggagugguguuccugcacgugaccuacgugcccgcccaggagaagaacuucaccaccgccccagccaucugccacgacggcaaggcccacuuuccccgggagggcguguucgugagcaacggcacccacugguucgugacccagcggaacuucuacgagccccagaucaucaccaccgacaacaccuucgugagcggcaacugcgacguggugaucggcaucgugaacaacaccguguacgauccccugcagcccgagcuggacagcuucaaggaggagcuggacaaguacuucaagaaucacaccagccccgacguggaccugggcgacaucagcggcaucaacgccagcguggugaacauccagaaggagaucgaucggcugaacgagguggccaagaaccugaacgagagccugaucgaccugcaggagcugggcaaguacgagcaguacaucaaguggcccugguacaucuggcugggcuucaucgccggccugaucgccaucgugauggugaccaucaugcugugcugcaugaccagcugcugcagcugccugaagggcuguugcagcugcggcagcugcugcaaguucgacgaggacgacagcgagcccgugcugaagggcgugaagcugcacuacaccugaggacuaguuauaagacugacuagcccgaugggccucccaacgggcccuccuccccuccuugcaccgagauuaauaaaaaaaaaaaaaaaaaaaaaaaaaaaaaaaaaaaaaaaaaaaaaaaaaaaaaaaaaaaaaaaaugcaucccccccccccccccccccccccccccccccaaaggcucuuuucagagccaccagaauu

SEQ ID NO: 23242 - RNA, 4039 nt, Artificial Sequence
  SARS-CoV-2/Wuhan/WIV05/2019__EPI_ISL_402128 spike protein mRNA gc (1-1273)(S13I_W152C_L452R_D614G)
aggagaaagcuuaccauguucguguuccuggugcugcugccccuggugagcauccagugcgugaaccugaccacccggacccagcugccaccagccuacaccaacagcuucacccggggcgucuacuaccccgacaagguguuccggagcagcguccugcacagcacccaggaccuguuccugcccuucuucagcaacgugaccugguuccacgccauccacgugagcggcaccaacggcaccaagcgguucgacaaccccgugcugcccuucaacgacggcguguacuucgccagcaccgagaagagcaacaucauccggggcuggaucuucggcaccacccuggacagcaagacccagagccugcugaucgugaauaacgccaccaacguggugaucaaggugugcgaguuccaguucugcaacgaccccuuccugggcguguacuaccacaagaacaacaagagcugcauggagagcgaguuccggguguacagcagcgccaacaacugcaccuucgaguacgugagccagcccuuccugauggaccuggagggcaagcagggcaacuucaagaaccugcgggaguucguguucaagaacaucgacggcuacuucaagaucuacagcaagcacaccccaaucaaccuggugcgggaucugccccagggcuucucagcccuggagccccugguggaccugcccaucggcaucaacaucacccgguuccagacccugcuggcccugcaccggagcuaccugaccccaggcgacagcagcagcggguggacagcaggcgcggcugcuuacuacgugggcuaccugcagccccggaccuuccugcugaaguacaacgagaacggcaccaucaccgacgccguggacugcgcccuggacccucugagcgagaccaagugcacccugaagagcuucaccguggagaagggcaucuaccagaccagcaacuuccgggugcagcccaccgagagcaucgugcgguuccccaacaucaccaaccugugccccuucggcgagguguucaacgccacccgguucgccagcguguacgccuggaaccggaagcggaucagcaacugcguggccgacuacagcgugcuguacaacagcgccagcuucagcaccuucaagugcuacggcgugagccccaccaagcugaacgaccugugcuucaccaacguguacgccgacagcuucgugauccguggcgacgaggugcggcagaucgcacccggccagacaggcaagaucgccgacuacaacuacaagcugcccgacgacuucaccggcugcgugaucgccuggaacagcaacaaccucgacagcaaggugggcggcaacuacaacuaccgcuaccggcuguuccggaagagcaaccugaagcccuucgagcgggacaucagcaccgagaucuaccaagccggcuccaccccuugcaacggcguggagggcuucaacugcuacuucccucugcagagcuacggcuuccagcccaccaacggcgugggcuaccagcccuaccgggugguggugcugagcuucgagcugcugcacgccccagccaccguguguggccccaagaagagcaccaaccuggugaagaacaagugcgugaacuucaacuucaacggccuuaccggcaccggcgugcugaccgagagcaacaagaaauuccugcccuuucagcaguucggccgggacaucgccgacaccaccgacgcugugcgggauccccagacccuggagauccuggacaucaccccuugcagcuucggcggcgugagcgugaucaccccaggcaccaacaccagcaaccagguggccgugcuguaccagggcgugaacugcaccgaggugcccguggccauccacgccgaccagcugacacccaccuggcgggucuacagcaccggcagcaacguguuccagacccgggccgguugccugaucggcgccgagcacgugaacaacagcuacgagugcgacauccccaucggcgccggcaucugugccagcuaccagacccagaccaauucaccccggagggcaaggagcguggccagccagagcaucaucgccuacaccaugagccugggcgccgagaacagcguggccuacagcaacaacagcaucgccauccccaccaacuucaccaucagcgugaccaccgagauucugcccgugagcaugaccaagaccagcguggacugcaccauguacaucugcggcgacagcaccgagugcagcaaccugcugcugcaguacggcagcuucugcacccagcugaaccgggcccugaccggcaucgccguggagcaggacaagaacacccaggagguguucgcccaggugaagcagaucuacaagaccccucccaucaaggacuucggcggcuucaacuucagccagauccugcccgaccccagcaagcccagcaagcggagcuucaucgaggaccugcuguucaacaaggugacccuagccgacgccggcuucaucaagcaguacggcgacugccucggcgacauagccgcccgggaccugaucugcgcccagaaguucaacggccugaccgugcugccuccccugcugaccgacgagaugaucgcccaguacaccagcgcccuguuagccggaaccaucaccagcggcuggacuuucggcgcuggagccgcucugcagauccccuucgccaugcagauggccuaccgguucaacggcaucggcgugacccagaacgugcuguacgagaaccagaagcugaucgccaaccaguucaacagcgccaucggcaagauccaggacagccugagcagcaccgcuagcgcccugggcaagcugcaggacguggugaaccagaacgcccaggcccugaacacccuggugaagcagcugagcagcaacuucggcgccaucagcagcgugcugaacgacauccugagccggcuggacaaggucgaggccgaggugcagaucgaccggcugaucacuggccggcugcagagccugcagaccuacgugacccagcagcugauccgggccgccgagauucgggccagcgccaaccuggccgccaccaagaugagcgagugcgugcugggccagagcaagcggguggacuucugcggcaagggcuaccaccugaugagcuuuccccagagcgcaccccacggagugguguuccugcacgugaccuacgugcccgcccaggagaagaacuucaccaccgccccagccaucugccacgacggcaaggcccacuuuccccgggagggcguguucgugagcaacggcacccacugguucgugacccagcggaacuucuacgagccccagaucaucaccaccgacaacaccuucgugagcggcaacugcgacguggugaucggcaucgugaacaacaccguguacgauccccugcagcccgagcuggacagcuucaaggaggagcuggacaaguacuucaagaaucacaccagccccgacguggaccugggcgacaucagcggcaucaacgccagcguggugaacauccagaaggagaucgaucggcugaacgagguggccaagaaccugaacgagagccugaucgaccugcaggagcugggcaaguacgagcaguacaucaaguggcccugguacaucuggcugggcuucaucgccggccugaucgccaucgugauggugaccaucaugcugugcugcaugaccagcugcugcagcugccugaagggcuguugcagcugcggcagcugcugcaaguucgacgaggacgacagcgagcccgugcugaagggcgugaagcugcacuacaccugaggacuaguuauaagacugacuagcccgaugggccucccaacgggcccuccuccccuccuugcaccgagauuaauaaaaaaaaaaaaaaaaaaaaaaaaaaaaaaaaaaaaaaaaaaaaaaaaaaaaaaaaaaaaaaaaugcaucccccccccccccccccccccccccccccccaaaggcucuuuucagagccaccagaauu

SEQ ID NO: 23243 - RNA, 4039 nt, Artificial Sequence
  SARS-CoV-2/Wuhan/WIV05/2019__EPI_ISL_402128 spike protein mRNA gc (1-1273)
aggagaaagcuuaccauguucguguuccuggugcugcugccccuggugagcagccagugcgugaaccugaccacccggacccagcugcccccugccuacaccaacagcuucacccggggcguguacuaccccgacaagguguuccggagcagcgugcugcacagcacccaggaccuguuccugcccuucuucagcaacgugaccugguuccacgccauccacgugagcggcaccaacggcaccaagcgguucgacaacccagugcugcccuucaacgacggcguguacuucgccagcaccgagaagucaaacaucauccggggcuggaucuucggcaccacccuggacagcaagacacagagccugcugaucgugaacaacgccaccaacguggugaucaaggugugcgaguuucaguucugcaacgaccccuuccugggcguguacuaccacaagaacaacaagagcuggauggagagcgaguuccgggucuacagcagcgcuaacaauugcaccuucgaguacgugagccagcccuuccugauggaccucgagggcaagcagggcaacuucaagaaccugcgggaguucguguucaagaacaucgauggcuacuucaagaucuacagcaagcacacccccaucaaccuggugcgggaccugccccagggauucagcgcccuggagccucugguggaccugcccaucggcaucaacaucaccagguuccagacccugcuggcccugcaccggagcuaccugacccccggcgacagcagcagcggcuggaccgccggcgccgccgcauacuacgugggcuaccugcagccacggaccuuccugcugaaguacaacgagaacggcaccaucaccgacgccguggacugcgcccuggacccccugagcgagaccaagugcacccuaaagagcuucaccguggagaagggcaucuaccagaccagcaacuuccgggugcagcccacugagagcaucgugcgguuccccaacauuaccaaccugugucccuucggcgagguguucaacgccacccgguucgccagcguguacgccuggaaccggaagcggaucagcaacugcguggccgacuacagcgugcuguacaacagcgccagcuucagcaccuucaagugcuacggcgugagcccuaccaagcugaacgaccugugcuucaccaacguguacgcugacagcuucgugauccggggcgacgaggugcggcagaucgcccccggccagaccggcaagaucgccgacuacaacuacaagcugcccgacgacuucaccggcugcgugaucgccuggaacagcaacaaccuggacagcaaggugggcggcaacuacaacuaccuguaccggcuguuccguaagagcaaccugaagccauucgagcgggacaucagcaccgagaucuaccaggccggcagcacccccugcaacgguguggagggcuuuaacugcuacuucccccugcagagcuacggcuuccagcccaccaacggcgugggcuaccagcccuaccgggugguggugcugagcuucgagcugcugcacgcccccgccaccgugugcggcccuaaaaagagcaccaaccuggugaagaacaagugcgugaacuucaauuucaacggccugaccggcaccggcgugcugaccgagagcaacaagaaguuccugcccuuccagcaguucggccgggauaucgccgacaccaccgacgcagugcgggacccccagacccuggagauccuggacaucaccccaugcagcuucggcggcgugagcgucaucacccccggcacaaacaccagcaaccagguggccgugcuguaccaggacgugaacugcaccgaggugcccguggccauccacgccgaccagcugacccccaccuggcggguguacagcaccggaagcaacguguuccagacccgggccggcugccugaucggcgccgagcacgugaacaacuccuacgagugcgacauccccaucggcgcuggcaucugcgccagcuaccagacccagaccaacagcccccggcgggcccggagcguggccagccagagcaucaucgccuacaccaugagcuuaggcgccgagaacagcguggccuacagcaacaacagcaucgcgaucccuaccaacuucaccaucagcgugaccaccgagauacugcccgugagcaugaccaagaccagcguggacuguaccauguacaucugcggcgacagcaccgagugcagcaaccugcugcugcaguacggcagcuucugcacccagcugaaccgggcccugaccggcaucgccguggagcaggacaagaacacccaagagguguucgcccaggugaagcagaucuacaagacucccccaaucaaggacuucggcggcuucaacuucagccagauccugcccgaccccagcaagcccagcaagcggagcuucaucgaggaccugcuguucaacaaggugacccuggccgacgccggcuucaucaagcaguacggcgauugccugggcgacaucgccgcucgggaccugaucugcgcccagaaguucaacgggcugaccgugcugcccccucugcugaccgacgagaugaucgcccaguacaccagcgcccugcuugccggcaccaucaccagcggcuggaccuucggcgccggcgcagcccugcagauccccuucgccaugcagauggccuaccgguucaacggcaucggcgugacccagaacgugcuguacgagaaccagaagcugaucgccaaccaguucaacagcgccaucggcaagauccaggacagccugagcagcaccgccagcgcccugggcaagcugcaggacguggugaaccagaacgcucaggcccugaacacccuggugaagcagcugagcagcaacuucggcgccaucagcucagugcugaaugacauccugagcaggcuggacaagguggaggccgaggugcagaucgaccggcugaucaccggccggcugcagagccugcagaccuacgugacccagcagcugauccgggccgccgagauccgggccagcgccaaccuggcagccaccaagaugagcgagugcgugcugggccagagcaagcggguggacuuuugcggcaagggcuaccaccugaugagcuucccccagagcgccccacacggcgugguguuccuccacgucacauacgugcccgcccaggagaagaacuucaccaccgcccccgccauuugccacgacggcaaggcucacuucccccgggagggcguguucgugagcaacggaacccacugguucgugacccagcggaacuucuacgagccccagaucaucaccaccgacaacaccuucgugagcggcaacugcgacguggugaucggcaucgugaacaacaccguguacgacccccugcagccugagcuggacagcuucaaggaggagcuggacaaguacuucaagaaccacaccagccccgauguggaccugggcgacaucagcggcaucaacgccagcguggugaacauccagaaggagaucgaccggcugaacgagguggccaagaaccugaacgagagccugaucgaccugcaggagcugggcaaguacgagcaguacaucaaguggcccugguacaucuggcugggcuucaucgccggccugaucgccaucgugauggugaccaucaugcugugcugcaugaccagcugcuguagcugccugaagggcugcugcagcugcggcagcugcugcaaguucgacgaggacgacagcgagccagugcugaagggcgugaagcugcacuacaccugaggacuaguuauaagacugacuagcccgaugggccucccaacgggcccuccuccccuccuugcaccgagauuaauaaaaaaaaaaaaaaaaaaaaaaaaaaaaaaaaaaaaaaaaaaaaaaaaaaaaaaaaaaaaaaaaugcaucccccccccccccccccccccccccccccccaaaggcucuuuucagagccaccagaauu

SEQ ID NO: 23244 - RNA, 4039 nt, Artificial Sequence
  SARS-CoV-2/Wuhan/WIV05/2019__EPI_ISL_402128 spike protein mRNA gc (1-1273)(D614G)
aggagaaagcuuaccauguucguguuccuggugcugcugccccuggugagcagccagugcgugaaccugaccacccggacccagcugcccccugccuacaccaacagcuucacccggggcguguacuaccccgacaagguguuccggagcagcgugcugcacagcacccaggaccuguuccugcccuucuucagcaacgugaccugguuccacgccauccacgugagcggcaccaacggcaccaagcgguucgacaacccagugcugcccuucaacgacggcguguacuucgccagcaccgagaagucaaacaucauccggggcuggaucuucggcaccacccuggacagcaagacacagagccugcugaucgugaacaacgccaccaacguggugaucaaggugugcgaguuucaguucugcaacgaccccuuccugggcguguacuaccacaagaacaacaagagcuggauggagagcgaguuccgggucuacagcagcgcuaacaauugcaccuucgaguacgugagccagcccuuccugauggaccucgagggcaagcagggcaacuucaagaaccugcgggaguucguguucaagaacaucgauggcuacuucaagaucuacagcaagcacacccccaucaaccuggugcgggaccugccccagggauucagcgcccuggagccucugguggaccugcccaucggcaucaacaucaccagguuccagacccugcuggcccugcaccggagcuaccugacccccggcgacagcagcagcggcuggaccgccggcgccgccgcauacuacgugggcuaccugcagccacggaccuuccugcugaaguacaacgagaacggcaccaucaccgacgccguggacugcgcccuggacccccugagcgagaccaagugcacccuaaagagcuucaccguggagaagggcaucuaccagaccagcaacuuccgggugcagcccacugagagcaucgugcgguuccccaacauuaccaaccugugucccuucggcgagguguucaacgccacccgguucgccagcguguacgccuggaaccggaagcggaucagcaacugcguggccgacuacagcgugcuguacaacagcgccagcuucagcaccuucaagugcuacggcgugagcccuaccaagcugaacgaccugugcuucaccaacguguacgcugacagcuucgugauccggggcgacgaggugcggcagaucgcccccggccagaccggcaagaucgccgacuacaacuacaagcugcccgacgacuucaccggcugcgugaucgccuggaacagcaacaaccuggacagcaaggugggcggcaacuacaacuaccuguaccggcuguuccguaagagcaaccugaagccauucgagcgggacaucagcaccgagaucuaccaggccggcagcacccccugcaacgguguggagggcuuuaacugcuacuucccccugcagagcuacggcuuccagcccaccaacggcgugggcuaccagcccuaccgggugguggugcugagcuucgagcugcugcacgcccccgccaccgugugcggcccuaaaaagagcaccaaccuggugaagaacaagugcgugaacuucaauuucaacggccugaccggcaccggcgugcugaccgagagcaacaagaaguuccugcccuuccagcaguucggccgggauaucgccgacaccaccgacgcagugcgggacccccagacccuggagauccuggacaucaccccaugcagcuucggcggcgugagcgucaucacccccggcacaaacaccagcaaccagguggccgugcuguaccagggagugaacugcaccgaggugcccguggccauccacgccgaccagcugacccccaccuggcggguguacagcaccggcagcaacguguuccagacccgggccggcugccugaucggcgccgagcacgugaacaacuccuacgagugcgacauccccaucggcgcuggcaucugcgccagcuaccagacccagaccaacagcccccggcgggcccggagcguggccagccagagcaucaucgccuacaccaugagcuuaggcgccgagaacagcguggccuacagcaacaacagcaucgcgaucccuaccaacuucaccaucagcgugaccaccgagauacugcccgugagcaugaccaagaccagcguggacuguaccauguacaucugcggcgacagcaccgagugcagcaaccugcugcugcaguacggcagcuucugcacccagcugaaccgggcccugaccggcaucgccguggagcaggacaagaacacccaagagguguucgcccaggugaagcagaucuacaagacucccccaaucaaggacuucggcggcuucaacuucagccagauccugcccgaccccagcaagcccagcaagcggagcuucaucgaggaccugcuguucaacaaggugacccuggccgacgccggcuucaucaagcaguacggcgacugccugggggauaucgccgcucgggaccugaucugcgcccagaaguucaacggccugaccgugcugcccccucugcugaccgacgagaugaucgcccaguacaccagcgcccugcuugccggcaccaucaccagcggcuggaccuucggcgccggcgcagcccugcagauccccuucgccaugcagauggccuaccgguucaacggcaucggcgugacccagaacgugcuguacgagaaccagaagcugaucgccaaccaguucaacagcgccaucggcaagauccaggacagccugagcagcaccgccagcgcccugggcaagcugcaggacguggugaaccagaacgcucaggcccugaacacccuggugaagcagcugagcagcaacuucggcgccaucagcucagugcugaaugacauccugagcaggcuggacaagguggaggccgaggugcagaucgaccggcugaucaccggccggcugcagagccugcagaccuacgugacccagcagcugauccgggccgccgagauccgggccagcgccaaccuggcagccaccaagaugagcgagugcgugcugggccagagcaagcggguggacuuuugcggcaagggcuaccaccugaugagcuucccccagagcgccccacacggcgugguguuccuccacgucacauacgugcccgcccaggagaagaacuucaccaccgcccccgccauuugccacgacggcaaggcucacuucccccgggagggaguguucgugagcaacggcacccacugguucgugacccagcggaacuucuacgagccccagaucaucaccaccgacaacaccuucgugagcggcaacugcgacguggugaucggcaucgugaacaacaccguguacgacccccugcagccugagcuggacagcuucaaggaggagcuggacaaguacuucaagaaccacaccagccccgacguggaucugggcgacaucagcggcaucaacgccagcguggugaacauccagaaggagaucgaccggcugaacgagguggccaagaaccugaacgagagccugaucgaccugcaggagcugggcaaguacgagcaguacaucaaguggcccugguacaucuggcugggcuucaucgccggccugaucgccaucgugauggugaccaucaugcugugcugcaugaccagcugcuguagcugccugaagggcugcugcagcugcggcagcugcugcaaguucgacgaggacgacagcgagccagugcugaagggcgugaagcugcacuacaccugaggacuaguuauaagacugacuagcccgaugggccucccaacgggcccuccuccccuccuugcaccgagauuaauaaaaaaaaaaaaaaaaaaaaaaaaaaaaaaaaaaaaaaaaaaaaaaaaaaaaaaaaaaaaaaaaugcaucccccccccccccccccccccccccccccccaaaggcucuuuucagagccaccagaauu

SEQ ID NO: 23245 - RNA, 4039 nt, Artificial Sequence
  SARS-CoV-2/Wuhan/WIV05/2019__EPI_ISL_402128 spike protein mRNA gc (1-1273)(A222V_D614G)
aggagaaagcuuaccauguucguguuccuggugcugcugccccuggugagcagccagugcgugaaccugaccacccggacccagcugcccccugccuacaccaacagcuucacccggggcguguacuaccccgacaagguguuccggagcagcgugcugcacagcacccaggaccuguuccugcccuucuucagcaacgugaccugguuccacgccauccacgugagcggcaccaacggcaccaagcgguucgacaacccagugcugcccuucaacgacggcguguacuucgccagcaccgagaagucaaacaucauccggggcuggaucuucggcaccacccuggacagcaagacacagagccugcugaucgugaacaacgccaccaacguggugaucaaggugugcgaguuucaguucugcaacgaccccuuccugggcguguacuaccacaagaacaacaagagcuggauggagagcgaguuccgggucuacagcagcgcuaacaauugcaccuucgaguacgugagccagcccuuccugauggaccucgagggcaagcagggcaacuucaagaaccugcgggaguucguguucaagaacaucgauggcuacuucaagaucuacagcaagcacacccccaucaaccuggugcgggaccugccccagggauucagcgugcuggagccucugguggaccugcccaucggcaucaacaucaccagguuccagacccugcuggcccugcaccggagcuaccugacccccggcgacagcagcagcggcuggaccgccggcgccgccgccuacuacgugggcuaccugcagccacggaccuuccugcugaaguacaacgagaacggcaccaucaccgacgcaguggacugcgcccuggacccccugagcgagaccaagugcacccuaaagagcuucaccguggagaagggcaucuaccagaccagcaacuuccgggugcagcccacugagagcaucgugcgguuccccaacauuaccaaccugugucccuucggcgagguguucaacgccacccgguucgccagcguguacgccuggaaccggaagcggaucagcaacugcguggccgacuacagcgugcuguacaacagcgccagcuucagcaccuucaagugcuacggcgugagcccuaccaagcugaacgaccugugcuucaccaacguguacgccgacagcuucgugauccggggcgacgaggugcggcagaucgcucccggccagaccggcaagaucgccgacuacaacuacaagcugcccgacgacuucaccggcugcgugaucgccuggaacagcaacaaccuggacagcaaggugggcggcaacuacaacuaccuguaccggcuguuccguaagagcaaccugaagccauucgagcgggacaucagcaccgagaucuaccaggccggcagcacccccugcaacgguguggagggcuuuaacugcuacuucccccugcagagcuacggcuuccagcccaccaacggcgugggcuaccagcccuaccgggugguggugcugagcuucgagcugcugcacgcccccgccaccgugugcggcccuaaaaagagcaccaaccuggugaagaacaagugcgugaacuucaauuucaacggccugaccggcaccggcgugcugaccgagagcaacaagaaguuccugcccuuccagcaguucggccgggauaucgccgacaccaccgacgccgugcgggacccccagacccuggagauccuggacaucaccccaugcagcuucggcggcgucagcgugaucacccccggcacaaacaccagcaaccagguggcagugcuguaccagggagugaacugcaccgaggugcccguggccauccacgccgaccagcugacccccaccuggcggguguacagcaccggcagcaacguguuccagacccgggccggcugccugaucggcgccgagcacgugaacaacuccuacgagugcgacauccccaucggcgccggcaucugcgcuagcuaccagacccagaccaacagcccccggcgggcccggagcguggccagccagagcaucaucgccuacaccaugagcuuaggcgccgagaacagcguggccuacagcaacaacagcaucgccaucccuaccaacuucaccaucagcgugaccaccgagauacugcccgugagcaugaccaagaccagcguggacuguaccauguacaucugcggcgacagcaccgagugcagcaaccugcugcugcaguacggcagcuucugcacccagcugaaccgggcgcugaccggcaucgccguggagcaggacaagaacacccaagagguguucgcccaggugaagcagaucuacaagacucccccaaucaaggacuucggcggcuucaacuucagccagauccugcccgaccccagcaagcccagcaagcggagcuucaucgaggaccugcuguucaacaaggugacccuggccgacgccggcuucaucaagcaguacggcgacugccugggggauaucgccgcccgggaccugaucugcgcucagaaguucaacggccugaccgugcugcccccucugcugaccgacgagaugaucgcccaguacaccagcgcccugcuugccggcaccaucaccagcggcuggaccuucggcgccggcgccgcacugcagauccccuucgccaugcagauggccuaccgguucaacggcaucggcgugacccagaacgugcuguacgagaaccagaagcugaucgccaaccaguucaacagcgccaucggcaagauccaggacagccugagcagcaccgccagcgcccugggcaagcugcaggacguggugaaccagaacgcccaggcucugaacacccuggugaagcagcugagcagcaacuucggcgccaucagcucagugcugaaugacauccugagcaggcuggacaagguggaggccgaggugcagaucgaccggcugaucaccggccggcugcagagccugcagaccuacgugacccagcagcugauccgggccgccgagauccgggccagcgccaaccuggccgcaaccaagaugagcgagugcgugcugggccagagcaagcggguggacuuuugcggcaagggcuaccaccugaugagcuucccccagagcgccccacacggcguggucuuccuccacgugacauacgugcccgcccaggagaagaacuucaccaccgcccccgccauuugccacgacggcaaggcccacuucccccgggagggaguguucgugagcaacggcacccacugguucgugacccagcggaacuucuacgagccccagaucaucaccaccgacaacaccuucgugagcggcaacugcgacguggugaucggcaucgugaacaacaccguguacgacccccugcagccugagcuggacagcuucaaggaggagcuggacaaguacuucaagaaccacaccagccccgacguggaucugggcgacaucagcggcaucaacgcuagcguggugaacauccagaaggagaucgaccggcugaacgagguggccaagaaccugaacgagagccugaucgaccugcaggagcugggcaaguacgagcaguacaucaaguggcccugguacaucuggcugggcuucaucgccggccugaucgccaucgugauggugaccaucaugcugugcugcaugaccagcugcuguagcugccugaagggcugcugcagcugcggcagcugcugcaaguucgacgaggacgacagcgagccagugcugaagggcgugaagcugcacuacaccugaggacuaguuauaagacugacuagcccgaugggccucccaacgggcccuccuccccuccuugcaccgagauuaauaaaaaaaaaaaaaaaaaaaaaaaaaaaaaaaaaaaaaaaaaaaaaaaaaaaaaaaaaaaaaaaaugcaucccccccccccccccccccccccccccccccaaaggcucuuuucagagccaccagaauu

SEQ ID NO: 23246 - RNA, 4039 nt, Artificial Sequence
  SARS-CoV-2/Wuhan/WIV05/2019__EPI_ISL_402128 spike protein mRNA gc (1-1273)(N439K_D614G)
aggagaaagcuuaccauguucguguuccuggugcugcugccccuggugagcagccagugcgugaaccugaccacccggacccagcugcccccugccuacaccaacagcuucacccggggcguguacuaccccgacaagguguuccggagcagcgugcugcacagcacccaggaccuguuccugcccuucuucagcaacgugaccugguuccacgccauccacgugagcggcaccaacggcaccaagcgguucgacaacccagugcugcccuucaacgacggcguguacuucgccagcaccgagaagucaaacaucauccggggcuggaucuucggcaccacccuggacagcaagacacagagccugcugaucgugaacaacgccaccaacguggugaucaaggugugcgaguuucaguucugcaacgaccccuuccugggcguguacuaccacaagaacaacaagagcuggauggagagcgaguuccgggucuacagcagcgcuaacaauugcaccuucgaguacgugagccagcccuuccugauggaccucgagggcaagcagggcaacuucaagaaccugcgggaguucguguucaagaacaucgauggcuacuucaagaucuacagcaagcacacccccaucaaccuggugcgggaccugccccagggauucagcgcccuggagccucugguggaccugcccaucggcaucaacaucaccagguuccagacccugcuggcccugcaccggagcuaccugacccccggcgacagcagcagcggcuggaccgccggcgccgccgcauacuacgugggcuaccugcagccacggaccuuccugcugaaguacaacgagaacggcaccaucaccgacgccguggacugcgcccuggacccccugagcgagaccaagugcacccuaaagagcuucaccguggagaagggcaucuaccagaccagcaacuuccgggugcagcccacugagagcaucgugcgguuccccaacauuaccaaccugugucccuucggcgagguguucaacgccacccgguucgccagcguguacgccuggaaccggaagcggaucagcaacugcguggccgacuacagcgugcuguacaacagcgccagcuucagcaccuucaagugcuacggcgugagcccuaccaagcugaacgaccugugcuucaccaacguguacgcugacagcuucgugauccggggcgacgaggugcggcagaucgcccccggccagaccggcaagaucgccgacuacaacuacaagcugcccgacgacuucaccggcugcgugaucgccuggaacagcaagaaccuggacagcaaggugggcggcaacuacaacuaccuguaccggcuguuccguaagagcaaccugaagccauucgagcgggacaucagcaccgagaucuaccaggccggcagcacccccugcaacgguguggagggcuuuaacugcuacuucccccugcagagcuacggcuuccagcccaccaacggcgugggcuaccagcccuaccgggugguggugcugagcuucgagcugcugcacgcccccgccaccgugugcggcccuaaaaagagcaccaaccuggugaagaacaagugcgugaacuucaacuucaauggccugaccggcaccggcgugcugaccgagagcaacaagaaguuccugcccuuccagcaguucggccgggauaucgccgacaccaccgacgcagugcgggacccccagacccuggagauccuggacaucaccccaugcagcuucggcggcgugagcgucaucacccccggcacaaacaccagcaaccagguggccgugcuguaccagggagugaacugcaccgaggugcccguggccauccacgccgaccagcugacccccaccuggcggguguacagcaccggcagcaacguguuccagacccgggccggcugccugaucggcgccgagcacgugaacaacuccuacgagugcgacauccccaucggcgcuggcaucugcgccagcuaccagacccagaccaacagcccccggcgggcccggagcguggccagccagagcaucaucgccuacaccaugagcuuaggcgccgagaacagcguggccuacagcaacaacagcaucgcgaucccuaccaacuucaccaucagcgugaccaccgagauacugcccgugagcaugaccaagaccagcguggacuguaccauguacaucugcggcgacagcaccgagugcagcaaccugcugcugcaguacggcagcuucugcacccagcugaaccgggcccugaccggcaucgccguggagcaggacaagaacacccaagagguguucgcccaggugaagcagaucuacaagacucccccaaucaaggacuucggcggcuucaacuucagccagauccugcccgaccccagcaagcccagcaagcggagcuucaucgaggaccugcuguucaacaaggugacccuggccgacgccggcuucaucaagcaguacggcgacugccugggggauaucgccgcucgggaccugaucugcgcccagaaguucaacggccugaccgugcugcccccucugcugaccgacgagaugaucgcccaguacaccagcgcccugcuugccggcaccaucaccagcggcuggaccuucggcgccggcgcagcccugcagauccccuucgccaugcagauggccuaccgguucaacggcaucggcgugacccagaacgugcuguacgagaaccagaagcugaucgccaaccaguucaacagcgccaucggcaagauccaggacagccugagcagcaccgccagcgcccugggcaagcugcaggacguggugaaccagaacgcucaggcccugaacacccuggugaagcagcugagcagcaacuucggcgccaucagcucagugcugaacgacauccugagcaggcuggacaagguggaggccgaggugcagaucgaccggcugaucaccggccggcugcagagccugcagaccuacgugacccagcagcugauccgggccgccgagauccgggccagcgccaaucuggcagccaccaagaugagcgagugcgugcugggccagagcaagcggguggacuuuugcggcaagggcuaccaccugaugagcuucccccagagcgccccacacggcgugguguuccuccacgucacauacgugcccgcccaggagaagaacuucaccaccgcccccgccauuugccacgacggcaaggcucacuucccccgggagggaguguucgugagcaacggcacccacugguucgugacccagcggaacuucuacgagccccagaucaucaccaccgacaacaccuucgugagcggcaacugcgacguggugaucggcaucgugaacaacaccguguacgacccccugcagccugagcuggacagcuucaaggaggagcuggacaaguacuucaagaaccacaccagccccgacguggaucugggcgacaucagcggcaucaacgccagcguggugaacauccagaaggagaucgaccggcugaacgagguggccaagaaccugaacgagagccugaucgaccugcaggagcugggcaaguacgagcaguacaucaaguggcccugguacaucuggcugggcuucaucgccggccugaucgccaucgugauggugaccaucaugcugugcugcaugaccagcugcuguagcugccugaagggcugcugcagcugcggcagcugcugcaaguucgacgaggacgacagcgagccagugcugaagggcgugaagcugcacuacaccugaggacuaguuauaagacugacuagcccgaugggccucccaacgggcccuccuccccuccuugcaccgagauuaauaaaaaaaaaaaaaaaaaaaaaaaaaaaaaaaaaaaaaaaaaaaaaaaaaaaaaaaaaaaaaaaaugcaucccccccccccccccccccccccccccccccaaaggcucuuuucagagccaccagaauu

SEQ ID NO: 23247 - RNA, 4039 nt, Artificial Sequence
  SARS-CoV-2/Wuhan/WIV05/2019__EPI_ISL_402128 spike protein mRNA gc (1-1273)(S477N_D614G)
aggagaaagcuuaccauguucguguuccuggugcugcugccccuggugagcagccagugcgugaaccugaccacccggacccagcugcccccugccuacaccaacagcuucacccggggcguguacuaccccgacaagguguuccggagcagcgugcugcacagcacccaggaccuguuccugcccuucuucagcaacgugaccugguuccacgccauccacgugagcggcaccaacggcaccaagcgguucgacaacccagugcugcccuucaacgacggcguguacuucgccagcaccgagaagucaaacaucauccggggcuggaucuucggcaccacccuggacagcaagacacagagccugcugaucgugaacaacgccaccaacguggugaucaaggugugcgaguuucaguucugcaacgaccccuuccugggcguguacuaccacaagaacaacaagagcuggauggagagcgaguuccgggucuacagcagcgcuaacaauugcaccuucgaguacgugagccagcccuuccugauggaccucgagggcaagcagggcaacuucaagaaccugcgggaguucguguucaagaacaucgauggcuacuucaagaucuacagcaagcacacccccaucaaccuggugcgggaccugccccagggauucagcgcccuggagccucugguggaccugcccaucggcaucaacaucaccagguuccagacccugcuggcccugcaccggagcuaccugacccccggcgacagcagcagcggcuggaccgccggcgccgccgcauacuacgugggcuaccugcagccacggaccuuccugcugaaguacaacgagaacggcaccaucaccgacgccguggacugcgcccuggacccccugagcgagaccaagugcacccuaaagagcuucaccguggagaagggcaucuaccagaccagcaacuuccgggugcagcccacugagagcaucgugcgguuccccaacauuaccaaccugugucccuucggcgagguguucaacgccacccgguucgccagcguguacgccuggaaccggaagcggaucagcaacugcguggccgacuacagcgugcuguacaacagcgccagcuucagcaccuucaagugcuacggcgugagcccuaccaagcugaacgaccugugcuucaccaacguguacgcugacagcuucgugauccggggcgacgaggugcggcagaucgcccccggccagaccggcaagaucgccgacuacaacuacaagcugcccgacgacuucaccggcugcgugaucgccuggaacagcaacaaccuggacagcaaggugggcggcaacuacaacuaccuguaccggcuguuccguaagagcaaccugaagccauucgagcgggacaucagcaccgagaucuaccaggccggcaacacccccugcaacgguguggagggcuuuaacugcuacuucccccugcagagcuacggcuuccagcccaccaacggcgugggcuaccagcccuaccgggugguggugcugagcuucgagcugcugcacgcccccgccaccgugugcggcccuaaaaagagcaccaaccuggugaagaacaagugcgugaauuucaacuucaacggccugaccggcaccggcgugcugaccgagagcaacaagaaguuccugcccuuccagcaguucggccgggauaucgccgacaccaccgacgcagugcgggacccccagacccuggagauccuggacaucaccccaugcagcuucggcggcgugagcgucaucacccccggcacaaacaccagcaaccagguggccgugcuguaccagggagugaacugcaccgaggugcccguggccauccacgccgaccagcugacccccaccuggcggguguacagcaccggcagcaacguguuccagacccgggccggcugccugaucggcgccgagcacgugaacaacagcuacgagugcgacauccccaucggcgcuggcaucugcgccuccuaccagacccagaccaacagcccccggcgggcccggagcguggccagccagagcaucaucgccuacaccaugagcuuaggcgccgagaacagcguggccuacagcaacaacagcaucgcgaucccuaccaacuucaccaucagcgugaccaccgagauacugcccgugagcaugaccaagaccagcguggacuguaccauguacaucugcggcgacagcaccgagugcagcaaccugcugcugcaguacggcagcuucugcacccagcugaaccgggcccugaccggcaucgccguggagcaggacaagaacacccaagagguguucgcccaggugaagcagaucuacaagacucccccaaucaaggacuucggcggcuucaacuucagccagauccugcccgaccccagcaagcccagcaagcggagcuucaucgaggaccugcuguucaacaaggugacccuggccgacgccggcuucaucaagcaguacggcgacugccugggggauaucgccgcucgggaccugaucugcgcccagaaguucaacggccugaccgugcugcccccucugcugaccgacgagaugaucgcccaguacaccagcgcccugcuugccggcaccaucaccagcggcuggaccuucggcgccggcgcagcccugcagauccccuucgccaugcagauggccuaccgguucaacggcaucggcgugacccagaacgugcuguacgagaaccagaagcugaucgccaaccaguucaacagcgccaucggcaagauccaggacagccugagcagcaccgccagcgcccugggcaagcugcaggacguggugaaccagaacgcucaggcccugaacacccuggugaagcagcugagcagcaauuucggcgccaucagcagcgugcugaacgacauccugucaaggcuggacaagguggaggccgaggugcagaucgaccggcugaucaccggccggcugcagagccugcagaccuacgugacccagcagcugauccgggccgccgagauccgggccagcgccaaccuggcagccaccaagaugagcgagugcgugcugggccagagcaagcggguggacuuuugcggcaagggcuaccaccugaugagcuucccccagagcgccccacacggcgugguguuccuccacgucacauacgugcccgcccaggagaagaacuucaccaccgcccccgccauuugccacgacggcaaggcucacuucccccgggagggaguguucgugagcaacggcacccacugguucgugacccagcggaacuucuacgagccccagaucaucaccaccgacaacaccuucgugagcggcaacugcgacguggugaucggcaucgugaacaacaccguguacgacccccugcagccugagcuggacagcuucaaggaggagcuggacaaguacuucaagaaccacaccagccccgacguggaucugggcgacaucagcggcaucaacgccagcguggugaacauccagaaggagaucgaccggcugaacgagguggccaagaaccugaacgagagccugaucgaccugcaggagcugggcaaguacgagcaguacaucaaguggcccugguacaucuggcugggcuucaucgccggccugaucgccaucgugauggugaccaucaugcugugcugcaugaccagcugcuguagcugccugaagggcugcugcagcugcggcagcugcugcaaguucgacgaggacgacagcgagccagugcugaagggcgugaagcugcacuacaccugaggacuaguuauaagacugacuagcccgaugggccucccaacgggcccuccuccccuccuugcaccgagauuaauaaaaaaaaaaaaaaaaaaaaaaaaaaaaaaaaaaaaaaaaaaaaaaaaaaaaaaaaaaaaaaaaugcaucccccccccccccccccccccccccccccccaaaggcucuuuucagagccaccagaauu

SEQ ID NO: 23248 - RNA, 4039 nt, Artificial Sequence
  SARS-CoV-2/Wuhan/WIV05/2019__EPI_ISL_402128 spike protein mRNA gc (1-1273)(N501Y_D614G)
aggagaaagcuuaccauguucguguuccuggugcugcugccccuggugagcagccagugcgugaaccugaccacccggacccagcugcccccugccuacaccaacagcuucacccggggcguguacuaccccgacaagguguuccggagcagcgugcugcacagcacccaggaccuguuccugcccuucuucagcaacgugaccugguuccacgccauccacgugagcggcaccaacggcaccaagcgguucgacaacccagugcugcccuucaacgacggcguguacuucgccagcaccgagaagucaaacaucauccggggcuggaucuucggcaccacccuggacagcaagacacagagccugcugaucgugaacaacgccaccaacguggugaucaaggugugcgaguuucaguucugcaacgaccccuuccugggcguguacuaccacaagaacaacaagagcuggauggagagcgaguuccgggucuacagcagcgcuaacaauugcaccuucgaguacgugagccagcccuuccugauggaccucgagggcaagcagggcaacuucaagaaccugcgggaguucguguucaagaacaucgauggcuacuucaagaucuacagcaagcacacccccaucaaccuggugcgggaccugccccagggauucagcgcccuggagccucugguggaccugcccaucggcaucaacaucaccagguuccagacccugcuggcccugcaccggagcuaccugacccccggcgacagcagcagcggcuggaccgccggcgccgccgcauacuacgugggcuaccugcagccacggaccuuccugcugaaguacaacgagaacggcaccaucaccgacgccguggacugcgcccuggacccccugagcgagaccaagugcacccuaaagagcuucaccguggagaagggcaucuaccagaccagcaacuuccgggugcagcccacugagagcaucgugcgguuccccaacauuaccaaccugugucccuucggcgagguguucaacgccacccgguucgccagcguguacgccuggaaccggaagcggaucagcaacugcguggccgacuacagcgugcuguacaacagcgccagcuucagcaccuucaagugcuacggcgugagcccuaccaagcugaacgaccugugcuucaccaacguguacgcugacagcuucgugauccggggcgacgaggugcggcagaucgcccccggccagaccggcaagaucgccgacuacaacuacaagcugcccgacgacuucaccggcugcgugaucgccuggaacagcaacaaccuggacagcaaggugggcggcaacuacaacuaccuguaccggcuguuccguaagagcaaccugaagccauucgagcgggacaucagcaccgagaucuaccaggccggcagcacccccugcaacgguguggagggcuuuaacugcuacuucccccugcagagcuacggcuuccagcccaccuacggcgugggcuaccagcccuaccgggugguggugcugagcuucgagcugcugcacgcccccgccaccgugugcggcccuaaaaagagcaccaaccuggugaagaacaagugcgugaacuucaacuucaauggccugaccggcaccggcgugcugaccgagagcaacaagaaguuccugcccuuccagcaguucggccgggauaucgccgacaccaccgacgcagugcgggacccccagacccuggagauccuggacaucaccccaugcagcuucggcggcgugagcgucaucacccccggcacaaacaccagcaaccagguggccgugcuguaccagggagugaacugcaccgaggugcccguggccauccacgccgaccagcugacccccaccuggcggguguacagcaccggcagcaacguguuccagacccgggccggcugccugaucggcgccgagcacgugaacaacuccuacgagugcgacauccccaucggcgcuggcaucugcgccagcuaccagacccagaccaacagcccccggcgggcccggagcguggccagccagagcaucaucgccuacaccaugagcuuaggcgccgagaacagcguggccuacagcaacaacagcaucgcgaucccuaccaacuucaccaucagcgugaccaccgagauacugcccgugagcaugaccaagaccagcguggacuguaccauguacaucugcggcgacagcaccgagugcagcaaccugcugcugcaguacggcagcuucugcacccagcugaaccgggcccugaccggcaucgccguggagcaggacaagaacacccaagagguguucgcccaggugaagcagaucuacaagacucccccaaucaaggacuucggcggcuucaacuucagccagauccugcccgaccccagcaagcccagcaagcggagcuucaucgaggaccugcuguucaacaaggugacccuggccgacgccggcuucaucaagcaguacggcgacugccugggggauaucgccgcucgggaccugaucugcgcccagaaguucaacggccugaccgugcugcccccucugcugaccgacgagaugaucgcccaguacaccagcgcccugcuugccggcaccaucaccagcggcuggaccuucggcgccggcgcagcccugcagauccccuucgccaugcagauggccuaccgguucaacggcaucggcgugacccagaacgugcuguacgagaaccagaagcugaucgccaaccaguucaacagcgccaucggcaagauccaggacagccugagcagcaccgccagcgcccugggcaagcugcaggacguggugaaccagaacgcucaggcccugaacacccuggugaagcagcugagcagcaacuucggcgccaucagcucagugcugaacgacauccugagcaggcuggacaagguggaggccgaggugcagaucgaccggcugaucaccggccggcugcagagccugcagaccuacgugacccagcagcugauccgggccgccgagauccgggccagcgccaaucuggcagccaccaagaugagcgagugcgugcugggccagagcaagcggguggacuuuugcggcaagggcuaccaccugaugagcuucccccagagcgccccacacggcgugguguuccuccacgucacauacgugcccgcccaggagaagaacuucaccaccgcccccgccauuugccacgacggcaaggcucacuucccccgggagggaguguucgugagcaacggcacccacugguucgugacccagcggaacuucuacgagccccagaucaucaccaccgacaacaccuucgugagcggcaacugcgacguggugaucggcaucgugaacaacaccguguacgacccccugcagccugagcuggacagcuucaaggaggagcuggacaaguacuucaagaaccacaccagccccgacguggaucugggcgacaucagcggcaucaacgccagcguggugaacauccagaaggagaucgaccggcugaacgagguggccaagaaccugaacgagagccugaucgaccugcaggagcugggcaaguacgagcaguacaucaaguggcccugguacaucuggcugggcuucaucgccggccugaucgccaucgugauggugaccaucaugcugugcugcaugaccagcugcuguagcugccugaagggcugcugcagcugcggcagcugcugcaaguucgacgaggacgacagcgagccagugcugaagggcgugaagcugcacuacaccugaggacuaguuauaagacugacuagcccgaugggccucccaacgggcccuccuccccuccuugcaccgagauuaauaaaaaaaaaaaaaaaaaaaaaaaaaaaaaaaaaaaaaaaaaaaaaaaaaaaaaaaaaaaaaaaaugcaucccccccccccccccccccccccccccccccaaaggcucuuuucagagccaccagaauu

SEQ ID NO: 23249 - RNA, 4033 nt, Artificial Sequence
  SARS-CoV-2/Wuhan/WIV05/2019__EPI_ISL_402128 spike protein mRNA gc (1-1273)(H69del_V70del_D614G)
aggagaaagcuuaccauguucguguuccuggugcugcugccccuggugagcagccagugcgugaaccugaccacccggacccagcugcccccugccuacaccaacagcuucacccggggcguguacuaccccgacaagguguuccggagcagcgugcugcacagcacccaggaccuguuccugcccuucuucagcaacgugaccugguuccacgccaucagcggcaccaacggcaccaagcgguucgacaacccagugcugcccuucaacgacggcguguacuucgccagcaccgagaagucaaacaucauccggggcuggaucuucggcaccacccuggacagcaagacacagagccugcugaucgugaacaacgccaccaacguggugaucaaggugugcgaguuucaguucugcaacgaccccuuccugggcguguacuaccacaagaacaacaagagcuggauggagagcgaguuccggguguacagcagcgcuaacaauugcaccuucgaguacgucagccagcccuuccugauggaccucgagggcaagcagggcaacuucaagaaccugcgggaguucguguucaagaacaucgauggcuacuucaagaucuacagcaagcacacccccaucaaccuggugcgggaccugccccagggauucagcgcccuggagccucugguggaccugcccaucggcaucaacaucaccagguuccagacccugcuggcccugcaccggagcuaccugacccccggcgacagcagcagcggcuggaccgccggcgccgccgcauacuacgugggcuaccugcagccacggaccuuccugcugaaguacaacgagaacggcaccaucaccgacgccguggacugcgcccuggacccccugagcgagaccaagugcacccuaaagagcuucaccguggagaagggcaucuaccagaccagcaacuuccgggugcagcccacugagagcaucgugcgguuccccaacauuaccaaccugugucccuucggcgagguguucaacgccacccgguucgccagcguguacgccuggaaccggaagcggaucagcaacugcguggccgacuacagcgugcuguacaacagcgccagcuucagcaccuucaagugcuacggcgugagcccuaccaagcugaacgaccugugcuucaccaacguguacgcugacagcuucgugauccggggcgacgaggugcggcagaucgcccccggccagaccggcaagaucgccgacuacaacuacaagcugcccgacgacuucaccggcugcgugaucgccuggaacagcaacaaccuggacagcaaggugggcggcaacuacaacuaccuguaccggcuguuccguaagagcaaccugaagccauucgagcgggacaucagcaccgagaucuaccaggccggcagcacccccugcaacgguguggagggcuuuaacugcuacuucccccugcagagcuacggcuuccagcccaccaacggcgugggcuaccagcccuaccgggugguggugcugagcuucgagcugcugcacgcccccgccaccgugugcggcccuaaaaagagcaccaaccuggugaagaacaagugcgugaacuucaauuucaacggccugaccggcaccggcgugcugaccgagagcaacaagaaguuccugcccuuccagcaguucggccgggauaucgccgacaccaccgacgcagugcgggacccccagacccuggagauccuggacaucaccccaugcagcuucggcggcgugagcgugaucacccccggcacaaacaccagcaaccaggucgccgugcuguaccagggagugaacugcaccgaggugcccguggccauccacgccgaccagcugacccccaccuggcggguguacagcaccggcagcaacguguuccagacccgggccggcugccugaucggcgccgagcacgugaacaacuccuacgagugcgacauccccaucggcgcuggcaucugcgccagcuaccagacccagaccaacagcccccggcgggcccggagcguggccagccagagcaucaucgccuacaccaugagcuuaggcgccgagaacagcguggccuacagcaacaacagcaucgcgaucccuaccaacuucaccaucagcgugaccaccgagauacugcccgugagcaugaccaagaccagcguggacuguaccauguacaucugcggcgacagcaccgagugcagcaaccugcugcugcaguacggcagcuucugcacccagcugaaccgggcccugaccggcaucgccguggagcaggacaagaacacccaagagguguucgcccaggugaagcagaucuacaagacucccccaaucaaggacuucggcggcuucaacuucagccagauccugcccgaccccagcaagcccagcaagcggagcuucaucgaggaccugcuguucaacaaggugacccuggccgacgccggcuucaucaagcaguacggcgacugccugggggauaucgccgcucgggaccugaucugcgcccagaaguucaacggccugaccgugcugcccccucugcugaccgacgagaugaucgcccaguacaccagcgcccugcuugccggcaccaucaccagcggcuggaccuucggcgccggcgcagcccugcagauccccuucgccaugcagauggccuaccgguucaacggcaucggcgugacccagaacgugcuguacgagaaccagaagcugaucgccaaccaguucaacagcgccaucggcaagauccaggacagccugagcagcaccgccagcgcccugggcaagcugcaggacguggugaaccagaacgcucaggcccugaacacccuggugaagcagcugagcagcaacuucggcgccaucagcucagugcugaaugacauccugagcaggcuggacaagguggaggccgaggugcagaucgaccggcugaucaccggccggcugcagagccugcagaccuacgugacccagcagcugauccgggccgccgagauccgggccagcgccaaccuggcagccaccaagaugagcgagugcgugcugggccagagcaagcggguggacuuuugcggcaagggcuaccaccugaugagcuucccccagagcgccccacacggcgugguguuccuccacgugacauacguccccgcccaggagaagaacuucaccaccgcccccgccauuugccacgacggcaaggcucacuucccccgggagggaguguucgugagcaacggcacccacugguucgugacccagcggaacuucuacgagccccagaucaucaccaccgacaacaccuucgugagcggcaacugcgacguggugaucggcaucgugaacaacaccguguacgacccccugcagccugagcuggacagcuucaaggaggagcuggacaaguacuucaagaaccacaccagccccgacguggaucugggcgacaucagcggcaucaacgccagcguggugaacauccagaaggagaucgaccggcugaacgagguggccaagaaccugaacgagagccugaucgaccugcaggagcugggcaaguacgagcaguacaucaaguggcccugguacaucuggcugggcuucaucgccggccugaucgccaucgugauggugaccaucaugcugugcugcaugaccagcugcuguagcugccugaagggcugcugcagcugcggcagcugcugcaaguucgacgaggacgacagcgagccagugcugaagggcgugaagcugcacuacaccugaggacuaguuauaagacugacuagcccgaugggccucccaacgggcccuccuccccuccuugcaccgagauuaauaaaaaaaaaaaaaaaaaaaaaaaaaaaaaaaaaaaaaaaaaaaaaaaaaaaaaaaaaaaaaaaaugcaucccccccccccccccccccccccccccccccaaaggcucuuuucagagccaccagaauu

SEQ ID NO: 23250 - RNA, 4039 nt, Artificial Sequence
  SARS-CoV-2/Wuhan/WIV05/2019__EPI_ISL_402128 spike protein mRNA gc (1-1273)(Y453F_D614G)
aggagaaagcuuaccauguucguguuccuggugcugcugccccuggugagcagccagugcgugaaccugaccacccggacccagcugcccccugccuacaccaacagcuucacccggggcguguacuaccccgacaagguguuccggagcagcgugcugcacagcacccaggaccuguuccugcccuucuucagcaacgugaccugguuccacgccauccacgugagcggcaccaacggcaccaagcgguucgacaacccagugcugcccuucaacgacggcguguacuucgccagcaccgagaagucaaacaucauccggggcuggaucuucggcaccacccuggacagcaagacacagagccugcugaucgugaacaacgccaccaacguggugaucaaggugugcgaguuucaguucugcaacgaccccuuccugggcguguacuaccacaagaacaacaagagcuggauggagagcgaguuccgggucuacagcagcgcuaacaauugcaccuucgaguacgugagccagcccuuccugauggaccucgagggcaagcagggcaacuucaagaaccugcgggaguucguguucaagaacaucgauggcuacuucaagaucuacagcaagcacacccccaucaaccuggugcgggaccugccccagggauucagcgcccuggagccucugguggaccugcccaucggcaucaacaucaccagguuccagacccugcuggcccugcaccggagcuaccugacccccggcgacagcagcagcggcuggaccgccggcgccgccgcauacuacgugggcuaccugcagccacggaccuuccugcugaaguacaacgagaacggcaccaucaccgacgccguggacugcgcccuggacccccugagcgagaccaagugcacccuaaagagcuucaccguggagaagggcaucuaccagaccagcaacuuccgggugcagcccacugagagcaucgugcgguuccccaacauuaccaaccugugucccuucggcgagguguucaacgccacccgguucgccagcguguacgccuggaaccggaagcggaucagcaacugcguggccgacuacagcgugcuguacaacagcgccagcuucagcaccuucaagugcuacggcgugagcccuaccaagcugaacgaccugugcuucaccaacguguacgcugacagcuucgugauccggggcgacgaggugcggcagaucgcccccggccagaccggcaagaucgccgacuacaacuacaagcugcccgacgacuucaccggcugcgugaucgccuggaacagcaacaaccuggacagcaaggugggcggcaacuacaacuaccuguuccggcuguuccguaagagcaaccugaagccauuugagcgggacaucagcaccgagaucuaccaggccggcagcacccccugcaacgguguggagggcuucaacugcuacuucccccugcagagcuacggcuuccagcccaccaacggcgugggcuaccagcccuaccgggugguggugcugagcuucgagcugcugcacgcccccgccaccgugugcggcccuaaaaagagcaccaaccuggugaagaacaagugcgugaacuucaauuucaacggccugaccggcaccggcgugcugaccgagagcaacaagaaguuccugcccuuccagcaguucggccgggauaucgccgacaccaccgacgcagugcgggacccccagacccuggagauccuggacaucaccccaugcagcuucggcggcgugagcgucaucacccccggcacaaacaccagcaaccagguggccgugcuguaccagggagugaacugcaccgaggugcccguggccauccacgccgaccagcugacccccaccuggcggguguacagcaccggcagcaacguguuccagacccgggccggcugccugaucggcgccgagcacgugaacaacuccuacgagugcgacauccccaucggcgcuggcaucugcgccagcuaccagacccagaccaacagcccccggcgggcccggagcguggccagccagagcaucaucgccuacaccaugagcuuaggcgccgagaacagcguggccuacagcaacaacagcaucgcgaucccuaccaacuucaccaucagcgugaccaccgagauacugcccgugagcaugaccaagaccagcguggacuguaccauguacaucugcggcgacagcaccgagugcagcaaccugcugcugcaguacggcagcuucugcacccagcugaaccgggcccugaccggcaucgccguggagcaggacaagaacacccaagagguguucgcccaggugaagcagaucuacaagacucccccaaucaaggacuucggcggcuucaacuucagccagauccugcccgaccccagcaagcccagcaagcggagcuucaucgaggaccugcuguucaacaaggugacccuggccgacgccggcuucaucaagcaguacggcgacugccugggggauaucgccgcucgggaccugaucugcgcccagaaguucaacggccugaccgugcugcccccucugcugaccgacgagaugaucgcccaguacaccagcgcccugcuugccggcaccaucaccagcggcuggaccuucggcgccggcgcagcccugcagauccccuucgccaugcagauggccuaccgguucaacggcaucggcgugacccagaacgugcuguacgagaaccagaagcugaucgccaaccaguucaacagcgccaucggcaagauccaggacagccugagcagcaccgccagcgcccugggcaagcugcaggacguggugaaccagaacgcucaggcccugaacacccuggugaagcagcugagcagcaacuuuggcgccaucagcucagugcugaaugacauccugagcaggcuggacaagguggaggccgaggugcagaucgaccggcugaucaccggccggcugcagagccugcagaccuacgugacccagcagcugauccgggccgccgagauccgggccagcgccaaccuggcagccaccaagaugagcgagugcgugcugggccagagcaagcggguggacuucugcggcaagggcuaccaccugaugagcuucccccagagcgccccacacggcgugguguuccuccacgucacauacgugcccgcccaggagaagaacuucaccaccgcccccgccauuugccacgacggcaaggcucacuucccccgggagggaguguucgugagcaacggcacccacugguucgugacccagcggaacuucuacgagccccagaucaucaccaccgacaacaccuucgugagcggcaacugcgacguggugaucggcaucgugaacaacaccguguacgacccccugcagccugagcuggacagcuucaaggaggagcuggacaaguacuucaagaaccacaccagccccgacguggaucugggcgacaucagcggcaucaacgccagcguggugaacauccagaaggagaucgaccggcugaacgagguggccaagaaccugaacgagagccugaucgaccugcaggagcugggcaaguacgagcaguacaucaaguggcccugguacaucuggcugggcuucaucgccggccugaucgccaucgugauggugaccaucaugcugugcugcaugaccagcugcuguagcugccugaagggcugcugcagcugcggcagcugcugcaaguucgacgaggacgacagcgagccagugcugaagggcgugaagcugcacuacaccugaggacuaguuauaagacugacuagcccgaugggccucccaacgggcccuccuccccuccuugcaccgagauuaauaaaaaaaaaaaaaaaaaaaaaaaaaaaaaaaaaaaaaaaaaaaaaaaaaaaaaaaaaaaaaaaaugcaucccccccccccccccccccccccccccccccaaaggcucuuuucagagccaccagaauu

SEQ ID NO: 23251 - RNA, 4039 nt, Artificial Sequence
  SARS-CoV-2/Wuhan/WIV05/2019__EPI_ISL_402128 spike protein mRNA gc (1-1273)(D614G_I692V)
aggagaaagcuuaccauguucguguuccuggugcugcugccccuggugagcagccagugcgugaaccugaccacccggacccagcugcccccugccuacaccaacagcuucacccggggcguguacuaccccgacaagguguuccggagcagcgugcugcacagcacccaggaccuguuccugcccuucuucagcaacgugaccugguuccacgccauccacgugagcggcaccaacggcaccaagcgguucgacaacccagugcugcccuucaacgacggcguguacuucgccagcaccgagaagucaaacaucauccggggcuggaucuucggcaccacccuggacagcaagacacagagccugcugaucgugaacaacgccaccaacguggugaucaaggugugcgaguuucaguucugcaacgaccccuuccugggcguguacuaccacaagaacaacaagagcuggauggagagcgaguuccgggucuacagcagcgcuaacaauugcaccuucgaguacgugagccagcccuuccugauggaccucgagggcaagcagggcaacuucaagaaccugcgggaguucguguucaagaacaucgauggcuacuucaagaucuacagcaagcacacccccaucaaccuggugcgggaccugccccagggauucagcgcccuggagccucugguggaccugcccaucggcaucaacaucaccagguuccagacccugcuggcccugcaccggagcuaccugacccccggcgacagcagcagcggcuggaccgccggcgccgccgcauacuacgugggcuaccugcagccacggaccuuccugcugaaguacaacgagaacggcaccaucaccgacgccguggacugcgcccuggacccccugagcgagaccaagugcacccuaaagagcuucaccguggagaagggcaucuaccagaccagcaacuuccgggugcagcccacugagagcaucgugcgguuccccaacauuaccaaccugugucccuucggcgagguguucaacgccacccgguucgccagcguguacgccuggaaccggaagcggaucagcaacugcguggccgacuacagcgugcuguacaacagcgccagcuucagcaccuucaagugcuacggcgugagcccuaccaagcugaacgaccugugcuucaccaacguguacgcugacagcuucgugauccggggcgacgaggugcggcagaucgcccccggccagaccggcaagaucgccgacuacaacuacaagcugcccgacgacuucaccggcugcgugaucgccuggaacagcaacaaccuggacagcaaggugggcggcaacuacaacuaccuguaccggcuguuccguaagagcaaccugaagccauucgagcgggacaucagcaccgagaucuaccaggccggcagcacccccugcaacgguguggagggcuuuaacugcuacuucccccugcagagcuacggcuuccagcccaccaacggcgugggcuaccagcccuaccgggugguggugcugagcuucgagcugcugcacgcccccgccaccgugugcggcccuaaaaagagcaccaaccuggugaagaacaagugcgugaacuucaauuucaacggccugaccggcaccggcgugcugaccgagagcaacaagaaguuccugcccuuccagcaguucggccgggauaucgccgacaccaccgacgcagugcgggacccccagacccuggagauccuggacaucaccccaugcagcuucggcggcgugagcgucaucacccccggcacaaacaccagcaaccagguggccgugcuguaccagggagugaacugcaccgaggugcccguggccauccacgccgaccagcugacccccaccuggcggguguacagcaccggcagcaacguguuccagacccgggccggcugccugaucggcgccgagcacgugaacaacuccuacgagugcgacauccccaucggcgcuggcaucugcgccagcuaccagacccagaccaacagcccccggcgggcccggagcguggccagccagagcgugaucgccuacaccaugagcuuaggcgccgagaacagcguggccuacagcaacaacagcaucgcgaucccuaccaacuucaccaucagcgugaccaccgagauccugcccgugagcaugaccaagaccagcguggacuguaccauguacauaugcggcgacagcaccgagugcagcaaccugcugcugcaguacggcagcuucugcacccagcugaaccgggcccugaccggcaucgccguggagcaggacaagaacacccaagagguguucgcccaggugaagcagaucuacaagacucccccaaucaaggacuucggcggcuucaacuucagccagauccugcccgaccccagcaagcccagcaagcggagcuucaucgaggaccugcuguucaacaaggugacccuggccgacgccggcuucaucaagcaguacggcgacugccugggggauaucgccgcucgggaccugaucugcgcccagaaguucaacggccugaccgugcugcccccucugcugaccgacgagaugaucgcccaguacaccagcgcccugcuugccggcaccaucaccagcggcuggaccuucggcgccggcgcagcccugcagauccccuucgccaugcagauggccuaccgguucaacggcaucggcgugacccagaacgugcuguacgagaaccagaagcugaucgccaaccaguucaacagcgccaucggcaagauccaggacagccugagcagcaccgccagcgcccugggcaagcugcaggacguggugaaccagaacgcucaggcccugaacacccuggugaagcagcugagcagcaacuucggcgccaucagcucagugcugaaugacauccugagcaggcuggacaagguggaggccgaggugcagaucgaccggcugaucaccggccggcugcagagccugcagaccuacgugacccagcagcugauccgggccgccgagauccgggccagcgccaaccuggcagccaccaagaugagcgagugcgugcugggccagagcaagcggguggacuuuugcggcaagggcuaccaccugaugagcuucccccagagcgccccacacggcguggucuuccuccacgugacauacgugcccgcccaggagaagaacuucaccaccgcccccgccaucugccacgacggcaaggcucacuucccccgggagggaguguucgugagcaacggcacccacugguucgugacccagcggaacuucuacgagccccagauuaucaccaccgacaacaccuucgugagcggcaacugcgacguggugaucggcaucgugaacaacaccguguacgacccccugcagccugagcuggacagcuucaaggaggagcuggacaaguacuucaagaaccacaccagccccgacguggaucugggcgacaucagcggcaucaacgccagcguggugaacauccagaaggagaucgaccggcugaacgagguggccaagaaccugaacgagagccugaucgaccugcaggagcugggcaaguacgagcaguacaucaaguggcccugguacaucuggcugggcuucaucgccggccugaucgccaucgugauggugaccaucaugcugugcugcaugaccagcugcuguagcugccugaagggcugcugcagcugcggcagcugcugcaaguucgacgaggacgacagcgagccagugcugaagggcgugaagcugcacuacaccugaggacuaguuauaagacugacuagcccgaugggccucccaacgggcccuccuccccuccuugcaccgagauuaauaaaaaaaaaaaaaaaaaaaaaaaaaaaaaaaaaaaaaaaaaaaaaaaaaaaaaaaaaaaaaaaaugcaucccccccccccccccccccccccccccccccaaaggcucuuuucagagccaccagaauu

SEQ ID NO: 23252 - RNA, 4039 nt, Artificial Sequence
  SARS-CoV-2/Wuhan/WIV05/2019__EPI_ISL_402128 spike protein mRNA gc (1-1273)(D614G_M1229I)
aggagaaagcuuaccauguucguguuccuggugcugcugccccuggugagcagccagugcgugaaccugaccacccggacccagcugcccccugccuacaccaacagcuucacccggggcguguacuaccccgacaagguguuccggagcagcgugcugcacagcacccaggaccuguuccugcccuucuucagcaacgugaccugguuccacgccauccacgugagcggcaccaacggcaccaagcgguucgacaacccagugcugcccuucaacgacggcguguacuucgccagcaccgagaagucaaacaucauccggggcuggaucuucggcaccacccuggacagcaagacacagagccugcugaucgugaacaacgccaccaacguggugaucaaggugugcgaguuucaguucugcaacgaccccuuccugggcguguacuaccacaagaacaacaagagcuggauggagagcgaguuccgggucuacagcagcgcuaacaauugcaccuucgaguacgugagccagcccuuccugauggaccucgagggcaagcagggcaacuucaagaaccugcgggaguucguguucaagaacaucgauggcuacuucaagaucuacagcaagcacacccccaucaaccuggugcgggaccugccccagggauucagcgcccuggagccucugguggaccugcccaucggcaucaacaucaccagguuccagacccugcuggcccugcaccggagcuaccugacccccggcgacagcagcagcggcuggaccgccggcgccgccgcauacuacgugggcuaccugcagccacggaccuuccugcugaaguacaacgagaacggcaccaucaccgacgccguggacugcgcccuggacccccugagcgagaccaagugcacccuaaagagcuucaccguggagaagggcaucuaccagaccagcaacuuccgggugcagcccacugagagcaucgugcgguuccccaacauuaccaaccugugucccuucggcgagguguucaacgccacccgguucgccagcguguacgccuggaaccggaagcggaucagcaacugcguggccgacuacagcgugcuguacaacagcgccagcuucagcaccuucaagugcuacggcgugagcccuaccaagcugaacgaccugugcuucaccaacguguacgcugacagcuucgugauccggggcgacgaggugcggcagaucgcccccggccagaccggcaagaucgccgacuacaacuacaagcugcccgacgacuucaccggcugcgugaucgccuggaacagcaacaaccuggacagcaaggugggcggcaacuacaacuaccuguaccggcuguuccguaagagcaaccugaagccauucgagcgggacaucagcaccgagaucuaccaggccggcagcacccccugcaacgguguggagggcuuuaacugcuacuucccccugcagagcuacggcuuccagcccaccaacggcgugggcuaccagcccuaccgggugguggugcugagcuucgagcugcugcacgcccccgccaccgugugcggcccuaaaaagagcaccaaccuggugaagaacaagugcgugaacuucaauuucaacggccugaccggcaccggcgugcugaccgagagcaacaagaaguuccugcccuuccagcaguucggccgggauaucgccgacaccaccgacgcagugcgggacccccagacccuggagauccuggacaucaccccaugcagcuucggcggcgugagcgucaucacccccggcacaaacaccagcaaccagguggccgugcuguaccagggagugaacugcaccgaggugcccguggccauccacgccgaccagcugacccccaccuggcggguguacagcaccggcagcaacguguuccagacccgggccggcugccugaucggcgccgagcacgugaacaacuccuacgagugcgacauccccaucggcgcuggcaucugcgccagcuaccagacccagaccaacagcccccggcgggcccggagcguggccagccagagcaucaucgccuacaccaugagcuuaggcgccgagaacagcguggccuacagcaacaacagcaucgcgaucccuaccaacuucaccaucagcgugaccaccgagauacugcccgugagcaugaccaagaccagcguggacuguaccauguacaucugcggcgacagcaccgagugcagcaaccugcugcugcaguacggcagcuucugcacccagcugaaccgggcccugaccggcaucgccguggagcaggacaagaacacccaagagguguucgcccaggugaagcagaucuacaagacucccccaaucaaggacuucggcggcuucaacuucagccagauccugcccgaccccagcaagcccagcaagcggagcuucaucgaggaccugcuguucaacaaggugacccuggccgacgccggcuucaucaagcaguacggcgacugccugggggauaucgccgcucgggaccugaucugcgcccagaaguucaacggccugaccgugcugcccccucugcugaccgacgagaugaucgcccaguacaccagcgcccugcuugccggcaccaucaccagcggcuggaccuucggcgccggcgcagcccugcagauccccuucgccaugcagauggccuaccgguucaacggcaucggcgugacccagaacgugcuguacgagaaccagaagcugaucgccaaccaguucaacagcgccaucggcaagauccaggacagccugagcagcaccgccagcgcccugggcaagcugcaggacguggugaaccagaacgcucaggcccugaacacccuggugaagcagcugagcagcaacuucggcgccaucagcucagugcugaaugacauccugagcaggcuggacaagguggaggccgaggugcagaucgaccggcugaucaccggccggcugcagagccugcagaccuacgugacccagcagcugauccgggccgccgagauccgggccagcgccaaccuggcagccaccaagaugagcgagugcgugcugggccagagcaagcggguggacuuuugcggcaagggcuaccaccugaugagcuucccccagagcgccccacacggcgugguguuccuccacgucacauacgugcccgcccaggagaagaacuucaccaccgcccccgccauuugccacgacggcaaggcucacuucccccgggagggaguguucgugagcaacggcacccacugguucgugacccagcggaacuucuacgagccccagaucaucaccaccgacaacaccuucgugagcggcaacugcgacguggugaucggcaucgugaacaacaccguguacgacccccugcagccugagcuggacagcuucaaggaggagcuggacaaguacuucaagaaccacaccagccccgacguggaucugggcgacaucagcggcaucaacgccagcguggugaacauccagaaggagaucgaccggcugaacgagguggccaagaaccugaacgagagccugaucgaccugcaggagcugggcaaguacgagcaguacaucaaguggcccugguacaucuggcugggcuucaucgccggccugaucgccaucgugaucgugaccaucaugcugugcugcaugaccagcugcuguagcugccugaagggcugcugcagcugcggcagcugcugcaaguucgacgaggacgacagcgagccagugcugaagggcgugaagcugcacuacaccugaggacuaguuauaagacugacuagcccgaugggccucccaacgggcccuccuccccuccuugcaccgagauuaauaaaaaaaaaaaaaaaaaaaaaaaaaaaaaaaaaaaaaaaaaaaaaaaaaaaaaaaaaaaaaaaaugcaucccccccccccccccccccccccccccccccaaaggcucuuuucagagccaccagaauu

SEQ ID NO: 23253 - RNA, 4033 nt, Artificial Sequence
  SARS-CoV-2/Wuhan/WIV05/2019__EPI_ISL_402128 spike protein mRNA gc (1-1273)(H69del_V70del_A222V_Y453F_S477N_D614G_I692V)
aggagaaagcuuaccauguucguguuccuggugcugcugccccuggugagcagccagugcgugaaccugaccacccggacccagcugcccccugccuacaccaacagcuucacccggggcguguacuaccccgacaagguguuccggagcagcgugcugcacagcacccaggaccuguuccugcccuucuucagcaacgugaccugguuccacgccaucagcggcaccaacggcaccaagcgguucgacaacccagugcugcccuucaacgacggcguguacuucgccagcaccgagaagucaaacaucauccggggcuggaucuucggcaccacccuggacagcaagacacagagccugcugaucgugaacaacgccaccaacguggugaucaaggugugcgaguuucaguucugcaacgaccccuuccugggcguguacuaccacaagaacaacaagagcuggauggagagcgaguuccggguguacagcagcgcuaacaauugcaccuucgaguacgucagccagcccuuccugauggaccucgagggcaagcagggcaacuucaagaaccugcgggaguucguguucaagaacaucgauggcuacuucaagaucuacagcaagcacacccccaucaaccuggugcgggaccugccccagggauucagcgugcuggagccucugguggaccugcccaucggcaucaacaucaccagguuccagacccugcuggcccugcaccggagcuaccugacccccggcgacagcagcagcggcuggaccgccggcgccgccgccuacuacgugggcuaccugcagccacggaccuuccugcugaaguacaacgagaacggcaccaucaccgacgcaguggacugcgcccuggacccccugagcgagaccaagugcacccuaaagagcuucaccguggagaagggcaucuaccagaccagcaacuuccgggugcagcccacugagagcaucgugcgguuccccaacauuaccaaccugugucccuucggcgagguguucaacgccacccgguucgccagcguguacgccuggaaccggaagcggaucagcaacugcguggccgacuacagcgugcuguacaacagcgccagcuucagcaccuucaagugcuacggcgugagcccuaccaagcugaacgaccugugcuucaccaacguguacgccgacagcuucgugauccggggcgacgaggugcggcagaucgcucccggccagaccggcaagaucgccgacuacaacuacaagcugcccgacgacuucaccggcugcgugaucgccuggaacagcaacaaccuggacagcaaggugggcggcaacuacaacuaccuguuccggcuguuccguaagagcaaccugaagccauuugagcgggacaucagcaccgagaucuaccaggccggcaacacccccugcaacgguguggagggcuucaacugcuacuucccccugcagagcuacggcuuccagcccaccaacggcgugggcuaccagcccuaccgggugguggugcugagcuucgagcugcugcacgcccccgccaccgugugcggcccuaaaaagagcaccaaccuggugaagaacaagugcgugaauuucaacuucaacggccugaccggcaccggcgugcugaccgagagcaacaagaaguuccugcccuuccagcaguucggccgggauaucgccgacaccaccgacgccgugcgggacccccagacccuggagauccuggacaucaccccaugcagcuucggcggcgugagcgucaucacccccggcacaaacaccagcaaccagguggcagugcuguaccagggagugaacugcaccgaggugcccguggccauccacgccgaccagcugacccccaccuggcggguguacagcaccggcagcaacguguuccagacccgggccggcugccugaucggcgccgagcacgugaacaacagcuacgagugcgacauccccaucggcgccggcaucugcgcuuccuaccagacccagaccaacagcccccggcgggcccggagcguggccagccagagcgugaucgccuacaccaugagcuuaggcgccgagaacagcguggccuacagcaacaacagcaucgccaucccuaccaacuucaccaucagcgugaccaccgagauccugcccgugagcaugaccaagaccagcguggacuguaccauguacauaugcggcgacagcaccgagugcagcaaccugcugcugcaguacggcagcuucugcacccagcugaaccgggcgcugaccggcaucgccguggagcaggacaagaacacccaagagguguucgcccaggugaagcagaucuacaagacucccccaaucaaggacuucggcggcuucaacuucagccagauccugcccgaccccagcaagcccagcaagcggagcuucaucgaggaccugcuguucaacaaggugacccuggccgacgccggcuucaucaagcaguacggcgacugccugggggauaucgccgcccgggaccugaucugcgcucagaaguucaacggccugaccgugcugcccccucugcugaccgacgagaugaucgcccaguacaccagcgcccugcuugccggcaccaucaccagcggcuggaccuucggcgccggcgccgcacugcagauccccuucgccaugcagauggccuaccgguucaacggcaucggcgugacccagaacgugcuguacgagaaccagaagcugaucgccaaccaguucaacagcgccaucggcaagauccaggacagccugagcagcaccgccagcgcccugggcaagcugcaggacguggugaaccagaacgcccaggcucugaacacccuggugaagcagcugagcagcaauuuuggcgccaucagcagcgugcugaacgacauccugucaaggcuggacaagguggaggccgaggugcagaucgaccggcugaucaccggccggcugcagagccugcagaccuacgugacccagcagcugauccgggccgccgagauccgggccagcgccaaccuggccgcaaccaagaugagcgagugcgugcugggccagagcaagcggguggacuucugcggcaagggcuaccaccugaugagcuucccccagagcgccccacacggcguggucuuccuccacgugacauacgugcccgcccaggagaagaacuucaccaccgcccccgccaucugccacgacggcaaggcccacuucccccgggagggaguguucgugagcaacggcacccacugguucgugacccagcggaacuucuacgagccccagauuaucaccaccgacaacaccuucgugagcggcaacugcgacguggugaucggcaucgugaacaacaccguguacgacccccugcagccugagcuggacagcuucaaggaggagcuggacaaguacuucaagaaccacaccagccccgacguggaucugggcgacaucagcggcaucaacgcuagcguggugaacauccagaaggagaucgaccggcugaacgagguggccaagaaccugaacgagagccugaucgaccugcaggagcugggcaaguacgagcaguacaucaaguggcccugguacaucuggcugggcuucaucgccggccugaucgccaucgugauggugaccaucaugcugugcugcaugaccagcugcuguagcugccugaagggcugcugcagcugcggcagcugcugcaaguucgacgaggacgacagcgagccagugcugaagggcgugaagcugcacuacaccugaggacuaguuauaagacugacuagcccgaugggccucccaacgggcccuccuccccuccuugcaccgagauuaauaaaaaaaaaaaaaaaaaaaaaaaaaaaaaaaaaaaaaaaaaaaaaaaaaaaaaaaaaaaaaaaaugcaucccccccccccccccccccccccccccccccaaaggcucuuuucagagccaccagaauu

SEQ ID NO: 23254 - RNA, 4033 nt, Artificial Sequence
  SARS-CoV-2/Wuhan/WIV05/2019__EPI_ISL_402128 spike protein mRNA gc (1-1273)(H69del_V70del_Y453F_D614G_I692V_M1229I)
aggagaaagcuuaccauguucguguuccuggugcugcugccccuggugagcagccagugcgugaaccugaccacccggacccagcugcccccugccuacaccaacagcuucacccggggcguguacuaccccgacaagguguuccggagcagcgugcugcacagcacccaggaccuguuccugcccuucuucagcaacgugaccugguuccacgccaucagcggcaccaacggcaccaagcgguucgacaacccagugcugcccuucaacgacggcguguacuucgccagcaccgagaagucaaacaucauccggggcuggaucuucggcaccacccuggacagcaagacacagagccugcugaucgugaacaacgccaccaacguggugaucaaggugugcgaguuucaguucugcaacgaccccuuccugggcguguacuaccacaagaacaacaagagcuggauggagagcgaguuccggguguacagcagcgcuaacaauugcaccuucgaguacgucagccagcccuuccugauggaccucgagggcaagcagggcaacuucaagaaccugcgggaguucguguucaagaacaucgauggcuacuucaagaucuacagcaagcacacccccaucaaccuggugcgggaccugccccagggauucagcgcccuggagccucugguggaccugcccaucggcaucaacaucaccagguuccagacccugcuggcccugcaccggagcuaccugacccccggcgacagcagcagcggcuggaccgccggcgccgccgcauacuacgugggcuaccugcagccacggaccuuccugcugaaguacaacgagaacggcaccaucaccgacgccguggacugcgcccuggacccccugagcgagaccaagugcacccuaaagagcuucaccguggagaagggcaucuaccagaccagcaacuuccgggugcagcccacugagagcaucgugcgguuccccaacauuaccaaccugugucccuucggcgagguguucaacgccacccgguucgccagcguguacgccuggaaccggaagcggaucagcaacugcguggccgacuacagcgugcuguacaacagcgccagcuucagcaccuucaagugcuacggcgugagcccuaccaagcugaacgaccugugcuucaccaacguguacgcugacagcuucgugauccggggcgacgaggugcggcagaucgcccccggccagaccggcaagaucgccgacuacaacuacaagcugcccgacgacuucaccggcugcgugaucgccuggaacagcaacaaccuggacagcaaggugggcggcaacuacaacuaccuguuccggcuguuccguaagagcaaccugaagccauuugagcgggacaucagcaccgagaucuaccaggccggcagcacccccugcaacgguguggagggcuucaacugcuacuucccccugcagagcuacggcuuccagcccaccaacggcgugggcuaccagcccuaccgggugguggugcugagcuucgagcugcugcacgcccccgccaccgugugcggcccuaaaaagagcaccaaccuggugaagaacaagugcgugaacuucaauuucaacggccugaccggcaccggcgugcugaccgagagcaacaagaaguuccugcccuuccagcaguucggccgggauaucgccgacaccaccgacgcagugcgggacccccagacccuggagauccuggacaucaccccaugcagcuucggcggcgugagcgugaucacccccggcacaaacaccagcaaccaggucgccgugcuguaccagggagugaacugcaccgaggugcccguggccauccacgccgaccagcugacccccaccuggcggguguacagcaccggcagcaacguguuccagacccgggccggcugccugaucggcgccgagcacgugaacaacuccuacgagugcgacauccccaucggcgcuggcaucugcgccagcuaccagacccagaccaacagcccccggcgggcccggagcguggccagccagagcgugaucgccuacaccaugagcuuaggcgccgagaacagcguggccuacagcaacaacagcaucgcgaucccuaccaacuucaccaucagcgugaccaccgagauccugcccgugagcaugaccaagaccagcguggacuguaccauguacauaugcggcgacagcaccgagugcagcaaccugcugcugcaguacggcagcuucugcacccagcugaaccgggcccugaccggcaucgccguggagcaggacaagaacacccaagagguguucgcccaggugaagcagaucuacaagacucccccaaucaaggacuucggcggcuucaacuucagccagauccugcccgaccccagcaagcccagcaagcggagcuucaucgaggaccugcuguucaacaaggugacccuggccgacgccggcuucaucaagcaguacggcgacugccugggggauaucgccgcucgggaccugaucugcgcccagaaguucaacggccugaccgugcugcccccucugcugaccgacgagaugaucgcccaguacaccagcgcccugcuugccggcaccaucaccagcggcuggaccuucggcgccggcgcagcccugcagauccccuucgccaugcagauggccuaccgguucaacggcaucggcgugacccagaacgugcuguacgagaaccagaagcugaucgccaaccaguucaacagcgccaucggcaagauccaggacagccugagcagcaccgccagcgcccugggcaagcugcaggacguggugaaccagaacgcucaggcccugaacacccuggugaagcagcugagcagcaacuuuggcgccaucagcucagugcugaaugacauccugagcaggcuggacaagguggaggccgaggugcagaucgaccggcugaucaccggccggcugcagagccugcagaccuacgugacccagcagcugauccgggccgccgagauccgggccagcgccaaccuggcagccaccaagaugagcgagugcgugcugggccagagcaagcggguggacuucugcggcaagggcuaccaccugaugagcuucccccagagcgccccacacggcgugguguuccuccacgucacauacgugcccgcccaggagaagaacuucaccaccgcccccgccaucugccacgacggcaaggcucacuucccccgggagggaguguucgugagcaacggcacccacugguucgugacccagcggaacuucuacgagccccagauuaucaccaccgacaacaccuucgugagcggcaacugcgacguggugaucggcaucgugaacaacaccguguacgacccccugcagccugagcuggacagcuucaaggaggagcuggacaaguacuucaagaaccacaccagccccgacguggaucugggcgacaucagcggcaucaacgccagcguggugaacauccagaaggagaucgaccggcugaacgagguggccaagaaccugaacgagagccugaucgaccugcaggagcugggcaaguacgagcaguacaucaaguggcccugguacaucuggcugggcuucaucgccggccugaucgccaucgugaucgugaccaucaugcugugcugcaugaccagcugcuguagcugccugaagggcugcugcagcugcggcagcugcugcaaguucgacgaggacgacagcgagccagugcugaagggcgugaagcugcacuacaccugaggacuaguuauaagacugacuagcccgaugggccucccaacgggcccuccuccccuccuugcaccgagauuaauaaaaaaaaaaaaaaaaaaaaaaaaaaaaaaaaaaaaaaaaaaaaaaaaaaaaaaaaaaaaaaaaugcaucccccccccccccccccccccccccccccccaaaggcucuuuucagagccaccagaauu

SEQ ID NO: 23255 - RNA, 4030 nt, Artificial Sequence
  SARS-CoV-2/Wuhan/WIV05/2019__EPI_ISL_402128 spike protein mRNA gc (1-1273)(H69del_V70del_Y144del_N501Y_A570D_D614G_P681H_T716I_S982 A_D1118H)
aggagaaagcuuaccauguucguguuccuggugcugcugccccuggugagcagccagugcgugaaccugaccacccggacccagcugcccccugccuacaccaacagcuucacccggggcguguacuaccccgacaagguguuccggagcagcgugcugcacagcacccaggaccuguuccugcccuucuucagcaacgugaccugguuccacgccaucagcggcaccaacggcaccaagcgguucgacaacccagugcugcccuucaacgacggcguguacuucgccagcaccgagaagucaaacaucauccggggcuggaucuucggcaccacccuggacagcaagacacagagccugcugaucgugaacaacgccaccaacguggugaucaaggugugcgaguuucaguucugcaacgaccccuuccugggcguguaccacaagaacaacaagagcuggauggagagcgaguuccggguguacagcagcgcuaacaauugcaccuucgaguacgucagccagcccuuccugauggaccucgagggcaagcagggcaacuucaagaaccugcgggaguucguguucaagaacaucgauggcuacuucaagaucuacagcaagcacacccccaucaaccuggugcgggaccugccccagggauucagcgcccuggagccucugguggaccugcccaucggcaucaacaucaccagguuccagacccugcuggcccugcaccggagcuaccugacccccggcgacagcagcagcggcuggaccgccggcgccgccgcauacuacgugggcuaccugcagccacggaccuuccugcugaaguacaacgagaacggcaccaucaccgacgccguggacugcgcccuggacccccugagcgagaccaagugcacccuaaagagcuucaccguggagaagggcaucuaccagaccagcaacuuccgggugcagcccacugagagcaucgugcgguuccccaacauuaccaaccugugucccuucggcgagguguucaacgccacccgguucgccagcguguacgccuggaaccggaagcggaucagcaacugcguggccgacuacagcgugcuguacaacagcgccagcuucagcaccuucaagugcuacggcgugagcccuaccaagcugaacgaccugugcuucaccaacguguacgcugacagcuucgugauccggggcgacgaggugcggcagaucgcccccggccagaccggcaagaucgccgacuacaacuacaagcugcccgacgacuucaccggcugcgugaucgccuggaacagcaacaaccuggacagcaaggugggcggcaacuacaacuaccuguaccggcuguuccguaagagcaaccugaagccauucgagcgggacaucagcaccgagaucuaccaggccggcagcacccccugcaacgguguggagggcuuuaacugcuacuucccccugcagagcuacggcuuccagcccaccuacggcgugggcuaccagcccuaccgggugguggugcugagcuucgagcugcugcacgcccccgccaccgugugcggcccuaaaaagagcaccaaccuggugaagaacaagugcgugaacuucaacuucaauggccugaccggcaccggcgugcugaccgagagcaacaagaaguuccugcccuuccagcaguucggccgggauaucgacgacaccaccgacgccgugcgggacccccagacccuggagauccuggacaucaccccaugcagcuucggcggcgugagcgugaucacccccggcacaaacaccagcaaccaggucgcagugcuguaccagggagugaacugcaccgaggugcccguggccauccacgccgaccagcugacccccaccuggcggguguacagcaccggcagcaacguguuccagacccgggccggcugccugaucggcgccgagcacgugaacaacuccuacgagugcgacauccccaucggcgccggcaucugcgcuagcuaccagacccagaccaacagccaccggcgggcccggagcguggccagccagagcaucaucgccuacaccaugagcuuaggcgccgagaacagcguggccuacagcaacaacagcaucgccauccccaucaacuucaccauaagcgugaccaccgagauccugccugugagcaugaccaagaccagcguggacuguaccauguacaucugcggcgacagcaccgagugcagcaaccugcugcugcaguacggcagcuucugcacccagcugaaccgggcgcugaccggcaucgccguggagcaggacaagaacacccaagagguguucgcccaggugaagcagaucuacaagaccccacccaucaaggacuucggcggcuucaacuucagccagauccugcccgaccccagcaagcccagcaagcggagcuucaucgaggaccugcuguucaacaaggugacucuggccgacgccggcuucaucaagcaguacggcgauugccugggggacaucgccgcccgggaccugaucugcgcucagaaguucaacggccugaccgugcugccuccccugcugaccgacgagaugaucgcccaguacaccagcgcccugcuugccggcaccaucaccagcggcuggaccuucggcgccggcgccgcacugcagauccccuucgccaugcagauggccuaccgguucaacggcaucggcgugacccagaacgugcuguacgagaaccagaagcugaucgccaaccaguucaacagcgccaucggcaagauccaggacagccugagcagcaccgccagcgcccugggcaagcugcaggacguggugaaccagaacgcccaggcucugaacacccuggugaagcagcugagcagcaacuucggcgccaucagcucagugcugaacgacauccuggccaggcuggacaagguggaggccgaggugcagaucgaccggcugaucaccggccggcugcagagccugcagaccuacgugacccagcagcugauccgggccgccgagauucgggccagcgccaaucuggcagccaccaagaugagcgagugcgugcugggccagagcaagcggguggacuuuugcggcaagggcuaccaccugaugagcuucccccagagcgcuccccacggcgugguguuccuccacgugaccuacgucccagcccaggagaagaacuucacaaccgcccccgccaucugccacgacggcaaggcccacuucccccgggagggaguguucgugagcaacggcacccacugguucgugacccagcggaacuucuacgagccccagaucaucaccacccacaacaccuucgugagcggcaacugcgacguggugaucggcaucgugaacaacaccguguacgacccccugcagcccgagcuggacagcuucaaggaggagcuggacaaguacuucaagaaccacaccagcccugacguggaucugggcgacaucagcggcaucaacgccagcguggugaacauccagaaggagaucgaccggcugaacgagguggccaagaaccugaacgagagccugaucgaccugcaggagcugggcaaguacgagcaguacaucaaguggcccugguacaucuggcugggcuucaucgccggccugaucgccaucgugauggugaccaucaugcugugcugcaugaccagcugcuguagcugccugaagggcugcugcagcugcggcagcugcugcaaguucgacgaggacgacagcgagcccgugcugaagggcgugaagcugcacuacaccugaggacuaguuauaagacugacuagcccgaugggccucccaacgggcccuccuccccuccuugcaccgagauuaauaaaaaaaaaaaaaaaaaaaaaaaaaaaaaaaaaaaaaaaaaaaaaaaaaaaaaaaaaaaaaaaaugcaucccccccccccccccccccccccccccccccaaaggcucuuuucagagccaccagaauu

SEQ ID NO: 23256 - RNA, 4039 nt, Artificial Sequence
  SARS-CoV-2/Wuhan/WIV05/2019__EPI_ISL_402128 spike protein mRNA gc (1-1273)(K417N_E484K_N501Y_D614G)
aggagaaagcuuaccauguucguguuccuggugcugcugccccuggugagcagccagugcgugaaccugaccacccggacccagcugcccccugccuacaccaacagcuucacccggggcguguacuaccccgacaagguguuccggagcagcgugcugcacagcacccaggaccuguuccugcccuucuucagcaacgugaccugguuccacgccauccacgugagcggcaccaacggcaccaagcgguucgacaacccagugcugcccuucaacgacggcguguacuucgccagcaccgagaagucaaacaucauccggggcuggaucuucggcaccacccuggacagcaagacacagagccugcugaucgugaacaacgccaccaacguggugaucaaggugugcgaguuucaguucugcaacgaccccuuccugggcguguacuaccacaagaacaacaagagcuggauggagagcgaguuccgggucuacagcagcgcuaacaauugcaccuucgaguacgugagccagcccuuccugauggaccucgagggcaagcagggcaacuucaagaaccugcgggaguucguguucaagaacaucgauggcuacuucaagaucuacagcaagcacacccccaucaaccuggugcgggaccugccccagggauucagcgcccuggagccucugguggaccugcccaucggcaucaacaucaccagguuccagacccugcuggcccugcaccggagcuaccugacccccggcgacagcagcagcggcuggaccgccggcgccgccgcauacuacgugggcuaccugcagccacggaccuuccugcugaaguacaacgagaacggcaccaucaccgacgccguggacugcgcccuggacccccugagcgagaccaagugcacccuaaagagcuucaccguggagaagggcaucuaccagaccagcaacuuccgggugcagcccacugagagcaucgugcgguuccccaacauuaccaaccugugucccuucggcgagguguucaacgccacccgguucgccagcguguacgccuggaaccggaagcggaucagcaacugcguggccgacuacagcgugcuguacaacagcgccagcuucagcaccuucaagugcuacggcgugagcccuaccaagcugaacgaccugugcuucaccaacguguacgcugacagcuucgugauccggggcgacgaggugcggcagaucgcccccggccagaccggcaacaucgccgacuacaacuacaagcugcccgacgacuucaccggcugcgugaucgccuggaacagcaacaaccuggacagcaaggugggcggcaacuacaacuaccuguaccggcuguuccguaagagcaaccugaagccauucgagcgggacaucagcaccgagaucuaccaggccggcagcacccccugcaacggugugaagggcuuuaacugcuacuucccccugcagagcuacggcuuccagcccaccuacggcgugggcuaccagcccuaccgggugguggugcugagcuucgagcugcugcacgcccccgccaccgugugcggcccuaaaaagagcaccaaccuggugaagaacaagugcgugaacuucaauuucaacggccugaccggcaccggcgugcugaccgagagcaacaagaaguuccugcccuuccagcaguucggccgggauaucgccgacaccaccgacgcagugcgggacccccagacccuggagauccuggacaucaccccaugcagcuucggcggcgugagcgucaucacccccggcacaaacaccagcaaccagguggccgugcuguaccagggagugaacugcaccgaggugcccguggccauccacgccgaccagcugacccccaccuggcggguguacagcaccggcagcaacguguuccagacccgggccggcugccugaucggcgccgagcacgugaacaacuccuacgagugcgacauccccaucggcgcuggcaucugcgccagcuaccagacccagaccaacagcccccggcgggcccggagcguggccagccagagcaucaucgccuacaccaugagcuuaggcgccgagaacagcguggccuacagcaacaacagcaucgcgaucccuaccaacuucaccaucagcgugaccaccgagauacugcccgugagcaugaccaagaccagcguggacuguaccauguacaucugcggcgacagcaccgagugcagcaaccugcugcugcaguacggcagcuucugcacccagcugaaccgggcccugaccggcaucgccguggagcaggacaagaacacccaagagguguucgcccaggugaagcagaucuacaagacucccccaaucaaggacuucggcggcuucaacuucagccagauccugcccgaccccagcaagcccagcaagcggagcuucaucgaggaccugcuguucaacaaggugacccuggccgacgccggcuucaucaagcaguacggcgacugccugggggauaucgccgcucgggaccugaucugcgcccagaaguucaacggccugaccgugcugcccccucugcugaccgacgagaugaucgcccaguacaccagcgcccugcuugccggcaccaucaccagcggcuggaccuucggcgccggcgcagcccugcagauccccuucgccaugcagauggccuaccgguucaacggcaucggcgugacccagaacgugcuguacgagaaccagaagcugaucgccaaccaguucaacagcgccaucggcaagauccaggacagccugagcagcaccgccagcgcccugggcaagcugcaggacguggugaaccagaacgcucaggcccugaacacccuggugaagcagcugagcagcaacuucggcgccaucagcucagugcugaaugacauccugagcaggcuggacaagguggaggccgaggugcagaucgaccggcugaucaccggccggcugcagagccugcagaccuacgugacccagcagcugauccgggccgccgagauccgggccagcgccaaccuggcagccaccaagaugagcgagugcgugcugggccagagcaagcggguggacuuuugcggcaagggcuaccaccugaugagcuucccccagagcgccccacacggcgugguguuccuccacgucacauacgugcccgcccaggagaagaacuucaccaccgcccccgccauuugccacgacggcaaggcucacuucccccgggagggaguguucgugagcaacggcacccacugguucgugacccagcggaacuucuacgagccccagaucaucaccaccgacaacaccuucgugagcggcaacugcgacguggugaucggcaucgugaacaacaccguguacgacccccugcagccugagcuggacagcuucaaggaggagcuggacaaguacuucaagaaccacaccagccccgacguggaucugggcgacaucagcggcaucaacgccagcguggugaacauccagaaggagaucgaccggcugaacgagguggccaagaaccugaacgagagccugaucgaccugcaggagcugggcaaguacgagcaguacaucaaguggcccugguacaucuggcugggcuucaucgccggccugaucgccaucgugauggugaccaucaugcugugcugcaugaccagcugcuguagcugccugaagggcugcugcagcugcggcagcugcugcaaguucgacgaggacgacagcgagccagugcugaagggcgugaagcugcacuacaccugaggacuaguuauaagacugacuagcccgaugggccucccaacgggcccuccuccccuccuugcaccgagauuaauaaaaaaaaaaaaaaaaaaaaaaaaaaaaaaaaaaaaaaaaaaaaaaaaaaaaaaaaaaaaaaaaugcaucccccccccccccccccccccccccccccccaaaggcucuuuucagagccaccagaauu

SEQ ID NO: 23257 - RNA, 4030 nt, Artificial Sequence
  SARS-CoV-2/Wuhan/WIV05/2019__EPI_ISL_402128 spike protein mRNA gc (1-1273)(L18F_D80A_D215G_L242del_A243del_L244del_R246I_K417N_E484 K_N501Y_D614G_A701V)
aggagaaagcuuaccauguucguguuccuggugcugcugccccuggugagcagccagugcgugaacuucaccacccggacccagcugcccccugccuacaccaacagcuucacccggggcguguacuaccccgacaagguguuccggagcagcgugcugcacagcacccaggaccuguuccugcccuucuucagcaacgugaccugguuccacgccauccacgugagcggcaccaacggcaccaagcgguucgccaacccagugcugcccuucaacgacggcguguacuucgccagcaccgagaagucaaacaucauccggggcuggaucuuuggcaccacccuggacagcaagacacagagccugcugaucgugaacaacgcuaccaacguggugaucaaggugugcgaguuccaguucugcaacgaccccuuccugggcguguacuaccacaagaacaacaagagcuggauggagagcgaguuccgggucuacagcagcgccaacaauugcaccuucgaguacgugagccagcccuuccugauggaccuggagggcaagcagggcaacuucaagaaccuccgggaguucguguucaagaacaucgacggcuacuucaagaucuacagcaagcacacccccaucaaccuggugcggggacugccccagggcuucagcgcccuggagccucugguggaucugcccaucggcaucaacaucaccagguuccagacccugcacaucagcuaccugacccccggcgacagcagcagcggcuggaccgccggcgccgccgcauacuacgugggcuaccugcagccacggaccuuccugcugaaguacaacgagaacggcaccaucaccgacgccguggacugcgcccuggacccccugagcgagaccaagugcacccuuaagagcuucaccguggagaagggcaucuaccagaccagcaacuuccgggugcagcccacugagagcauugugcgguuccccaacaucaccaaccugugucccuucggcgagguguucaacgccacccgguucgccagcguguacgccuggaaccggaagcggaucagcaacugcguggccgacuacagcgugcuguacaacagcgccagcuucagcaccuucaagugcuacggcgugagcccuaccaagcugaacgaccugugcuucaccaacguguacgcugacagcuucgugauccggggcgacgaggugcggcagaucgcccccggccagaccggcaacaucgccgacuacaacuacaagcugcccgacgacuucaccggcugcgugaucgccuggaacagcaacaaccuggacagcaaggugggcggcaacuacaacuaccuguaccggcuauuccguaagagcaaccugaagccauuugagcgggacaucagcaccgagaucuaccaggccgguagcacccccugcaacggcgugaagggcuucaacugcuacuucccccugcagagcuacggcuuccagcccaccuacggcgugggcuaccagcccuaccgggugguggugcugagcuucgagcugcugcacgcccccgccaccgugugcggcccuaaaaagagcaccaaccuggugaagaacaagugcgugaacuucaauuucaacggccugaccggcaccggcgugcugaccgagagcaacaagaaguuccugcccuuccagcaguucggccgggacaucgccgacaccaccgaugcagugcgggacccccagacccuggagauccuggacaucaccccaugcagcuucggcggcgugagcgucaucacccccggaacaaacaccagcaaccagguggccgugcuguaccagggcgugaacugcaccgaggugcccguggccauccacgccgaccagcugacccccaccuggcggguguacagcaccggcagcaacguguuccagacccgggccggcugccugaucggcgccgagcacgugaacaacuccuacgagugcgacauccccaucggcgcuggcaucugcgccagcuaccagacccagaccaacagcccccggcgggcccggagcguggccagccagagcaucaucgccuacaccaugagccugggcguggagaacagcguggccuacagcaacaacagcaucgccaucccuaccaacuucaccauaagcgugaccaccgagauccugcccgugagcaugaccaagaccagcguggacuguaccauguacaucugcggcgacagcaccgagugcagcaaccuguuacugcaguacggcagcuucugcacccagcugaaccgggcgcugaccggcaucgccguggagcaggacaagaacacccaagagguguucgcccaggugaagcagaucuacaagacucccccaaucaaggacuucggcggcuucaacuucagccagauccugcccgaccccagcaagcccagcaagcggagcuucaucgaggaccugcuguucaacaaggugacccuggccgacgccggcuucaucaagcaguacggggacugccugggcgacaucgccgcccgggaccugaucugcgcucagaaguucaacggccugaccgugcugcccccucugcugaccgaugagaugaucgcccaguacaccagcgcccugcuggccggcaccaucaccagcggcuggaccuucggcgccggcgccgcacugcagauccccuucgccaugcagauggccuaccgguucaacggcaucggcgugacccagaacgugcuguacgagaaccagaagcugaucgccaaccaguucaacagcgccaucggcaagauccaggacagccugagcagcaccgccagcgcccugggcaagcugcaggacguggugaaccagaacgcccaggcucugaacacccuggugaagcagcugagcagcaacuuuggcgccaucagcucagugcugaaugacauccugagccggcuggacaagguggaggccgaggugcagaucgacaggcugaucaccggccggcugcagagccugcagaccuacgugacccagcagcugauccgggccgccgagauucgggccagcgccaaccuggccgcaaccaagaugagcgagugcgugcugggccagagcaagcggguggacuucugcggcaagggcuaccaccugaugagcuucccccagagcgccccacacggcguggucuuccugcacgugacauacgugcccgcccaggagaagaacuucaccaccgcccccgccaucugccacgacggaaaggcccacuucccccgggagggcguguucgugagcaacggcacccacugguucgugacccagcggaacuucuacgagccccagaucaucaccaccgacaacaccuucgugagcggcaacugcgacguggugaucggcaucgugaacaacaccguguacgacccccugcagccugagcuggacagcuucaaggaggagcucgacaaguacuucaagaaccacaccagccccgacguggaccugggcgacaucagcggcaucaacgcuagcguggugaacauccagaaggagaucgaucggcugaacgagguggccaagaaccugaacgagagccugaucgaccugcaggagcugggcaaguacgagcaguacaucaaguggcccugguacaucuggcugggcuucaucgccggccugaucgccaucgugauggugaccaucaugcugugcugcaugaccagcugcuguagcugccugaagggcugcugcagcugcggcagcugcugcaaguucgacgaggacgacagcgagccagugcugaagggcgugaagcugcacuacaccugaggacuaguuauaagacugacuagcccgaugggccucccaacgggcccuccuccccuccuugcaccgagauuaauaaaaaaaaaaaaaaaaaaaaaaaaaaaaaaaaaaaaaaaaaaaaaaaaaaaaaaaaaaaaaaaaugcaucccccccccccccccccccccccccccccccaaaggcucuuuucagagccaccagaauu

SEQ ID NO: 23258 - RNA, 4039 nt, Artificial Sequence
  SARS-CoV-2/Wuhan/WIV05/2019__EPI_ISL_402128 spike protein mRNA gc (1-1273)(E484K_D614G)
aggagaaagcuuaccauguucguguuccuggugcugcugccccuggugagcagccagugcgugaaccugaccacccggacccagcugcccccugccuacaccaacagcuucacccggggcguguacuaccccgacaagguguuccggagcagcgugcugcacagcacccaggaccuguuccugcccuucuucagcaacgugaccugguuccacgccauccacgugagcggcaccaacggcaccaagcgguucgacaacccagugcugcccuucaacgacggcguguacuucgccagcaccgagaagucaaacaucauccggggcuggaucuucggcaccacccuggacagcaagacacagagccugcugaucgugaacaacgccaccaacguggugaucaaggugugcgaguuucaguucugcaacgaccccuuccugggcguguacuaccacaagaacaacaagagcuggauggagagcgaguuccgggucuacagcagcgcuaacaauugcaccuucgaguacgugagccagcccuuccugauggaccucgagggcaagcagggcaacuucaagaaccugcgggaguucguguucaagaacaucgauggcuacuucaagaucuacagcaagcacacccccaucaaccuggugcgggaccugccccagggauucagcgcccuggagccucugguggaccugcccaucggcaucaacaucaccagguuccagacccugcuggcccugcaccggagcuaccugacccccggcgacagcagcagcggcuggaccgccggcgccgccgcauacuacgugggcuaccugcagccacggaccuuccugcugaaguacaacgagaacggcaccaucaccgacgccguggacugcgcccuggacccccugagcgagaccaagugcacccuaaagagcuucaccguggagaagggcaucuaccagaccagcaacuuccgggugcagcccacugagagcaucgugcgguuccccaacauuaccaaccugugucccuucggcgagguguucaacgccacccgguucgccagcguguacgccuggaaccggaagcggaucagcaacugcguggccgacuacagcgugcuguacaacagcgccagcuucagcaccuucaagugcuacggcgugagcccuaccaagcugaacgaccugugcuucaccaacguguacgcugacagcuucgugauccggggcgacgaggugcggcagaucgcccccggccagaccggcaagaucgccgacuacaacuacaagcugcccgacgacuucaccggcugcgugaucgccuggaacagcaacaaccuggacagcaaggugggcggcaacuacaacuaccuguaccggcuguuccguaagagcaaccugaagccauucgagcgggacaucagcaccgagaucuaccaggccggcagcacccccugcaacggugugaagggcuuuaacugcuacuucccccugcagagcuacggcuuccagcccaccaacggcgugggcuaccagcccuaccgggugguggugcugagcuucgagcugcugcacgcccccgccaccgugugcggcccuaaaaagagcaccaaccuggugaagaacaagugcgugaacuucaauuucaacggccugaccggcaccggcgugcugaccgagagcaacaagaaguuccugcccuuccagcaguucggccgggauaucgccgacaccaccgacgcagugcgggacccccagacccuggagauccuggacaucaccccaugcagcuucggcggcgugagcgucaucacccccggcacaaacaccagcaaccagguggccgugcuguaccagggagugaacugcaccgaggugcccguggccauccacgccgaccagcugacccccaccuggcggguguacagcaccggcagcaacguguuccagacccgggccggcugccugaucggcgccgagcacgugaacaacuccuacgagugcgacauccccaucggcgcuggcaucugcgccagcuaccagacccagaccaacagcccccggcgggcccggagcguggccagccagagcaucaucgccuacaccaugagcuuaggcgccgagaacagcguggccuacagcaacaacagcaucgcgaucccuaccaacuucaccaucagcgugaccaccgagauacugcccgugagcaugaccaagaccagcguggacuguaccauguacaucugcggcgacagcaccgagugcagcaaccugcugcugcaguacggcagcuucugcacccagcugaaccgggcccugaccggcaucgccguggagcaggacaagaacacccaagagguguucgcccaggugaagcagaucuacaagacucccccaaucaaggacuucggcggcuucaacuucagccagauccugcccgaccccagcaagcccagcaagcggagcuucaucgaggaccugcuguucaacaaggugacccuggccgacgccggcuucaucaagcaguacggcgacugccugggggauaucgccgcucgggaccugaucugcgcccagaaguucaacggccugaccgugcugcccccucugcugaccgacgagaugaucgcccaguacaccagcgcccugcuugccggcaccaucaccagcggcuggaccuucggcgccggcgcagcccugcagauccccuucgccaugcagauggccuaccgguucaacggcaucggcgugacccagaacgugcuguacgagaaccagaagcugaucgccaaccaguucaacagcgccaucggcaagauccaggacagccugagcagcaccgccagcgcccugggcaagcugcaggacguggugaaccagaacgcucaggcccugaacacccuggugaagcagcugagcagcaacuucggcgccaucagcucagugcugaaugacauccugagcaggcuggacaagguggaggccgaggugcagaucgaccggcugaucaccggccggcugcagagccugcagaccuacgugacccagcagcugauccgggccgccgagauccgggccagcgccaaccuggcagccaccaagaugagcgagugcgugcugggccagagcaagcggguggacuuuugcggcaagggcuaccaccugaugagcuucccccagagcgccccacacggcgugguguuccuccacgucacauacgugcccgcccaggagaagaacuucaccaccgcccccgccauuugccacgacggcaaggcucacuucccccgggagggaguguucgugagcaacggcacccacugguucgugacccagcggaacuucuacgagccccagaucaucaccaccgacaacaccuucgugagcggcaacugcgacguggugaucggcaucgugaacaacaccguguacgacccccugcagccugagcuggacagcuucaaggaggagcuggacaaguacuucaagaaccacaccagccccgacguggaucugggcgacaucagcggcaucaacgccagcguggugaacauccagaaggagaucgaccggcugaacgagguggccaagaaccugaacgagagccugaucgaccugcaggagcugggcaaguacgagcaguacaucaaguggcccugguacaucuggcugggcuucaucgccggccugaucgccaucgugauggugaccaucaugcugugcugcaugaccagcugcuguagcugccugaagggcugcugcagcugcggcagcugcugcaaguucgacgaggacgacagcgagccagugcugaagggcgugaagcugcacuacaccugaggacuaguuauaagacugacuagcccgaugggccucccaacgggcccuccuccccuccuugcaccgagauuaauaaaaaaaaaaaaaaaaaaaaaaaaaaaaaaaaaaaaaaaaaaaaaaaaaaaaaaaaaaaaaaaaugcaucccccccccccccccccccccccccccccccaaaggcucuuuucagagccaccagaauu

SEQ ID NO: 23259 - RNA, 4039 nt, Artificial Sequence
  SARS-CoV-2/Wuhan/WIV05/2019__EPI_ISL_402128 spike protein mRNA gc (1-1273)(L18F_T20N_P26S_D138Y_R190S_K417T_E484K_N501Y_D614G_H655Y _T1027I)
aggagaaagcuuaccauguucguguuccuggugcugcugccccuggugagcagccagugcgugaacuucaccaaccggacccagcugcccagcgccuacaccaacagcuucacccggggcguguacuacccugacaagguguuccggagcagcgugcugcacagcacccaggaccuguuccugcccuucuucagcaacgugaccugguuccacgccauccacgugagcggcaccaacggcaccaagcgguucgacaaccccgugcugccauucaacgacggcguguacuucgccagcaccgagaagucaaacaucauccggggcuggaucuuuggcaccacccuggacagcaagacccagagccugcugaucgugaacaacgccacaaacguggugaucaaggugugcgaguuccaguucugcaacuaccccuuccugggcguguacuaccacaagaacaacaagagcuggauggagagcgaguuccgggucuacagcagcgcuaauaacugcaccuucgaguacgugagccagcccuuccugauggaccuggagggcaagcagggcaacuucaagaaccucagcgaguucguguucaagaacaucgacggcuacuucaagaucuacagcaagcacacccccaucaaccuggugcgggaucugccccagggauucagcgcccuggagccccugguggaccugccuaucggcaucaacaucacccgguuccagacccugcuggcccugcacaggagcuaccugacccccggcgacagcagcagcggcuggaccgccggcgccgccgcauacuacgugggcuaccugcagccccggaccuuccugcugaaguacaacgagaacggcaccaucaccgacgccguggacugcgcccuggacccacugagcgagaccaagugcacccuaaagagcuucaccguggagaagggcaucuaccagaccagcaacuuccgggugcagcccaccgagagcaucgugcgguuccccaacauuacuaaccugugucccuucggcgagguguucaacgccacccgguucgccagcguguacgccuggaaccggaagcggaucagcaacugcguggccgacuacagcgugcuguacaacagcgccagcuucagcaccuucaagugcuacggcgugagccccaccaagcugaacgaccugugcuucaccaacguguacgcugacagcuucgugauccggggcgacgaggugcggcagaucgccccuggccagaccggcaccaucgccgacuacaacuacaagcugcccgacgacuucaccggcugcgugaucgccuggaacagcaacaaccuggacagcaaggugggcggcaacuacaacuaccuguaccggcuguuccguaagagcaaccugaagcccuuugagcgggacaucagcaccgagaucuaccaggccggcagcaccccaugcaacggugugaagggcuucaacugcuacuucccccugcagagcuacggcuuccagcccaccuacggcgugggcuaccagcccuaccgggugguggugcugagcuucgagcugcugcacgcccccgccaccgugugcggccccaaaaagagcaccaaccuggugaagaacaagugcgugaacuucaauuucaacggccugaccggcaccggcgugcugaccgagagcaacaagaaguuccugccuuuccagcaguucggccgggacaucgccgauaccaccgacgcagugcgggacccccagacccuggagauccuggacaucacccccugcagcuucggcggcgugagcgucaucaccccaggcacaaacaccagcaaccagguggccgugcuguaccagggagugaacugcaccgaggugcccguggccauccacgccgaccagcugacccccaccuggcggguguacuccaccggcagcaacguguuccagacccgggccggcugccugaucggcgccgaguacgugaacaacagcuacgagugcgacauccccaucggcgcuggcaucugcgccagcuaccagacccagaccaacagcccccggcgggcccggagcguggccagccagagcaucaucgccuacaccaugagccugggcgccgagaacagcguggccuacagcaacaacagcaucgcgauccccaccaacuucaccaucagcgugaccaccgagauauuaccugugagcaugaccaagaccagcguggacuguaccauguacaucugcggcgacagcaccgagugcagcaaccugcugcugcaguacggcagcuucugcacccagcugaaccgggcccugaccggcaucgccguggagcaggacaagaacacccaagagguguucgcccaggugaagcagaucuacaagacuccacccaucaaggacuucggcggcuucaacuucagccagauccugcccgaccccagcaagcccagcaagcggagcuucaucgaggaccugcuguucaacaaggugacccuggccgacgccggcuucaucaagcaguacggcgacugccugggggacaucgccgcucgggaucugaucugcgcccagaaguucaacggccugaccgugcugccuccccugcugaccgacgagaugaucgcccaguacaccagcgcccugcuggccggcaccaucaccagcggcuggaccuucggcgccggcgcagcccuucagauccccuucgccaugcagauggccuaccgguucaacggcaucggcgugacccagaacgugcuguacgagaaccagaagcugaucgccaaccaguucaacagcgccaucggcaagauccaggacagccugagcagcaccgccagcgcccugggcaagcugcaggacguggugaaccagaacgcucaggcccugaacacccuggugaagcagcugagcucaaacuuuggcgccaucagcagcgugcugaaugacauccugagccggcuggacaagguggaggccgaggugcagaucgacaggcugaucaccggccggcugcagagccugcagaccuacgugacccagcagcugauccgggccgccgagauccgggccagcgccaaccuggcagccauuaagaugagcgagugcgugcugggccagagcaagcggguggacuucugcggcaagggcuaccaccugaugagcuucccccagagcgcuccccacggcgugguguuccugcacgucaccuacgugccagcccaggagaagaacuucacaaccgcccccgccaucugccacgacggcaaggcccacuucccccgggagggaguguucgugagcaacggcacccacugguucgugacccagcggaacuucuacgagccccagaucaucaccaccgacaacaccuucgugagcggcaacugcgacguggugaucggcaucgugaacaacaccguguacgacccccuccagcccgagcuggacagcuucaaggaggagcuggacaaguacuucaagaaccacaccagcccugacguggaccugggcgauaucagcggcaucaacgccagcguggugaacauccagaaggagaucgaccggcugaacgagguggccaagaaccugaacgagagccugaucgaccugcaggagcugggcaaguacgagcaguacaucaaguggcccugguacaucuggcugggcuucaucgccggccugaucgccaucgugauggugaccaucaugcugugcugcaugaccagcugcuguagcugccugaagggcugcugcagcugcggcagcugcugcaaguucgacgaggacgacagcgagcccgugcugaagggcgugaagcugcacuacaccugaggacuaguuauaagacugacuagcccgaugggccucccaacgggcccuccuccccuccuugcaccgagauuaauaaaaaaaaaaaaaaaaaaaaaaaaaaaaaaaaaaaaaaaaaaaaaaaaaaaaaaaaaaaaaaaaugcaucccccccccccccccccccccccccccccccaaaggcucuuuucagagccaccagaauu

SEQ ID NO: 23260 - RNA, 4039 nt, Artificial Sequence
  SARS-CoV-2/Wuhan/WIV05/2019__EPI_ISL_402128 spike protein mRNA gc (1-1273)(S13I_W152C_L452R_D614G)
aggagaaagcuuaccauguucguguuccuggugcugcugccccuggugagcauccagugcgugaaccugaccacccggacccagcugcccccugccuacaccaacagcuucacccggggcguguacuaccccgacaagguguuccggagcagcgugcugcacagcacccaggaccuguuccugcccuucuucagcaacgugaccugguuccacgccauccacgugagcggcaccaacggcaccaagcgguucgacaacccagugcugcccuucaacgacggcguguacuucgccagcaccgagaagucaaacaucauccggggcuggaucuucggcaccacccuggacagcaagacacagagccugcugaucgugaacaacgccaccaacguggugaucaaggugugcgaguuucaguucugcaacgaccccuuccugggcguguacuaccacaagaacaacaagagcugcauggagagcgaguuccgggucuacagcagcgcuaacaauugcaccuucgaguacgugagccagcccuuccugauggaccucgagggcaagcagggcaacuucaagaaccugcgggaguucguguucaagaacaucgauggcuacuucaagaucuacagcaagcacacccccaucaaccuggugcgggaccugccccagggauucagcgcccuggagccucugguggaccugcccaucggcaucaacaucaccagguuccagacccugcuggcccugcaccggagcuaccugacccccggcgacagcagcagcggcuggaccgccggcgccgccgcauacuacgugggcuaccugcagccacggaccuuccugcugaaguacaacgagaacggcaccaucaccgacgccguggacugcgcccuggacccccugagcgagaccaaguguacccuaaagagcuucaccguggagaagggcaucuaccagaccagcaacuuccgggugcagcccacugagagcauugugcgguuccccaacaucaccaaccugugccccuucggcgagguguucaacgccacccgguucgccagcguguacgccuggaaccggaagcggaucagcaacugcguggccgacuacagcgugcuguacaacagcgccagcuucagcaccuucaagugcuacggcgugagcccuaccaagcugaacgaccugugcuucaccaacguguacgcugacagcuucgugauccggggcgacgaggugcggcagaucgcccccggccagaccggcaagaucgccgacuacaacuacaagcugcccgacgacuucaccggcugcgugaucgccuggaacagcaacaaccuggacagcaaggugggcggcaacuacaacuaccgguaccggcuguuccguaagagcaaccugaagccauucgagcgggacaucagcaccgagaucuaccaggccggcagcacccccugcaacgguguggagggcuuuaacugcuacuucccccugcagagcuacggcuuccagcccaccaacggcgugggcuaccagcccuaccgggugguggugcugagcuucgagcugcugcacgcccccgccaccgugugcggcccuaaaaagagcaccaaccuggugaagaacaagugcgugaacuucaauuucaacggccugaccggcaccggcgugcugaccgagagcaacaagaaguuccugcccuuccagcaguucggccgggauaucgccgacaccaccgacgcagugcgggacccccagacccuggagauccuggacaucaccccaugcagcuucggcggcgugagcgucaucacccccggcacaaacaccagcaaccagguggccgugcuguaccagggagugaacugcaccgaggugcccguggccauccacgccgaccagcugacccccaccuggcggguguacagcaccggcagcaacguguuccagacccgggccggcugccugaucggcgccgagcacgugaacaacagcuacgagugcgacauccccaucggcgcuggcaucugugccuccuaccagacccagaccaacagcccccggcgggcccggagcguggccagccagagcaucaucgccuacaccaugagccugggcgccgagaacagcguggccuacagcaacaacagcaucgcgaucccuaccaacuucaccauaagcgugaccaccgagaucuuacccgugagcaugaccaagaccagcguggacugcaccauguacaucugcggcgacagcaccgagugcagcaaccugcugcugcaguacggcagcuucugcacccagcugaaccgggcccugaccggcaucgccguggagcaggacaagaacacccaagagguguucgcccaggugaagcagaucuacaagacucccccaaucaaggacuucggcggcuucaacuucagccagauccugcccgaccccagcaagcccagcaagcggagcuucaucgaggaccugcuguucaacaaggugacccuggccgacgccggcuucaucaagcaguacggcgacugccugggggauaucgccgcucgggaccugaucugcgcccagaaguucaacggccugaccgugcugcccccucugcugaccgacgagaugaucgcccaguacaccagcgcccugcuggccggcaccaucaccagcggcuggaccuucggcgccggcgcagcccuucagauccccuucgccaugcagauggccuacagguucaacggcaucggcgugacccagaacgugcuguacgagaaccagaagcugaucgccaaccaguucaacagcgccaucggcaagauccaggacagccugagcagcaccgccagcgcccugggcaagcugcaggacguggugaaccagaacgcucaggcccugaacacccuggugaagcagcugagcagcaacuucggcgccaucagcagcgugcugaaugacauccugucacggcuggacaagguggaggccgaggugcagaucgaccggcugaucaccggccggcugcagagccugcagaccuacgugacccagcagcugauccgggccgccgagauucgggccagcgccaaccuggcagccaccaagaugagcgagugcgugcugggccagagcaagcggguggacuuuugcggcaagggcuaccaccugaugagcuucccccagagcgccccacacggcgugguguuccugcacgucacauacgugcccgcccaggagaagaacuucaccaccgcccccgccaucugccacgacggcaaggcucacuucccccgggagggaguguucgugagcaacggcacccacugguucgugacccagcggaacuucuacgagccccagaucaucaccaccgacaacaccuucgugagcggcaacugcgacguggugaucggcaucgugaacaacaccguguacgacccccuccagccugagcuggacagcuucaaggaggagcuggacaaguacuucaagaaccacaccagccccgacguggaucugggcgacaucagcggcaucaacgccagcguggugaacauccagaaggagaucgaccggcugaacgagguggccaagaaccugaacgagagccugaucgaccugcaggagcugggcaaguacgagcaguacaucaaguggcccugguacaucuggcugggcuucaucgccggccugaucgccaucgugauggugaccaucaugcugugcugcaugaccagcuguugcagcugccugaagggcugcugcagcugcggcagcugcugcaaguucgacgaggacgacagcgagccagugcugaagggcgugaagcugcacuacaccugaggacuaguuauaagacugacuagcccgaugggccucccaacgggcccuccuccccuccuugcaccgagauuaauaaaaaaaaaaaaaaaaaaaaaaaaaaaaaaaaaaaaaaaaaaaaaaaaaaaaaaaaaaaaaaaaugcaucccccccccccccccccccccccccccccccaaaggcucuuuucagagccaccagaauu

SEQ ID NO: 23261 - RNA, 4039 nt, Artificial Sequence; identical to SEQ ID NO: 13012
  SARS-CoV-2/Wuhan/WIV05/2019__EPI_ISL_402128 spike protein mRNA gc mod (1-1273)

SEQ ID NO: 23262 - RNA, 4039 nt, Artificial Sequence
  SARS-CoV-2/Wuhan/WIV05/2019__EPI_ISL_402128 spike protein mRNA gc mod (1-1273)(D614G)
aggagaaagcuuaccauguucguguuucuggugcugcugccccugguguccagccagugugugaaccugaccaccagaacacagcugccuccagccuacaccaacagcuucaccagaggcguguacuaccccgacaagguguucagauccagcgugcugcacucuacccaggaccuguuccugccuuucuucagcaacgugaccugguuccacgccauccacguguccggcaccaauggcaccaagagauucgacaaccccgugcugcccuucaacgacgggguguacuuugccagcaccgagaaguccaacaucaucagaggcuggaucuucggcaccacacuggacagcaagacccagagccugcugaucgugaacaacgccaccaacguggucaucaaagugugcgaguuccaguucugcaacgaccccuuccugggcgucuacuaccacaagaacaacaagagcuggauggaaagcgaguuccggguguacagcagcgccaacaacugcaccuucgaguacgugucccagccuuuccugauggaccuggaaggcaagcagggcaacuucaagaaccugcgcgaguucguguucaagaacaucgacggcuacuucaaaaucuacagcaagcacaccccuaucaaccucgugcgggaucugccucagggcuucucugcucuggaaccccugguggaucugcccaucggcaucaacaucacccgguuucagacacugcuggcccugcacagaagcuaccugacaccuggcgauagcagcagcggauggacagcuggugccgccgcuuacuaugugggcuaccugcagccuagaaccuuccugcugaaguacaacgagaacggcaccaucaccgacgccguggauugugcucuggauccucugagcgagacaaagugcacccugaaguccuucaccguggaaaagggcaucuaccagaccagcaacuuccgggugcagcccaccgaauccaucgugcgguuccccaauaucaccaaucugugccccuucggcgagguguucaaugccaccagauucgccucuguguacgccuggaaccggaagcggaucagcaauugcguggccgacuacuccgugcuguacaacuccgccagcuucagcaccuucaagugcuacggcguguccccuaccaagcugaacgaccugugcuucacaaacguguacgccgacagcuucgugauccggggagaugaagugcggcagauugccccuggacagacaggcaagaucgccgacuacaacuacaagcugcccgacgacuucaccggcugugugauugccuggaacagcaacaaccuggacuccaaagucggcggcaacuacaauuaccuguaccggcuguuccggaaguccaaucugaagcccuucgagcgggacaucagcaccgaaaucuaucaggccggcagcaccccuugcaacggcguggaaggcuucaacugcuacuucccacugcaguccuacggcuuucagcccacaaauggcgugggcuaucagcccuacagagugguggugcugagcuucgaacugcugcaugcuccugccacagugugcggcccuaagaaaagcaccaaucucgugaagaacaaaugcgugaacuucaacuucaacggccugaccggcaccggcgugcugacagagagcaacaagaaguuccugccauuccagcaguuuggccgggauaucgccgauaccacagacgccguuagagauccccagacacuggaaauccuggacaucaccccaugcagcuucggcggagugucugugaucaccccuggcaccaacaccagcaaucagguggcagugcuguaccagggcgugaacuguaccgaagugcccguggccauucacgccgaucagcugacaccuacauggcggguguacuccaccggcagcaauguguuucagaccagagccggcugucugaucggagccgagcacgugaacaauagcuacgagugcgacauccccaucggcgcuggcaucugugccagcuaccagacacagacaaacagccccagacgggcuagaagcguggccagccagagcaucauugccuacacaaugucucugggcgccgagaacagcguggccuacuccaacaacucuaucgcuauccccaccaacuucaccaucagcgugaccaccgagauccugccuguguccaugaccaagaccagcguggacugcaccauguacaucugcggcgauuccaccgagugcuccaaccugcugcugcaguacggcagcuucugcacccagcugaauagagcccugacagggaucgccguggaacaggacaagaacacccaagagguguucgcccaagugaagcaaaucuacaagaccccuccuaucaaggacuucggcggcuucaauuucagccagauucugcccgauccuagcaagcccagcaagcggagcuucaucgaggaccugcuguucaacaaagugacacuggccgacgccggcuucaucaagcaguauggcgauugucugggcgacauugccgccagggaucugauuugcgcccagaaguuuaacggacugacagugcugccuccucugcugaccgaugagaugaucgcccaguacacaucugcccugcuggccggcacaaucacaagcggcuggacauuuggagcuggcgccgcucugcagauccccuuugcuaugcagauggccuaccgguucaacggcaucggagugacccagaaugugcuguacgagaaccagaagcugaucgccaaccaguucaacagcgccaucggcaagauccaggacagccugagcagcacagcaagcgcccugggaaagcugcaggacguggucaaccagaaugcccaggcacugaacacccuggucaagcagcuguccuccaacuucggcgccaucagcucugugcugaacgauauccugagcagacuggacaaggucgaggccgaggugcagaucgacagacugaucacaggcagacugcagagccuccagacauacgugacccagcagcugaucagagccgccgagauuagagccucugccaaucuggccgccaccaagaugucugagugugugcugggccagagcaagagaguggacuuuugcggcaagggcuaccaccugaugagcuucccucagucugccccucacggcgugguguuucugcacgugacauaugugcccgcucaagagaagaauuucaccaccgcuccagccaucugccacgacggcaaagcccacuuuccuagagaaggcguguucguguccaacggcacccauugguucgugacacagcggaacuucuacgagccccagaucaucaccaccgacaacaccuucgugucuggcaacugcgacguugugaucggcauugugaacaauaccguguacgacccucugcagcccgagcuggacagcuucaaagaggaacuggacaaguacuuuaagaaccacacaagccccgacguggaccugggcgauaucagcggaaucaaugccagcgucgugaacauccagaaagagaucgaccggcugaacgagguggccaagaaucugaacgagagccugaucgaccugcaagaacuggggaaguacgagcaguacaucaaguggcccugguacaucuggcugggcuuuaucgccggacugauugccaucgugauggucacaaucaugcuguguugcaugaccagcugcuguagcugccugaagggcuguuguagcuguggcagcugcugcaaguucgacgaggacgauucugagcccgugcugaagggcgugaaacugcacuacaccugaggacuaguuauaagacugacuagcccgaugggccucccaacgggcccuccuccccuccuugcaccgagauuaauaaaaaaaaaaaaaaaaaaaaaaaaaaaaaaaaaaaaaaaaaaaaaaaaaaaaaaaaaaaaaaaaugcaucccccccccccccccccccccccccccccccaaaggcucuuuucagagccaccagaauu

SEQ ID NO: 23263 - RNA, 4039 nt, Artificial Sequence
  SARS-CoV-2/Wuhan/WIV05/2019__EPI_ISL_402128 spike protein mRNA gc mod (1-1273)(A222V_D614G)
aggagaaagcuuaccauguucguguuucuggugcugcugccccugguguccagccagugugugaaccugaccaccagaacacagcugccuccagccuacaccaacagcuucaccagaggcguguacuaccccgacaagguguucagauccagcgugcugcacucuacccaggaccuguuccugccuuucuucagcaacgugaccugguuccacgccauccacguguccggcaccaauggcaccaagagauucgacaaccccgugcugcccuucaacgacgggguguacuuugccagcaccgagaaguccaacaucaucagaggcuggaucuucggcaccacacuggacagcaagacccagagccugcugaucgugaacaacgccaccaacguggucaucaaagugugcgaguuccaguucugcaacgaccccuuccugggcgucuacuaccacaagaacaacaagagcuggauggaaagcgaguuccggguguacagcagcgccaacaacugcaccuucgaguacgugucccagccuuuccugauggaccuggaaggcaagcagggcaacuucaagaaccugcgcgaguucguguucaagaacaucgacggcuacuucaaaaucuacagcaagcacaccccuaucaaccucgugcgggaucugccucagggcuucucugugcuggaaccccugguggaucugcccaucggcaucaacaucacccgguuucagacacugcuggcccugcacagaagcuaccugacaccuggcgauagcagcagcggauggacagcuggugccgccgcuuacuaugugggcuaccugcagccuagaaccuuccugcugaaguacaacgagaacggcaccaucaccgacgccguggauugugcucuggauccucugagcgagacaaagugcacccugaaguccuucaccguggaaaagggcaucuaccagaccagcaacuuccgggugcagcccaccgaauccaucgugcgguuccccaauaucaccaaucugugccccuucggcgagguguucaaugccaccagauucgccucuguguacgccuggaaccggaagcggaucagcaauugcguggccgacuacuccgugcuguacaacuccgccagcuucagcaccuucaagugcuacggcguguccccuaccaagcugaacgaccugugcuucacaaacguguacgccgacagcuucgugauccggggagaugaagugcggcagauugccccuggacagacaggcaagaucgccgacuacaacuacaagcugcccgacgacuucaccggcugugugauugccuggaacagcaacaaccuggacuccaaagucggcggcaacuacaauuaccuguaccggcuguuccggaaguccaaucugaagcccuucgagcgggacaucagcaccgaaaucuaucaggccggcagcaccccuugcaacggcguggaaggcuucaacugcuacuucccacugcaguccuacggcuuucagcccacaaauggcgugggcuaucagcccuacagagugguggugcugagcuucgaacugcugcaugcuccugccacagugugcggcccuaagaaaagcaccaaucucgugaagaacaaaugcgugaacuucaacuucaacggccugaccggcaccggcgugcugacagagagcaacaagaaguuccugccauuccagcaguuuggccgggauaucgccgauaccacagacgccguuagagauccccagacacuggaaauccuggacaucaccccaugcagcuucggcggagugucugugaucaccccuggcaccaacaccagcaaucagguggcagugcuguaccagggcgugaacuguaccgaagugcccguggccauucacgccgaucagcugacaccuacauggcggguguacuccaccggcagcaauguguuucagaccagagccggcugucugaucggagccgagcacgugaacaauagcuacgagugcgacauccccaucggcgcuggcaucugugccagcuaccagacacagacaaacagccccagacgggcuagaagcguggccagccagagcaucauugccuacacaaugucucugggcgccgagaacagcguggccuacuccaacaacucuaucgcuauccccaccaacuucaccaucagcgugaccaccgagauccugccuguguccaugaccaagaccagcguggacugcaccauguacaucugcggcgauuccaccgagugcuccaaccugcugcugcaguacggcagcuucugcacccagcugaauagagcccugacagggaucgccguggaacaggacaagaacacccaagagguguucgcccaagugaagcaaaucuacaagaccccuccuaucaaggacuucggcggcuucaauuucagccagauucugcccgauccuagcaagcccagcaagcggagcuucaucgaggaccugcuguucaacaaagugacacuggccgacgccggcuucaucaagcaguauggcgauugucugggcgacauugccgccagggaucugauuugcgcccagaaguuuaacggacugacagugcugccuccucugcugaccgaugagaugaucgcccaguacacaucugcccugcuggccggcacaaucacaagcggcuggacauuuggagcuggcgccgcucugcagauccccuuugcuaugcagauggccuaccgguucaacggcaucggagugacccagaaugugcuguacgagaaccagaagcugaucgccaaccaguucaacagcgccaucggcaagauccaggacagccugagcagcacagcaagcgcccugggaaagcugcaggacguggucaaccagaaugcccaggcacugaacacccuggucaagcagcuguccuccaacuucggcgccaucagcucugugcugaacgauauccugagcagacuggacaaggucgaggccgaggugcagaucgacagacugaucacaggcagacugcagagccuccagacauacgugacccagcagcugaucagagccgccgagauuagagccucugccaaucuggccgccaccaagaugucugagugugugcugggccagagcaagagaguggacuuuugcggcaagggcuaccaccugaugagcuucccucagucugccccucacggcgugguguuucugcacgugacauaugugcccgcucaagagaagaauuucaccaccgcuccagccaucugccacgacggcaaagcccacuuuccuagagaaggcguguucguguccaacggcacccauugguucgugacacagcggaacuucuacgagccccagaucaucaccaccgacaacaccuucgugucuggcaacugcgacguugugaucggcauugugaacaauaccguguacgacccucugcagcccgagcuggacagcuucaaagaggaacuggacaaguacuuuaagaaccacacaagccccgacguggaccugggcgauaucagcggaaucaaugccagcgucgugaacauccagaaagagaucgaccggcugaacgagguggccaagaaucugaacgagagccugaucgaccugcaagaacuggggaaguacgagcaguacaucaaguggcccugguacaucuggcugggcuuuaucgccggacugauugccaucgugauggucacaaucaugcuguguugcaugaccagcugcuguagcugccugaagggcuguuguagcuguggcagcugcugcaaguucgacgaggacgauucugagcccgugcugaagggcgugaaacugcacuacaccugaggacuaguuauaagacugacuagcccgaugggccucccaacgggcccuccuccccuccuugcaccgagauuaauaaaaaaaaaaaaaaaaaaaaaaaaaaaaaaaaaaaaaaaaaaaaaaaaaaaaaaaaaaaaaaaaugcaucccccccccccccccccccccccccccccccaaaggcucuuuucagagccaccagaauu

SEQ ID NO: 23264 - RNA, 4039 nt, Artificial Sequence
  SARS-CoV-2/Wuhan/WIV05/2019__EPI_ISL_402128 spike protein mRNA gc mod (1-1273)(N439K_D614G)
aggagaaagcuuaccauguucguguuucuggugcugcugccccugguguccagccagugugugaaccugaccaccagaacacagcugccuccagccuacaccaacagcuucaccagaggcguguacuaccccgacaagguguucagauccagcgugcugcacucuacccaggaccuguuccugccuuucuucagcaacgugaccugguuccacgccauccacguguccggcaccaauggcaccaagagauucgacaaccccgugcugcccuucaacgacgggguguacuuugccagcaccgagaaguccaacaucaucagaggcuggaucuucggcaccacacuggacagcaagacccagagccugcugaucgugaacaacgccaccaacguggucaucaaagugugcgaguuccaguucugcaacgaccccuuccugggcgucuacuaccacaagaacaacaagagcuggauggaaagcgaguuccggguguacagcagcgccaacaacugcaccuucgaguacgugucccagccuuuccugauggaccuggaaggcaagcagggcaacuucaagaaccugcgcgaguucguguucaagaacaucgacggcuacuucaaaaucuacagcaagcacaccccuaucaaccucgugcgggaucugccucagggcuucucugcucuggaaccccugguggaucugcccaucggcaucaacaucacccgguuucagacacugcuggcccugcacagaagcuaccugacaccuggcgauagcagcagcggauggacagcuggugccgccgcuuacuaugugggcuaccugcagccuagaaccuuccugcugaaguacaacgagaacggcaccaucaccgacgccguggauugugcucuggauccucugagcgagacaaagugcacccugaaguccuucaccguggaaaagggcaucuaccagaccagcaacuuccgggugcagcccaccgaauccaucgugcgguuccccaauaucaccaaucugugccccuucggcgagguguucaaugccaccagauucgccucuguguacgccuggaaccggaagcggaucagcaauugcguggccgacuacuccgugcuguacaacuccgccagcuucagcaccuucaagugcuacggcguguccccuaccaagcugaacgaccugugcuucacaaacguguacgccgacagcuucgugauccggggagaugaagugcggcagauugccccuggacagacaggcaagaucgccgacuacaacuacaagcugcccgacgacuucaccggcugugugauugccuggaacagcaagaaccuggacuccaaagucggcggcaacuacaauuaccuguaccggcuguuccggaaguccaaucugaagcccuucgagcgggacaucagcaccgaaaucuaucaggccggcagcaccccuugcaacggcguggaaggcuucaacugcuacuucccacugcaguccuacggcuuucagcccacaaauggcgugggcuaucagcccuacagagugguggugcugagcuucgaacugcugcaugcuccugccacagugugcggcccuaagaaaagcaccaaucucgugaagaacaaaugcgugaacuucaacuucaacggccugaccggcaccggcgugcugacagagagcaacaagaaguuccugccauuccagcaguuuggccgggauaucgccgauaccacagacgccguuagagauccccagacacuggaaauccuggacaucaccccaugcagcuucggcggagugucugugaucaccccuggcaccaacaccagcaaucagguggcagugcuguaccagggcgugaacuguaccgaagugcccguggccauucacgccgaucagcugacaccuacauggcggguguacuccaccggcagcaauguguuucagaccagagccggcugucugaucggagccgagcacgugaacaauagcuacgagugcgacauccccaucggcgcuggcaucugugccagcuaccagacacagacaaacagccccagacgggcuagaagcguggccagccagagcaucauugccuacacaaugucucugggcgccgagaacagcguggccuacuccaacaacucuaucgcuauccccaccaacuucaccaucagcgugaccaccgagauccugccuguguccaugaccaagaccagcguggacugcaccauguacaucugcggcgauuccaccgagugcuccaaccugcugcugcaguacggcagcuucugcacccagcugaauagagcccugacagggaucgccguggaacaggacaagaacacccaagagguguucgcccaagugaagcaaaucuacaagaccccuccuaucaaggacuucggcggcuucaauuucagccagauucugcccgauccuagcaagcccagcaagcggagcuucaucgaggaccugcuguucaacaaagugacacuggccgacgccggcuucaucaagcaguauggcgauugucugggcgacauugccgccagggaucugauuugcgcccagaaguuuaacggacugacagugcugccuccucugcugaccgaugagaugaucgcccaguacacaucugcccugcuggccggcacaaucacaagcggcuggacauuuggagcuggcgccgcucugcagauccccuuugcuaugcagauggccuaccgguucaacggcaucggagugacccagaaugugcuguacgagaaccagaagcugaucgccaaccaguucaacagcgccaucggcaagauccaggacagccugagcagcacagcaagcgcccugggaaagcugcaggacguggucaaccagaaugcccaggcacugaacacccuggucaagcagcuguccuccaacuucggcgccaucagcucugugcugaacgauauccugagcagacuggacaaggucgaggccgaggugcagaucgacagacugaucacaggcagacugcagagccuccagacauacgugacccagcagcugaucagagccgccgagauuagagccucugccaaucuggccgccaccaagaugucugagugugugcugggccagagcaagagaguggacuuuugcggcaagggcuaccaccugaugagcuucccucagucugccccucacggcgugguguuucugcacgugacauaugugcccgcucaagagaagaauuucaccaccgcuccagccaucugccacgacggcaaagcccacuuuccuagagaaggcguguucguguccaacggcacccauugguucgugacacagcggaacuucuacgagccccagaucaucaccaccgacaacaccuucgugucuggcaacugcgacguugugaucggcauugugaacaauaccguguacgacccucugcagcccgagcuggacagcuucaaagaggaacuggacaaguacuuuaagaaccacacaagccccgacguggaccugggcgauaucagcggaaucaaugccagcgucgugaacauccagaaagagaucgaccggcugaacgagguggccaagaaucugaacgagagccugaucgaccugcaagaacuggggaaguacgagcaguacaucaaguggcccugguacaucuggcugggcuuuaucgccggacugauugccaucgugauggucacaaucaugcuguguugcaugaccagcugcuguagcugccugaagggcuguuguagcuguggcagcugcugcaaguucgacgaggacgauucugagcccgugcugaagggcgugaaacugcacuacaccugaggacuaguuauaagacugacuagcccgaugggccucccaacgggcccuccuccccuccuugcaccgagauuaauaaaaaaaaaaaaaaaaaaaaaaaaaaaaaaaaaaaaaaaaaaaaaaaaaaaaaaaaaaaaaaaaugcaucccccccccccccccccccccccccccccccaaaggcucuuuucagagccaccagaauu

SEQ ID NO: 23265 - RNA, 4039 nt, Artificial Sequence
  SARS-CoV-2/Wuhan/WIV05/2019__EPI_ISL_402128 spike protein mRNA gc mod (1-1273)(S477N_D614G)
aggagaaagcuuaccauguucguguuucuggugcugcugccccugguguccagccagugugugaaccugaccaccagaacacagcugccuccagccuacaccaacagcuucaccagaggcguguacuaccccgacaagguguucagauccagcgugcugcacucuacccaggaccuguuccugccuuucuucagcaacgugaccugguuccacgccauccacguguccggcaccaauggcaccaagagauucgacaaccccgugcugcccuucaacgacgggguguacuuugccagcaccgagaaguccaacaucaucagaggcuggaucuucggcaccacacuggacagcaagacccagagccugcugaucgugaacaacgccaccaacguggucaucaaagugugcgaguuccaguucugcaacgaccccuuccugggcgucuacuaccacaagaacaacaagagcuggauggaaagcgaguuccggguguacagcagcgccaacaacugcaccuucgaguacgugucccagccuuuccugauggaccuggaaggcaagcagggcaacuucaagaaccugcgcgaguucguguucaagaacaucgacggcuacuucaaaaucuacagcaagcacaccccuaucaaccucgugcgggaucugccucagggcuucucugcucuggaaccccugguggaucugcccaucggcaucaacaucacccgguuucagacacugcuggcccugcacagaagcuaccugacaccuggcgauagcagcagcggauggacagcuggugccgccgcuuacuaugugggcuaccugcagccuagaaccuuccugcugaaguacaacgagaacggcaccaucaccgacgccguggauugugcucuggauccucugagcgagacaaagugcacccugaaguccuucaccguggaaaagggcaucuaccagaccagcaacuuccgggugcagcccaccgaauccaucgugcgguuccccaauaucaccaaucugugccccuucggcgagguguucaaugccaccagauucgccucuguguacgccuggaaccggaagcggaucagcaauugcguggccgacuacuccgugcuguacaacuccgccagcuucagcaccuucaagugcuacggcguguccccuaccaagcugaacgaccugugcuucacaaacguguacgccgacagcuucgugauccggggagaugaagugcggcagauugccccuggacagacaggcaagaucgccgacuacaacuacaagcugcccgacgacuucaccggcugugugauugccuggaacagcaacaaccuggacuccaaagucggcggcaacuacaauuaccuguaccggcuguuccggaaguccaaucugaagcccuucgagcgggacaucagcaccgaaaucuaucaggccggcaacaccccuugcaacggcguggaaggcuucaacugcuacuucccacugcaguccuacggcuuucagcccacaaauggcgugggcuaucagcccuacagagugguggugcugagcuucgaacugcugcaugcuccugccacagugugcggcccuaagaaaagcaccaaucucgugaagaacaaaugcgugaacuucaacuucaacggccugaccggcaccggcgugcugacagagagcaacaagaaguuccugccauuccagcaguuuggccgggauaucgccgauaccacagacgccguuagagauccccagacacuggaaauccuggacaucaccccaugcagcuucggcggagugucugugaucaccccuggcaccaacaccagcaaucagguggcagugcuguaccagggcgugaacuguaccgaagugcccguggccauucacgccgaucagcugacaccuacauggcggguguacuccaccggcagcaauguguuucagaccagagccggcugucugaucggagccgagcacgugaacaauagcuacgagugcgacauccccaucggcgcuggcaucugugccagcuaccagacacagacaaacagccccagacgggcuagaagcguggccagccagagcaucauugccuacacaaugucucugggcgccgagaacagcguggccuacuccaacaacucuaucgcuauccccaccaacuucaccaucagcgugaccaccgagauccugccuguguccaugaccaagaccagcguggacugcaccauguacaucugcggcgauuccaccgagugcuccaaccugcugcugcaguacggcagcuucugcacccagcugaauagagcccugacagggaucgccguggaacaggacaagaacacccaagagguguucgcccaagugaagcaaaucuacaagaccccuccuaucaaggacuucggcggcuucaauuucagccagauucugcccgauccuagcaagcccagcaagcggagcuucaucgaggaccugcuguucaacaaagugacacuggccgacgccggcuucaucaagcaguauggcgauugucugggcgacauugccgccagggaucugauuugcgcccagaaguuuaacggacugacagugcugccuccucugcugaccgaugagaugaucgcccaguacacaucugcccugcuggccggcacaaucacaagcggcuggacauuuggagcuggcgccgcucugcagauccccuuugcuaugcagauggccuaccgguucaacggcaucggagugacccagaaugugcuguacgagaaccagaagcugaucgccaaccaguucaacagcgccaucggcaagauccaggacagccugagcagcacagcaagcgcccugggaaagcugcaggacguggucaaccagaaugcccaggcacugaacacccuggucaagcagcuguccuccaacuucggcgccaucagcucugugcugaacgauauccugagcagacuggacaaggucgaggccgaggugcagaucgacagacugaucacaggcagacugcagagccuccagacauacgugacccagcagcugaucagagccgccgagauuagagccucugccaaucuggccgccaccaagaugucugagugugugcugggccagagcaagagaguggacuuuugcggcaagggcuaccaccugaugagcuucccucagucugccccucacggcgugguguuucugcacgugacauaugugcccgcucaagagaagaauuucaccaccgcuccagccaucugccacgacggcaaagcccacuuuccuagagaaggcguguucguguccaacggcacccauugguucgugacacagcggaacuucuacgagccccagaucaucaccaccgacaacaccuucgugucuggcaacugcgacguugugaucggcauugugaacaauaccguguacgacccucugcagcccgagcuggacagcuucaaagaggaacuggacaaguacuuuaagaaccacacaagccccgacguggaccugggcgauaucagcggaaucaaugccagcgucgugaacauccagaaagagaucgaccggcugaacgagguggccaagaaucugaacgagagccugaucgaccugcaagaacuggggaaguacgagcaguacaucaaguggcccugguacaucuggcugggcuuuaucgccggacugauugccaucgugauggucacaaucaugcuguguugcaugaccagcugcuguagcugccugaagggcuguuguagcuguggcagcugcugcaaguucgacgaggacgauucugagcccgugcugaagggcgugaaacugcacuacaccugaggacuaguuauaagacugacuagcccgaugggccucccaacgggcccuccuccccuccuugcaccgagauuaauaaaaaaaaaaaaaaaaaaaaaaaaaaaaaaaaaaaaaaaaaaaaaaaaaaaaaaaaaaaaaaaaugcaucccccccccccccccccccccccccccccccaaaggcucuuuucagagccaccagaauu

SEQ ID NO: 23266 - RNA, 4039 nt, Artificial Sequence
  SARS-CoV-2/Wuhan/WIV05/2019__EPI_ISL_402128 spike protein mRNA gc mod (1-1273)(N501Y_D614G)
aggagaaagcuuaccauguucguguuucuggugcugcugccccugguguccagccagugugugaaccugaccaccagaacacagcugccuccagccuacaccaacagcuucaccagaggcguguacuaccccgacaagguguucagauccagcgugcugcacucuacccaggaccuguuccugccuuucuucagcaacgugaccugguuccacgccauccacguguccggcaccaauggcaccaagagauucgacaaccccgugcugcccuucaacgacgggguguacuuugccagcaccgagaaguccaacaucaucagaggcuggaucuucggcaccacacuggacagcaagacccagagccugcugaucgugaacaacgccaccaacguggucaucaaagugugcgaguuccaguucugcaacgaccccuuccugggcgucuacuaccacaagaacaacaagagcuggauggaaagcgaguuccggguguacagcagcgccaacaacugcaccuucgaguacgugucccagccuuuccugauggaccuggaaggcaagcagggcaacuucaagaaccugcgcgaguucguguucaagaacaucgacggcuacuucaaaaucuacagcaagcacaccccuaucaaccucgugcgggaucugccucagggcuucucugcucuggaaccccugguggaucugcccaucggcaucaacaucacccgguuucagacacugcuggcccugcacagaagcuaccugacaccuggcgauagcagcagcggauggacagcuggugccgccgcuuacuaugugggcuaccugcagccuagaaccuuccugcugaaguacaacgagaacggcaccaucaccgacgccguggauugugcucuggauccucugagcgagacaaagugcacccugaaguccuucaccguggaaaagggcaucuaccagaccagcaacuuccgggugcagcccaccgaauccaucgugcgguuccccaauaucaccaaucugugccccuucggcgagguguucaaugccaccagauucgccucuguguacgccuggaaccggaagcggaucagcaauugcguggccgacuacuccgugcuguacaacuccgccagcuucagcaccuucaagugcuacggcguguccccuaccaagcugaacgaccugugcuucacaaacguguacgccgacagcuucgugauccggggagaugaagugcggcagauugccccuggacagacaggcaagaucgccgacuacaacuacaagcugcccgacgacuucaccggcugugugauugccuggaacagcaacaaccuggacuccaaagucggcggcaacuacaauuaccuguaccggcuguuccggaaguccaaucugaagcccuucgagcgggacaucagcaccgaaaucuaucaggccggcagcaccccuugcaacggcguggaaggcuucaacugcuacuucccacugcaguccuacggcuuucagcccacauacggcgugggcuaucagcccuacagagugguggugcugagcuucgaacugcugcaugcuccugccacagugugcggcccuaagaaaagcaccaaucucgugaagaacaaaugcgugaacuucaacuucaacggccugaccggcaccggcgugcugacagagagcaacaagaaguuccugccauuccagcaguuuggccgggauaucgccgauaccacagacgccguuagagauccccagacacuggaaauccuggacaucaccccaugcagcuucggcggagugucugugaucaccccuggcaccaacaccagcaaucagguggcagugcuguaccagggcgugaacuguaccgaagugcccguggccauucacgccgaucagcugacaccuacauggcggguguacuccaccggcagcaauguguuucagaccagagccggcugucugaucggagccgagcacgugaacaauagcuacgagugcgacauccccaucggcgcuggcaucugugccagcuaccagacacagacaaacagccccagacgggcuagaagcguggccagccagagcaucauugccuacacaaugucucugggcgccgagaacagcguggccuacuccaacaacucuaucgcuauccccaccaacuucaccaucagcgugaccaccgagauccugccuguguccaugaccaagaccagcguggacugcaccauguacaucugcggcgauuccaccgagugcuccaaccugcugcugcaguacggcagcuucugcacccagcugaauagagcccugacagggaucgccguggaacaggacaagaacacccaagagguguucgcccaagugaagcaaaucuacaagaccccuccuaucaaggacuucggcggcuucaauuucagccagauucugcccgauccuagcaagcccagcaagcggagcuucaucgaggaccugcuguucaacaaagugacacuggccgacgccggcuucaucaagcaguauggcgauugucugggcgacauugccgccagggaucugauuugcgcccagaaguuuaacggacugacagugcugccuccucugcugaccgaugagaugaucgcccaguacacaucugcccugcuggccggcacaaucacaagcggcuggacauuuggagcuggcgccgcucugcagauccccuuugcuaugcagauggccuaccgguucaacggcaucggagugacccagaaugugcuguacgagaaccagaagcugaucgccaaccaguucaacagcgccaucggcaagauccaggacagccugagcagcacagcaagcgcccugggaaagcugcaggacguggucaaccagaaugcccaggcacugaacacccuggucaagcagcuguccuccaacuucggcgccaucagcucugugcugaacgauauccugagcagacuggacaaggucgaggccgaggugcagaucgacagacugaucacaggcagacugcagagccuccagacauacgugacccagcagcugaucagagccgccgagauuagagccucugccaaucuggccgccaccaagaugucugagugugugcugggccagagcaagagaguggacuuuugcggcaagggcuaccaccugaugagcuucccucagucugccccucacggcgugguguuucugcacgugacauaugugcccgcucaagagaagaauuucaccaccgcuccagccaucugccacgacggcaaagcccacuuuccuagagaaggcguguucguguccaacggcacccauugguucgugacacagcggaacuucuacgagccccagaucaucaccaccgacaacaccuucgugucuggcaacugcgacguugugaucggcauugugaacaauaccguguacgacccucugcagcccgagcuggacagcuucaaagaggaacuggacaaguacuuuaagaaccacacaagccccgacguggaccugggcgauaucagcggaaucaaugccagcgucgugaacauccagaaagagaucgaccggcugaacgagguggccaagaaucugaacgagagccugaucgaccugcaagaacuggggaaguacgagcaguacaucaaguggcccugguacaucuggcugggcuuuaucgccggacugauugccaucgugauggucacaaucaugcuguguugcaugaccagcugcuguagcugccugaagggcuguuguagcuguggcagcugcugcaaguucgacgaggacgauucugagcccgugcugaagggcgugaaacugcacuacaccugaggacuaguuauaagacugacuagcccgaugggccucccaacgggcccuccuccccuccuugcaccgagauuaauaaaaaaaaaaaaaaaaaaaaaaaaaaaaaaaaaaaaaaaaaaaaaaaaaaaaaaaaaaaaaaaaugcaucccccccccccccccccccccccccccccccaaaggcucuuuucagagccaccagaauu

SEQ ID NO: 23267 - RNA, 4033 nt, Artificial Sequence
  SARS-CoV-2/Wuhan/WIV05/2019__EPI_ISL_402128 spike protein mRNA gc mod (1-1273)(H69del_V70del_D614G)
aggagaaagcuuaccauguucguguuucuggugcugcugccccugguguccagccagugugugaaccugaccaccagaacacagcugccuccagccuacaccaacagcuucaccagaggcguguacuaccccgacaagguguucagauccagcgugcugcacucuacccaggaccuguuccugccuuucuucagcaacgugaccugguuccacgccaucuccggcaccaauggcaccaagagauucgacaaccccgugcugcccuucaacgacgggguguacuuugccagcaccgagaaguccaacaucaucagaggcuggaucuucggcaccacacuggacagcaagacccagagccugcugaucgugaacaacgccaccaacguggucaucaaagugugcgaguuccaguucugcaacgaccccuuccugggcgucuacuaccacaagaacaacaagagcuggauggaaagcgaguuccggguguacagcagcgccaacaacugcaccuucgaguacgugucccagccuuuccugauggaccuggaaggcaagcagggcaacuucaagaaccugcgcgaguucguguucaagaacaucgacggcuacuucaaaaucuacagcaagcacaccccuaucaaccucgugcgggaucugccucagggcuucucugcucuggaaccccugguggaucugcccaucggcaucaacaucacccgguuucagacacugcuggcccugcacagaagcuaccugacaccuggcgauagcagcagcggauggacagcuggugccgccgcuuacuaugugggcuaccugcagccuagaaccuuccugcugaaguacaacgagaacggcaccaucaccgacgccguggauugugcucuggauccucugagcgagacaaagugcacccugaaguccuucaccguggaaaagggcaucuaccagaccagcaacuuccgggugcagcccaccgaauccaucgugcgguuccccaauaucaccaaucugugccccuucggcgagguguucaaugccaccagauucgccucuguguacgccuggaaccggaagcggaucagcaauugcguggccgacuacuccgugcuguacaacuccgccagcuucagcaccuucaagugcuacggcguguccccuaccaagcugaacgaccugugcuucacaaacguguacgccgacagcuucgugauccggggagaugaagugcggcagauugccccuggacagacaggcaagaucgccgacuacaacuacaagcugcccgacgacuucaccggcugugugauugccuggaacagcaacaaccuggacuccaaagucggcggcaacuacaauuaccuguaccggcuguuccggaaguccaaucugaagcccuucgagcgggacaucagcaccgaaaucuaucaggccggcagcaccccuugcaacggcguggaaggcuucaacugcuacuucccacugcaguccuacggcuuucagcccacaaauggcgugggcuaucagcccuacagagugguggugcugagcuucgaacugcugcaugcuccugccacagugugcggcccuaagaaaagcaccaaucucgugaagaacaaaugcgugaacuucaacuucaacggccugaccggcaccggcgugcugacagagagcaacaagaaguuccugccauuccagcaguuuggccgggauaucgccgauaccacagacgccguuagagauccccagacacuggaaauccuggacaucaccccaugcagcuucggcggagugucugugaucaccccuggcaccaacaccagcaaucagguggcagugcuguaccagggcgugaacuguaccgaagugcccguggccauucacgccgaucagcugacaccuacauggcggguguacuccaccggcagcaauguguuucagaccagagccggcugucugaucggagccgagcacgugaacaauagcuacgagugcgacauccccaucggcgcuggcaucugugccagcuaccagacacagacaaacagccccagacgggcuagaagcguggccagccagagcaucauugccuacacaaugucucugggcgccgagaacagcguggccuacuccaacaacucuaucgcuauccccaccaacuucaccaucagcgugaccaccgagauccugccuguguccaugaccaagaccagcguggacugcaccauguacaucugcggcgauuccaccgagugcuccaaccugcugcugcaguacggcagcuucugcacccagcugaauagagcccugacagggaucgccguggaacaggacaagaacacccaagagguguucgcccaagugaagcaaaucuacaagaccccuccuaucaaggacuucggcggcuucaauuucagccagauucugcccgauccuagcaagcccagcaagcggagcuucaucgaggaccugcuguucaacaaagugacacuggccgacgccggcuucaucaagcaguauggcgauugucugggcgacauugccgccagggaucugauuugcgcccagaaguuuaacggacugacagugcugccuccucugcugaccgaugagaugaucgcccaguacacaucugcccugcuggccggcacaaucacaagcggcuggacauuuggagcuggcgccgcucugcagauccccuuugcuaugcagauggccuaccgguucaacggcaucggagugacccagaaugugcuguacgagaaccagaagcugaucgccaaccaguucaacagcgccaucggcaagauccaggacagccugagcagcacagcaagcgcccugggaaagcugcaggacguggucaaccagaaugcccaggcacugaacacccuggucaagcagcuguccuccaacuucggcgccaucagcucugugcugaacgauauccugagcagacuggacaaggucgaggccgaggugcagaucgacagacugaucacaggcagacugcagagccuccagacauacgugacccagcagcugaucagagccgccgagauuagagccucugccaaucuggccgccaccaagaugucugagugugugcugggccagagcaagagaguggacuuuugcggcaagggcuaccaccugaugagcuucccucagucugccccucacggcgugguguuucugcacgugacauaugugcccgcucaagagaagaauuucaccaccgcuccagccaucugccacgacggcaaagcccacuuuccuagagaaggcguguucguguccaacggcacccauugguucgugacacagcggaacuucuacgagccccagaucaucaccaccgacaacaccuucgugucuggcaacugcgacguugugaucggcauugugaacaauaccguguacgacccucugcagcccgagcuggacagcuucaaagaggaacuggacaaguacuuuaagaaccacacaagccccgacguggaccugggcgauaucagcggaaucaaugccagcgucgugaacauccagaaagagaucgaccggcugaacgagguggccaagaaucugaacgagagccugaucgaccugcaagaacuggggaaguacgagcaguacaucaaguggcccugguacaucuggcugggcuuuaucgccggacugauugccaucgugauggucacaaucaugcuguguugcaugaccagcugcuguagcugccugaagggcuguuguagcuguggcagcugcugcaaguucgacgaggacgauucugagcccgugcugaagggcgugaaacugcacuacaccugaggacuaguuauaagacugacuagcccgaugggccucccaacgggcccuccuccccuccuugcaccgagauuaauaaaaaaaaaaaaaaaaaaaaaaaaaaaaaaaaaaaaaaaaaaaaaaaaaaaaaaaaaaaaaaaaugcaucccccccccccccccccccccccccccccccaaaggcucuuuucagagccaccagaauu

SEQ ID NO: 23268 - RNA, 4039 nt, Artificial Sequence
  SARS-CoV-2/Wuhan/WIV05/2019__EPI_ISL_402128 spike protein mRNA gc mod (1-1273)(Y453F_D614G)
aggagaaagcuuaccauguucguguuucuggugcugcugccccugguguccagccagugugugaaccugaccaccagaacacagcugccuccagccuacaccaacagcuucaccagaggcguguacuaccccgacaagguguucagauccagcgugcugcacucuacccaggaccuguuccugccuuucuucagcaacgugaccugguuccacgccauccacguguccggcaccaauggcaccaagagauucgacaaccccgugcugcccuucaacgacgggguguacuuugccagcaccgagaaguccaacaucaucagaggcuggaucuucggcaccacacuggacagcaagacccagagccugcugaucgugaacaacgccaccaacguggucaucaaagugugcgaguuccaguucugcaacgaccccuuccugggcgucuacuaccacaagaacaacaagagcuggauggaaagcgaguuccggguguacagcagcgccaacaacugcaccuucgaguacgugucccagccuuuccugauggaccuggaaggcaagcagggcaacuucaagaaccugcgcgaguucguguucaagaacaucgacggcuacuucaaaaucuacagcaagcacaccccuaucaaccucgugcgggaucugccucagggcuucucugcucuggaaccccugguggaucugcccaucggcaucaacaucacccgguuucagacacugcuggcccugcacagaagcuaccugacaccuggcgauagcagcagcggauggacagcuggugccgccgcuuacuaugugggcuaccugcagccuagaaccuuccugcugaaguacaacgagaacggcaccaucaccgacgccguggauugugcucuggauccucugagcgagacaaagugcacccugaaguccuucaccguggaaaagggcaucuaccagaccagcaacuuccgggugcagcccaccgaauccaucgugcgguuccccaauaucaccaaucugugccccuucggcgagguguucaaugccaccagauucgccucuguguacgccuggaaccggaagcggaucagcaauugcguggccgacuacuccgugcuguacaacuccgccagcuucagcaccuucaagugcuacggcguguccccuaccaagcugaacgaccugugcuucacaaacguguacgccgacagcuucgugauccggggagaugaagugcggcagauugccccuggacagacaggcaagaucgccgacuacaacuacaagcugcccgacgacuucaccggcugugugauugccuggaacagcaacaaccuggacuccaaagucggcggcaacuacaauuaccuguuccggcuguuccggaaguccaaucugaagcccuucgagcgggacaucagcaccgaaaucuaucaggccggcagcaccccuugcaacggcguggaaggcuucaacugcuacuucccacugcaguccuacggcuuucagcccacaaauggcgugggcuaucagcccuacagagugguggugcugagcuucgaacugcugcaugcuccugccacagugugcggcccuaagaaaagcaccaaucucgugaagaacaaaugcgugaacuucaacuucaacggccugaccggcaccggcgugcugacagagagcaacaagaaguuccugccauuccagcaguuuggccgggauaucgccgauaccacagacgccguuagagauccccagacacuggaaauccuggacaucaccccaugcagcuucggcggagugucugugaucaccccuggcaccaacaccagcaaucagguggcagugcuguaccagggcgugaacuguaccgaagugcccguggccauucacgccgaucagcugacaccuacauggcggguguacuccaccggcagcaauguguuucagaccagagccggcugucugaucggagccgagcacgugaacaauagcuacgagugcgacauccccaucggcgcuggcaucugugccagcuaccagacacagacaaacagccccagacgggcuagaagcguggccagccagagcaucauugccuacacaaugucucugggcgccgagaacagcguggccuacuccaacaacucuaucgcuauccccaccaacuucaccaucagcgugaccaccgagauccugccuguguccaugaccaagaccagcguggacugcaccauguacaucugcggcgauuccaccgagugcuccaaccugcugcugcaguacggcagcuucugcacccagcugaauagagcccugacagggaucgccguggaacaggacaagaacacccaagagguguucgcccaagugaagcaaaucuacaagaccccuccuaucaaggacuucggcggcuucaauuucagccagauucugcccgauccuagcaagcccagcaagcggagcuucaucgaggaccugcuguucaacaaagugacacuggccgacgccggcuucaucaagcaguauggcgauugucugggcgacauugccgccagggaucugauuugcgcccagaaguuuaacggacugacagugcugccuccucugcugaccgaugagaugaucgcccaguacacaucugcccugcuggccggcacaaucacaagcggcuggacauuuggagcuggcgccgcucugcagauccccuuugcuaugcagauggccuaccgguucaacggcaucggagugacccagaaugugcuguacgagaaccagaagcugaucgccaaccaguucaacagcgccaucggcaagauccaggacagccugagcagcacagcaagcgcccugggaaagcugcaggacguggucaaccagaaugcccaggcacugaacacccuggucaagcagcuguccuccaacuucggcgccaucagcucugugcugaacgauauccugagcagacuggacaaggucgaggccgaggugcagaucgacagacugaucacaggcagacugcagagccuccagacauacgugacccagcagcugaucagagccgccgagauuagagccucugccaaucuggccgccaccaagaugucugagugugugcugggccagagcaagagaguggacuuuugcggcaagggcuaccaccugaugagcuucccucagucugccccucacggcgugguguuucugcacgugacauaugugcccgcucaagagaagaauuucaccaccgcuccagccaucugccacgacggcaaagcccacuuuccuagagaaggcguguucguguccaacggcacccauugguucgugacacagcggaacuucuacgagccccagaucaucaccaccgacaacaccuucgugucuggcaacugcgacguugugaucggcauugugaacaauaccguguacgacccucugcagcccgagcuggacagcuucaaagaggaacuggacaaguacuuuaagaaccacacaagccccgacguggaccugggcgauaucagcggaaucaaugccagcgucgugaacauccagaaagagaucgaccggcugaacgagguggccaagaaucugaacgagagccugaucgaccugcaagaacuggggaaguacgagcaguacaucaaguggcccugguacaucuggcugggcuuuaucgccggacugauugccaucgugauggucacaaucaugcuguguugcaugaccagcugcuguagcugccugaagggcuguuguagcuguggcagcugcugcaaguucgacgaggacgauucugagcccgugcugaagggcgugaaacugcacuacaccugaggacuaguuauaagacugacuagcccgaugggccucccaacgggcccuccuccccuccuugcaccgagauuaauaaaaaaaaaaaaaaaaaaaaaaaaaaaaaaaaaaaaaaaaaaaaaaaaaaaaaaaaaaaaaaaaugcaucccccccccccccccccccccccccccccccaaaggcucuuuucagagccaccagaauu

SEQ ID NO: 23269 - RNA, 4039 nt, Artificial Sequence
  SARS-CoV-2/Wuhan/WIV05/2019__EPI_ISL_402128 spike protein mRNA gc mod (1-1273)(D614G_I692V)
aggagaaagcuuaccauguucguguuucuggugcugcugccccugguguccagccagugugugaaccugaccaccagaacacagcugccuccagccuacaccaacagcuucaccagaggcguguacuaccccgacaagguguucagauccagcgugcugcacucuacccaggaccuguuccugccuuucuucagcaacgugaccugguuccacgccauccacguguccggcaccaauggcaccaagagauucgacaaccccgugcugcccuucaacgacgggguguacuuugccagcaccgagaaguccaacaucaucagaggcuggaucuucggcaccacacuggacagcaagacccagagccugcugaucgugaacaacgccaccaacguggucaucaaagugugcgaguuccaguucugcaacgaccccuuccugggcgucuacuaccacaagaacaacaagagcuggauggaaagcgaguuccggguguacagcagcgccaacaacugcaccuucgaguacgugucccagccuuuccugauggaccuggaaggcaagcagggcaacuucaagaaccugcgcgaguucguguucaagaacaucgacggcuacuucaaaaucuacagcaagcacaccccuaucaaccucgugcgggaucugccucagggcuucucugcucuggaaccccugguggaucugcccaucggcaucaacaucacccgguuucagacacugcuggcccugcacagaagcuaccugacaccuggcgauagcagcagcggauggacagcuggugccgccgcuuacuaugugggcuaccugcagccuagaaccuuccugcugaaguacaacgagaacggcaccaucaccgacgccguggauugugcucuggauccucugagcgagacaaagugcacccugaaguccuucaccguggaaaagggcaucuaccagaccagcaacuuccgggugcagcccaccgaauccaucgugcgguuccccaauaucaccaaucugugccccuucggcgagguguucaaugccaccagauucgccucuguguacgccuggaaccggaagcggaucagcaauugcguggccgacuacuccgugcuguacaacuccgccagcuucagcaccuucaagugcuacggcguguccccuaccaagcugaacgaccugugcuucacaaacguguacgccgacagcuucgugauccggggagaugaagugcggcagauugccccuggacagacaggcaagaucgccgacuacaacuacaagcugcccgacgacuucaccggcugugugauugccuggaacagcaacaaccuggacuccaaagucggcggcaacuacaauuaccuguaccggcuguuccggaaguccaaucugaagcccuucgagcgggacaucagcaccgaaaucuaucaggccggcagcaccccuugcaacggcguggaaggcuucaacugcuacuucccacugcaguccuacggcuuucagcccacaaauggcgugggcuaucagcccuacagagugguggugcugagcuucgaacugcugcaugcuccugccacagugugcggcccuaagaaaagcaccaaucucgugaagaacaaaugcgugaacuucaacuucaacggccugaccggcaccggcgugcugacagagagcaacaagaaguuccugccauuccagcaguuuggccgggauaucgccgauaccacagacgccguuagagauccccagacacuggaaauccuggacaucaccccaugcagcuucggcggagugucugugaucaccccuggcaccaacaccagcaaucagguggcagugcuguaccagggcgugaacuguaccgaagugcccguggccauucacgccgaucagcugacaccuacauggcggguguacuccaccggcagcaauguguuucagaccagagccggcugucugaucggagccgagcacgugaacaauagcuacgagugcgacauccccaucggcgcuggcaucugugccagcuaccagacacagacaaacagccccagacgggcuagaagcguggccagccagagcgugauugccuacacaaugucucugggcgccgagaacagcguggccuacuccaacaacucuaucgcuauccccaccaacuucaccaucagcgugaccaccgagauccugccuguguccaugaccaagaccagcguggacugcaccauguacaucugcggcgauuccaccgagugcuccaaccugcugcugcaguacggcagcuucugcacccagcugaauagagcccugacagggaucgccguggaacaggacaagaacacccaagagguguucgcccaagugaagcaaaucuacaagaccccuccuaucaaggacuucggcggcuucaauuucagccagauucugcccgauccuagcaagcccagcaagcggagcuucaucgaggaccugcuguucaacaaagugacacuggccgacgccggcuucaucaagcaguauggcgauugucugggcgacauugccgccagggaucugauuugcgcccagaaguuuaacggacugacagugcugccuccucugcugaccgaugagaugaucgcccaguacacaucugcccugcuggccggcacaaucacaagcggcuggacauuuggagcuggcgccgcucugcagauccccuuugcuaugcagauggccuaccgguucaacggcaucggagugacccagaaugugcuguacgagaaccagaagcugaucgccaaccaguucaacagcgccaucggcaagauccaggacagccugagcagcacagcaagcgcccugggaaagcugcaggacguggucaaccagaaugcccaggcacugaacacccuggucaagcagcuguccuccaacuucggcgccaucagcucugugcugaacgauauccugagcagacuggacaaggucgaggccgaggugcagaucgacagacugaucacaggcagacugcagagccuccagacauacgugacccagcagcugaucagagccgccgagauuagagccucugccaaucuggccgccaccaagaugucugagugugugcugggccagagcaagagaguggacuuuugcggcaagggcuaccaccugaugagcuucccucagucugccccucacggcgugguguuucugcacgugacauaugugcccgcucaagagaagaauuucaccaccgcuccagccaucugccacgacggcaaagcccacuuuccuagagaaggcguguucguguccaacggcacccauugguucgugacacagcggaacuucuacgagccccagaucaucaccaccgacaacaccuucgugucuggcaacugcgacguugugaucggcauugugaacaauaccguguacgacccucugcagcccgagcuggacagcuucaaagaggaacuggacaaguacuuuaagaaccacacaagccccgacguggaccugggcgauaucagcggaaucaaugccagcgucgugaacauccagaaagagaucgaccggcugaacgagguggccaagaaucugaacgagagccugaucgaccugcaagaacuggggaaguacgagcaguacaucaaguggcccugguacaucuggcugggcuuuaucgccggacugauugccaucgugauggucacaaucaugcuguguugcaugaccagcugcuguagcugccugaagggcuguuguagcuguggcagcugcugcaaguucgacgaggacgauucugagcccgugcugaagggcgugaaacugcacuacaccugaggacuaguuauaagacugacuagcccgaugggccucccaacgggcccuccuccccuccuugcaccgagauuaauaaaaaaaaaaaaaaaaaaaaaaaaaaaaaaaaaaaaaaaaaaaaaaaaaaaaaaaaaaaaaaaaugcaucccccccccccccccccccccccccccccccaaaggcucuuuucagagccaccagaauu

SEQ ID NO: 23270 - RNA, 4039 nt, Artificial Sequence
  SARS-CoV-2/Wuhan/WIV05/2019__EPI_ISL_402128 spike protein mRNA gc mod (1-1273)(D614G_M1229I)
aggagaaagcuuaccauguucguguuucuggugcugcugccccugguguccagccagugugugaaccugaccaccagaacacagcugccuccagccuacaccaacagcuucaccagaggcguguacuaccccgacaagguguucagauccagcgugcugcacucuacccaggaccuguuccugccuuucuucagcaacgugaccugguuccacgccauccacguguccggcaccaauggcaccaagagauucgacaaccccgugcugcccuucaacgacgggguguacuuugccagcaccgagaaguccaacaucaucagaggcuggaucuucggcaccacacuggacagcaagacccagagccugcugaucgugaacaacgccaccaacguggucaucaaagugugcgaguuccaguucugcaacgaccccuuccugggcgucuacuaccacaagaacaacaagagcuggauggaaagcgaguuccggguguacagcagcgccaacaacugcaccuucgaguacgugucccagccuuuccugauggaccuggaaggcaagcagggcaacuucaagaaccugcgcgaguucguguucaagaacaucgacggcuacuucaaaaucuacagcaagcacaccccuaucaaccucgugcgggaucugccucagggcuucucugcucuggaaccccugguggaucugcccaucggcaucaacaucacccgguuucagacacugcuggcccugcacagaagcuaccugacaccuggcgauagcagcagcggauggacagcuggugccgccgcuuacuaugugggcuaccugcagccuagaaccuuccugcugaaguacaacgagaacggcaccaucaccgacgccguggauugugcucuggauccucugagcgagacaaagugcacccugaaguccuucaccguggaaaagggcaucuaccagaccagcaacuuccgggugcagcccaccgaauccaucgugcgguuccccaauaucaccaaucugugccccuucggcgagguguucaaugccaccagauucgccucuguguacgccuggaaccggaagcggaucagcaauugcguggccgacuacuccgugcuguacaacuccgccagcuucagcaccuucaagugcuacggcguguccccuaccaagcugaacgaccugugcuucacaaacguguacgccgacagcuucgugauccggggagaugaagugcggcagauugccccuggacagacaggcaagaucgccgacuacaacuacaagcugcccgacgacuucaccggcugugugauugccuggaacagcaacaaccuggacuccaaagucggcggcaacuacaauuaccuguaccggcuguuccggaaguccaaucugaagcccuucgagcgggacaucagcaccgaaaucuaucaggccggcagcaccccuugcaacggcguggaaggcuucaacugcuacuucccacugcaguccuacggcuuucagcccacaaauggcgugggcuaucagcccuacagagugguggugcugagcuucgaacugcugcaugcuccugccacagugugcggcccuaagaaaagcaccaaucucgugaagaacaaaugcgugaacuucaacuucaacggccugaccggcaccggcgugcugacagagagcaacaagaaguuccugccauuccagcaguuuggccgggauaucgccgauaccacagacgccguuagagauccccagacacuggaaauccuggacaucaccccaugcagcuucggcggagugucugugaucaccccuggcaccaacaccagcaaucagguggcagugcuguaccagggcgugaacuguaccgaagugcccguggccauucacgccgaucagcugacaccuacauggcggguguacuccaccggcagcaauguguuucagaccagagccggcugucugaucggagccgagcacgugaacaauagcuacgagugcgacauccccaucggcgcuggcaucugugccagcuaccagacacagacaaacagccccagacgggcuagaagcguggccagccagagcaucauugccuacacaaugucucugggcgccgagaacagcguggccuacuccaacaacucuaucgcuauccccaccaacuucaccaucagcgugaccaccgagauccugccuguguccaugaccaagaccagcguggacugcaccauguacaucugcggcgauuccaccgagugcuccaaccugcugcugcaguacggcagcuucugcacccagcugaauagagcccugacagggaucgccguggaacaggacaagaacacccaagagguguucgcccaagugaagcaaaucuacaagaccccuccuaucaaggacuucggcggcuucaauuucagccagauucugcccgauccuagcaagcccagcaagcggagcuucaucgaggaccugcuguucaacaaagugacacuggccgacgccggcuucaucaagcaguauggcgauugucugggcgacauugccgccagggaucugauuugcgcccagaaguuuaacggacugacagugcugccuccucugcugaccgaugagaugaucgcccaguacacaucugcccugcuggccggcacaaucacaagcggcuggacauuuggagcuggcgccgcucugcagauccccuuugcuaugcagauggccuaccgguucaacggcaucggagugacccagaaugugcuguacgagaaccagaagcugaucgccaaccaguucaacagcgccaucggcaagauccaggacagccugagcagcacagcaagcgcccugggaaagcugcaggacguggucaaccagaaugcccaggcacugaacacccuggucaagcagcuguccuccaacuucggcgccaucagcucugugcugaacgauauccugagcagacuggacaaggucgaggccgaggugcagaucgacagacugaucacaggcagacugcagagccuccagacauacgugacccagcagcugaucagagccgccgagauuagagccucugccaaucuggccgccaccaagaugucugagugugugcugggccagagcaagagaguggacuuuugcggcaagggcuaccaccugaugagcuucccucagucugccccucacggcgugguguuucugcacgugacauaugugcccgcucaagagaagaauuucaccaccgcuccagccaucugccacgacggcaaagcccacuuuccuagagaaggcguguucguguccaacggcacccauugguucgugacacagcggaacuucuacgagccccagaucaucaccaccgacaacaccuucgugucuggcaacugcgacguugugaucggcauugugaacaauaccguguacgacccucugcagcccgagcuggacagcuucaaagaggaacuggacaaguacuuuaagaaccacacaagccccgacguggaccugggcgauaucagcggaaucaaugccagcgucgugaacauccagaaagagaucgaccggcugaacgagguggccaagaaucugaacgagagccugaucgaccugcaagaacuggggaaguacgagcaguacaucaaguggcccugguacaucuggcugggcuuuaucgccggacugauugccaucgugaucgucacaaucaugcuguguugcaugaccagcugcuguagcugccugaagggcuguuguagcuguggcagcugcugcaaguucgacgaggacgauucugagcccgugcugaagggcgugaaacugcacuacaccugaggacuaguuauaagacugacuagcccgaugggccucccaacgggcccuccuccccuccuugcaccgagauuaauaaaaaaaaaaaaaaaaaaaaaaaaaaaaaaaaaaaaaaaaaaaaaaaaaaaaaaaaaaaaaaaaugcaucccccccccccccccccccccccccccccccaaaggcucuuuucagagccaccagaauu

SEQ ID NO: 23271 - RNA, 4033 nt, Artificial Sequence
  SARS-CoV-2/Wuhan/WIV05/2019__EPI_ISL_402128 spike protein mRNA gc mod (1-1273)(H69del_V70del_A222V_Y453F_S477N_D614G_I692V)
aggagaaagcuuaccauguucguguuucuggugcugcugccccugguguccagccagugugugaaccugaccaccagaacacagcugccuccagccuacaccaacagcuucaccagaggcguguacuaccccgacaagguguucagauccagcgugcugcacucuacccaggaccuguuccugccuuucuucagcaacgugaccugguuccacgccaucuccggcaccaauggcaccaagagauucgacaaccccgugcugcccuucaacgacgggguguacuuugccagcaccgagaaguccaacaucaucagaggcuggaucuucggcaccacacuggacagcaagacccagagccugcugaucgugaacaacgccaccaacguggucaucaaagugugcgaguuccaguucugcaacgaccccuuccugggcgucuacuaccacaagaacaacaagagcuggauggaaagcgaguuccggguguacagcagcgccaacaacugcaccuucgaguacgugucccagccuuuccugauggaccuggaaggcaagcagggcaacuucaagaaccugcgcgaguucguguucaagaacaucgacggcuacuucaaaaucuacagcaagcacaccccuaucaaccucgugcgggaucugccucagggcuucucugugcuggaaccccugguggaucugcccaucggcaucaacaucacccgguuucagacacugcuggcccugcacagaagcuaccugacaccuggcgauagcagcagcggauggacagcuggugccgccgcuuacuaugugggcuaccugcagccuagaaccuuccugcugaaguacaacgagaacggcaccaucaccgacgccguggauugugcucuggauccucugagcgagacaaagugcacccugaaguccuucaccguggaaaagggcaucuaccagaccagcaacuuccgggugcagcccaccgaauccaucgugcgguuccccaauaucaccaaucugugccccuucggcgagguguucaaugccaccagauucgccucuguguacgccuggaaccggaagcggaucagcaauugcguggccgacuacuccgugcuguacaacuccgccagcuucagcaccuucaagugcuacggcguguccccuaccaagcugaacgaccugugcuucacaaacguguacgccgacagcuucgugauccggggagaugaagugcggcagauugccccuggacagacaggcaagaucgccgacuacaacuacaagcugcccgacgacuucaccggcugugugauugccuggaacagcaacaaccuggacuccaaagucggcggcaacuacaauuaccuguuccggcuguuccggaaguccaaucugaagcccuucgagcgggacaucagcaccgaaaucuaucaggccggcaacaccccuugcaacggcguggaaggcuucaacugcuacuucccacugcaguccuacggcuuucagcccacaaauggcgugggcuaucagcccuacagagugguggugcugagcuucgaacugcugcaugcuccugccacagugugcggcccuaagaaaagcaccaaucucgugaagaacaaaugcgugaacuucaacuucaacggccugaccggcaccggcgugcugacagagagcaacaagaaguuccugccauuccagcaguuuggccgggauaucgccgauaccacagacgccguuagagauccccagacacuggaaauccuggacaucaccccaugcagcuucggcggagugucugugaucaccccuggcaccaacaccagcaaucagguggcagugcuguaccagggcgugaacuguaccgaagugcccguggccauucacgccgaucagcugacaccuacauggcggguguacuccaccggcagcaauguguuucagaccagagccggcugucugaucggagccgagcacgugaacaauagcuacgagugcgacauccccaucggcgcuggcaucugugccagcuaccagacacagacaaacagccccagacgggcuagaagcguggccagccagagcgugauugccuacacaaugucucugggcgccgagaacagcguggccuacuccaacaacucuaucgcuauccccaccaacuucaccaucagcgugaccaccgagauccugccuguguccaugaccaagaccagcguggacugcaccauguacaucugcggcgauuccaccgagugcuccaaccugcugcugcaguacggcagcuucugcacccagcugaauagagcccugacagggaucgccguggaacaggacaagaacacccaagagguguucgcccaagugaagcaaaucuacaagaccccuccuaucaaggacuucggcggcuucaauuucagccagauucugcccgauccuagcaagcccagcaagcggagcuucaucgaggaccugcuguucaacaaagugacacuggccgacgccggcuucaucaagcaguauggcgauugucugggcgacauugccgccagggaucugauuugcgcccagaaguuuaacggacugacagugcugccuccucugcugaccgaugagaugaucgcccaguacacaucugcccugcuggccggcacaaucacaagcggcuggacauuuggagcuggcgccgcucugcagauccccuuugcuaugcagauggccuaccgguucaacggcaucggagugacccagaaugugcuguacgagaaccagaagcugaucgccaaccaguucaacagcgccaucggcaagauccaggacagccugagcagcacagcaagcgcccugggaaagcugcaggacguggucaaccagaaugcccaggcacugaacacccuggucaagcagcuguccuccaacuucggcgccaucagcucugugcugaacgauauccugagcagacuggacaaggucgaggccgaggugcagaucgacagacugaucacaggcagacugcagagccuccagacauacgugacccagcagcugaucagagccgccgagauuagagccucugccaaucuggccgccaccaagaugucugagugugugcugggccagagcaagagaguggacuuuugcggcaagggcuaccaccugaugagcuucccucagucugccccucacggcgugguguuucugcacgugacauaugugcccgcucaagagaagaauuucaccaccgcuccagccaucugccacgacggcaaagcccacuuuccuagagaaggcguguucguguccaacggcacccauugguucgugacacagcggaacuucuacgagccccagaucaucaccaccgacaacaccuucgugucuggcaacugcgacguugugaucggcauugugaacaauaccguguacgacccucugcagcccgagcuggacagcuucaaagaggaacuggacaaguacuuuaagaaccacacaagccccgacguggaccugggcgauaucagcggaaucaaugccagcgucgugaacauccagaaagagaucgaccggcugaacgagguggccaagaaucugaacgagagccugaucgaccugcaagaacuggggaaguacgagcaguacaucaaguggcccugguacaucuggcugggcuuuaucgccggacugauugccaucgugauggucacaaucaugcuguguugcaugaccagcugcuguagcugccugaagggcuguuguagcuguggcagcugcugcaaguucgacgaggacgauucugagcccgugcugaagggcgugaaacugcacuacaccugaggacuaguuauaagacugacuagcccgaugggccucccaacgggcccuccuccccuccuugcaccgagauuaauaaaaaaaaaaaaaaaaaaaaaaaaaaaaaaaaaaaaaaaaaaaaaaaaaaaaaaaaaaaaaaaaugcaucccccccccccccccccccccccccccccccaaaggcucuuuucagagccaccagaauu

SEQ ID NO: 23272 - RNA, 4033 nt, Artificial Sequence
  SARS-CoV-2/Wuhan/WIV05/2019__EPI_ISL_402128 spike protein mRNA gc mod (1-1273)(H69del_V70del_Y453F_D614G_I692V_M1229I)
aggagaaagcuuaccauguucguguuucuggugcugcugccccugguguccagccagugugugaaccugaccaccagaacacagcugccuccagccuacaccaacagcuucaccagaggcguguacuaccccgacaagguguucagauccagcgugcugcacucuacccaggaccuguuccugccuuucuucagcaacgugaccugguuccacgccaucuccggcaccaauggcaccaagagauucgacaaccccgugcugcccuucaacgacgggguguacuuugccagcaccgagaaguccaacaucaucagaggcuggaucuucggcaccacacuggacagcaagacccagagccugcugaucgugaacaacgccaccaacguggucaucaaagugugcgaguuccaguucugcaacgaccccuuccugggcgucuacuaccacaagaacaacaagagcuggauggaaagcgaguuccggguguacagcagcgccaacaacugcaccuucgaguacgugucccagccuuuccugauggaccuggaaggcaagcagggcaacuucaagaaccugcgcgaguucguguucaagaacaucgacggcuacuucaaaaucuacagcaagcacaccccuaucaaccucgugcgggaucugccucagggcuucucugcucuggaaccccugguggaucugcccaucggcaucaacaucacccgguuucagacacugcuggcccugcacagaagcuaccugacaccuggcgauagcagcagcggauggacagcuggugccgccgcuuacuaugugggcuaccugcagccuagaaccuuccugcugaaguacaacgagaacggcaccaucaccgacgccguggauugugcucuggauccucugagcgagacaaagugcacccugaaguccuucaccguggaaaagggcaucuaccagaccagcaacuuccgggugcagcccaccgaauccaucgugcgguuccccaauaucaccaaucugugccccuucggcgagguguucaaugccaccagauucgccucuguguacgccuggaaccggaagcggaucagcaauugcguggccgacuacuccgugcuguacaacuccgccagcuucagcaccuucaagugcuacggcguguccccuaccaagcugaacgaccugugcuucacaaacguguacgccgacagcuucgugauccggggagaugaagugcggcagauugccccuggacagacaggcaagaucgccgacuacaacuacaagcugcccgacgacuucaccggcugugugauugccuggaacagcaacaaccuggacuccaaagucggcggcaacuacaauuaccuguuccggcuguuccggaaguccaaucugaagcccuucgagcgggacaucagcaccgaaaucuaucaggccggcagcaccccuugcaacggcguggaaggcuucaacugcuacuucccacugcaguccuacggcuuucagcccacaaauggcgugggcuaucagcccuacagagugguggugcugagcuucgaacugcugcaugcuccugccacagugugcggcccuaagaaaagcaccaaucucgugaagaacaaaugcgugaacuucaacuucaacggccugaccggcaccggcgugcugacagagagcaacaagaaguuccugccauuccagcaguuuggccgggauaucgccgauaccacagacgccguuagagauccccagacacuggaaauccuggacaucaccccaugcagcuucggcggagugucugugaucaccccuggcaccaacaccagcaaucagguggcagugcuguaccagggcgugaacuguaccgaagugcccguggccauucacgccgaucagcugacaccuacauggcggguguacuccaccggcagcaauguguuucagaccagagccggcugucugaucggagccgagcacgugaacaauagcuacgagugcgacauccccaucggcgcuggcaucugugccagcuaccagacacagacaaacagccccagacgggcuagaagcguggccagccagagcgugauugccuacacaaugucucugggcgccgagaacagcguggccuacuccaacaacucuaucgcuauccccaccaacuucaccaucagcgugaccaccgagauccugccuguguccaugaccaagaccagcguggacugcaccauguacaucugcggcgauuccaccgagugcuccaaccugcugcugcaguacggcagcuucugcacccagcugaauagagcccugacagggaucgccguggaacaggacaagaacacccaagagguguucgcccaagugaagcaaaucuacaagaccccuccuaucaaggacuucggcggcuucaauuucagccagauucugcccgauccuagcaagcccagcaagcggagcuucaucgaggaccugcuguucaacaaagugacacuggccgacgccggcuucaucaagcaguauggcgauugucugggcgacauugccgccagggaucugauuugcgcccagaaguuuaacggacugacagugcugccuccucugcugaccgaugagaugaucgcccaguacacaucugcccugcuggccggcacaaucacaagcggcuggacauuuggagcuggcgccgcucugcagauccccuuugcuaugcagauggccuaccgguucaacggcaucggagugacccagaaugugcuguacgagaaccagaagcugaucgccaaccaguucaacagcgccaucggcaagauccaggacagccugagcagcacagcaagcgcccugggaaagcugcaggacguggucaaccagaaugcccaggcacugaacacccuggucaagcagcuguccuccaacuucggcgccaucagcucugugcugaacgauauccugagcagacuggacaaggucgaggccgaggugcagaucgacagacugaucacaggcagacugcagagccuccagacauacgugacccagcagcugaucagagccgccgagauuagagccucugccaaucuggccgccaccaagaugucugagugugugcugggccagagcaagagaguggacuuuugcggcaagggcuaccaccugaugagcuucccucagucugccccucacggcgugguguuucugcacgugacauaugugcccgcucaagagaagaauuucaccaccgcuccagccaucugccacgacggcaaagcccacuuuccuagagaaggcguguucguguccaacggcacccauugguucgugacacagcggaacuucuacgagccccagaucaucaccaccgacaacaccuucgugucuggcaacugcgacguugugaucggcauugugaacaauaccguguacgacccucugcagcccgagcuggacagcuucaaagaggaacuggacaaguacuuuaagaaccacacaagccccgacguggaccugggcgauaucagcggaaucaaugccagcgucgugaacauccagaaagagaucgaccggcugaacgagguggccaagaaucugaacgagagccugaucgaccugcaagaacuggggaaguacgagcaguacaucaaguggcccugguacaucuggcugggcuuuaucgccggacugauugccaucgugaucgucacaaucaugcuguguugcaugaccagcugcuguagcugccugaagggcuguuguagcuguggcagcugcugcaaguucgacgaggacgauucugagcccgugcugaagggcgugaaacugcacuacaccugaggacuaguuauaagacugacuagcccgaugggccucccaacgggcccuccuccccuccuugcaccgagauuaauaaaaaaaaaaaaaaaaaaaaaaaaaaaaaaaaaaaaaaaaaaaaaaaaaaaaaaaaaaaaaaaaugcaucccccccccccccccccccccccccccccccaaaggcucuuuucagagccaccagaauu

SEQ ID NO: 23273 - RNA, 4030 nt, Artificial Sequence
  SARS-CoV-2/Wuhan/WIV05/2019__EPI_ISL_402128 spike protein mRNA gc mod (1-1273)(H69del_V70del_Y144del_N501Y_A570D_D614G_P681H_T716I_S982 A_D1118H)
aggagaaagcuuaccauguucguguuucuggugcugcugccccugguguccagccagugugugaaccugaccaccagaacacagcugccuccagccuacaccaacagcuucaccagaggcguguacuaccccgacaagguguucagauccagcgugcugcacucuacccaggaccuguuccugccuuucuucagcaacgugaccugguuccacgccaucuccggcaccaauggcaccaagagauucgacaaccccgugcugcccuucaacgacgggguguacuuugccagcaccgagaaguccaacaucaucagaggcuggaucuucggcaccacacuggacagcaagacccagagccugcugaucgugaacaacgccaccaacguggucaucaaagugugcgaguuccaguucugcaacgaccccuuccugggcgucuaccacaagaacaacaagagcuggauggaaagcgaguuccggguguacagcagcgccaacaacugcaccuucgaguacgugucccagccuuuccugauggaccuggaaggcaagcagggcaacuucaagaaccugcgcgaguucguguucaagaacaucgacggcuacuucaaaaucuacagcaagcacaccccuaucaaccucgugcgggaucugccucagggcuucucugcucuggaaccccugguggaucugcccaucggcaucaacaucacccgguuucagacacugcuggcccugcacagaagcuaccugacaccuggcgauagcagcagcggauggacagcuggugccgccgcuuacuaugugggcuaccugcagccuagaaccuuccugcugaaguacaacgagaacggcaccaucaccgacgccguggauugugcucuggauccucugagcgagacaaagugcacccugaaguccuucaccguggaaaagggcaucuaccagaccagcaacuuccgggugcagcccaccgaauccaucgugcgguuccccaauaucaccaaucugugccccuucggcgagguguucaaugccaccagauucgccucuguguacgccuggaaccggaagcggaucagcaauugcguggccgacuacuccgugcuguacaacuccgccagcuucagcaccuucaagugcuacggcguguccccuaccaagcugaacgaccugugcuucacaaacguguacgccgacagcuucgugauccggggagaugaagugcggcagauugccccuggacagacaggcaagaucgccgacuacaacuacaagcugcccgacgacuucaccggcugugugauugccuggaacagcaacaaccuggacuccaaagucggcggcaacuacaauuaccuguaccggcuguuccggaaguccaaucugaagcccuucgagcgggacaucagcaccgaaaucuaucaggccggcagcaccccuugcaacggcguggaaggcuucaacugcuacuucccacugcaguccuacggcuuucagcccacauacggcgugggcuaucagcccuacagagugguggugcugagcuucgaacugcugcaugcuccugccacagugugcggcccuaagaaaagcaccaaucucgugaagaacaaaugcgugaacuucaacuucaacggccugaccggcaccggcgugcugacagagagcaacaagaaguuccugccauuccagcaguuuggccgggauaucgacgauaccacagacgccguuagagauccccagacacuggaaauccuggacaucaccccaugcagcuucggcggagugucugugaucaccccuggcaccaacaccagcaaucagguggcagugcuguaccagggcgugaacuguaccgaagugcccguggccauucacgccgaucagcugacaccuacauggcggguguacuccaccggcagcaauguguuucagaccagagccggcugucugaucggagccgagcacgugaacaauagcuacgagugcgacauccccaucggcgcuggcaucugugccagcuaccagacacagacaaacagccacagacgggcuagaagcguggccagccagagcaucauugccuacacaaugucucugggcgccgagaacagcguggccuacuccaacaacucuaucgcuauccccaucaacuucaccaucagcgugaccaccgagauccugccuguguccaugaccaagaccagcguggacugcaccauguacaucugcggcgauuccaccgagugcuccaaccugcugcugcaguacggcagcuucugcacccagcugaauagagcccugacagggaucgccguggaacaggacaagaacacccaagagguguucgcccaagugaagcaaaucuacaagaccccuccuaucaaggacuucggcggcuucaauuucagccagauucugcccgauccuagcaagcccagcaagcggagcuucaucgaggaccugcuguucaacaaagugacacuggccgacgccggcuucaucaagcaguauggcgauugucugggcgacauugccgccagggaucugauuugcgcccagaaguuuaacggacugacagugcugccuccucugcugaccgaugagaugaucgcccaguacacaucugcccugcuggccggcacaaucacaagcggcuggacauuuggagcuggcgccgcucugcagauccccuuugcuaugcagauggccuaccgguucaacggcaucggagugacccagaaugugcuguacgagaaccagaagcugaucgccaaccaguucaacagcgccaucggcaagauccaggacagccugagcagcacagcaagcgcccugggaaagcugcaggacguggucaaccagaaugcccaggcacugaacacccuggucaagcagcuguccuccaacuucggcgccaucagcucugugcugaacgauauccuggccagacuggacaaggucgaggccgaggugcagaucgacagacugaucacaggcagacugcagagccuccagacauacgugacccagcagcugaucagagccgccgagauuagagccucugccaaucuggccgccaccaagaugucugagugugugcugggccagagcaagagaguggacuuuugcggcaagggcuaccaccugaugagcuucccucagucugccccucacggcgugguguuucugcacgugacauaugugcccgcucaagagaagaauuucaccaccgcuccagccaucugccacgacggcaaagcccacuuuccuagagaaggcguguucguguccaacggcacccauugguucgugacacagcggaacuucuacgagccccagaucaucaccacccacaacaccuucgugucuggcaacugcgacguugugaucggcauugugaacaauaccguguacgacccucugcagcccgagcuggacagcuucaaagaggaacuggacaaguacuuuaagaaccacacaagccccgacguggaccugggcgauaucagcggaaucaaugccagcgucgugaacauccagaaagagaucgaccggcugaacgagguggccaagaaucugaacgagagccugaucgaccugcaagaacuggggaaguacgagcaguacaucaaguggcccugguacaucuggcugggcuuuaucgccggacugauugccaucgugauggucacaaucaugcuguguugcaugaccagcugcuguagcugccugaagggcuguuguagcuguggcagcugcugcaaguucgacgaggacgauucugagcccgugcugaagggcgugaaacugcacuacaccugaggacuaguuauaagacugacuagcccgaugggccucccaacgggcccuccuccccuccuugcaccgagauuaauaaaaaaaaaaaaaaaaaaaaaaaaaaaaaaaaaaaaaaaaaaaaaaaaaaaaaaaaaaaaaaaaugcaucccccccccccccccccccccccccccccccaaaggcucuuuucagagccaccagaauu

SEQ ID NO: 23274 - RNA, 4039 nt, Artificial Sequence
  SARS-CoV-2/Wuhan/WIV05/2019__EPI_ISL_402128 spike protein mRNA gc mod (1-1273)(K417N_E484K_N501Y_D614G)
aggagaaagcuuaccauguucguguuucuggugcugcugccccugguguccagccagugugugaaccugaccaccagaacacagcugccuccagccuacaccaacagcuucaccagaggcguguacuaccccgacaagguguucagauccagcgugcugcacucuacccaggaccuguuccugccuuucuucagcaacgugaccugguuccacgccauccacguguccggcaccaauggcaccaagagauucgacaaccccgugcugcccuucaacgacgggguguacuuugccagcaccgagaaguccaacaucaucagaggcuggaucuucggcaccacacuggacagcaagacccagagccugcugaucgugaacaacgccaccaacguggucaucaaagugugcgaguuccaguucugcaacgaccccuuccugggcgucuacuaccacaagaacaacaagagcuggauggaaagcgaguuccggguguacagcagcgccaacaacugcaccuucgaguacgugucccagccuuuccugauggaccuggaaggcaagcagggcaacuucaagaaccugcgcgaguucguguucaagaacaucgacggcuacuucaaaaucuacagcaagcacaccccuaucaaccucgugcgggaucugccucagggcuucucugcucuggaaccccugguggaucugcccaucggcaucaacaucacccgguuucagacacugcuggcccugcacagaagcuaccugacaccuggcgauagcagcagcggauggacagcuggugccgccgcuuacuaugugggcuaccugcagccuagaaccuuccugcugaaguacaacgagaacggcaccaucaccgacgccguggauugugcucuggauccucugagcgagacaaagugcacccugaaguccuucaccguggaaaagggcaucuaccagaccagcaacuuccgggugcagcccaccgaauccaucgugcgguuccccaauaucaccaaucugugccccuucggcgagguguucaaugccaccagauucgccucuguguacgccuggaaccggaagcggaucagcaauugcguggccgacuacuccgugcuguacaacuccgccagcuucagcaccuucaagugcuacggcguguccccuaccaagcugaacgaccugugcuucacaaacguguacgccgacagcuucgugauccggggagaugaagugcggcagauugccccuggacagacaggcaacaucgccgacuacaacuacaagcugcccgacgacuucaccggcugugugauugccuggaacagcaacaaccuggacuccaaagucggcggcaacuacaauuaccuguaccggcuguuccggaaguccaaucugaagcccuucgagcgggacaucagcaccgaaaucuaucaggccggcagcaccccuugcaacggcgugaagggcuucaacugcuacuucccacugcaguccuacggcuuucagcccacauacggcgugggcuaucagcccuacagagugguggugcugagcuucgaacugcugcaugcuccugccacagugugcggcccuaagaaaagcaccaaucucgugaagaacaaaugcgugaacuucaacuucaacggccugaccggcaccggcgugcugacagagagcaacaagaaguuccugccauuccagcaguuuggccgggauaucgccgauaccacagacgccguuagagauccccagacacuggaaauccuggacaucaccccaugcagcuucggcggagugucugugaucaccccuggcaccaacaccagcaaucagguggcagugcuguaccagggcgugaacuguaccgaagugcccguggccauucacgccgaucagcugacaccuacauggcggguguacuccaccggcagcaauguguuucagaccagagccggcugucugaucggagccgagcacgugaacaauagcuacgagugcgacauccccaucggcgcuggcaucugugccagcuaccagacacagacaaacagccccagacgggcuagaagcguggccagccagagcaucauugccuacacaaugucucugggcgccgagaacagcguggccuacuccaacaacucuaucgcuauccccaccaacuucaccaucagcgugaccaccgagauccugccuguguccaugaccaagaccagcguggacugcaccauguacaucugcggcgauuccaccgagugcuccaaccugcugcugcaguacggcagcuucugcacccagcugaauagagcccugacagggaucgccguggaacaggacaagaacacccaagagguguucgcccaagugaagcaaaucuacaagaccccuccuaucaaggacuucggcggcuucaauuucagccagauucugcccgauccuagcaagcccagcaagcggagcuucaucgaggaccugcuguucaacaaagugacacuggccgacgccggcuucaucaagcaguauggcgauugucugggcgacauugccgccagggaucugauuugcgcccagaaguuuaacggacugacagugcugccuccucugcugaccgaugagaugaucgcccaguacacaucugcccugcuggccggcacaaucacaagcggcuggacauuuggagcuggcgccgcucugcagauccccuuugcuaugcagauggccuaccgguucaacggcaucggagugacccagaaugugcuguacgagaaccagaagcugaucgccaaccaguucaacagcgccaucggcaagauccaggacagccugagcagcacagcaagcgcccugggaaagcugcaggacguggucaaccagaaugcccaggcacugaacacccuggucaagcagcuguccuccaacuucggcgccaucagcucugugcugaacgauauccugagcagacuggacaaggucgaggccgaggugcagaucgacagacugaucacaggcagacugcagagccuccagacauacgugacccagcagcugaucagagccgccgagauuagagccucugccaaucuggccgccaccaagaugucugagugugugcugggccagagcaagagaguggacuuuugcggcaagggcuaccaccugaugagcuucccucagucugccccucacggcgugguguuucugcacgugacauaugugcccgcucaagagaagaauuucaccaccgcuccagccaucugccacgacggcaaagcccacuuuccuagagaaggcguguucguguccaacggcacccauugguucgugacacagcggaacuucuacgagccccagaucaucaccaccgacaacaccuucgugucuggcaacugcgacguugugaucggcauugugaacaauaccguguacgacccucugcagcccgagcuggacagcuucaaagaggaacuggacaaguacuuuaagaaccacacaagccccgacguggaccugggcgauaucagcggaaucaaugccagcgucgugaacauccagaaagagaucgaccggcugaacgagguggccaagaaucugaacgagagccugaucgaccugcaagaacuggggaaguacgagcaguacaucaaguggcccugguacaucuggcugggcuuuaucgccggacugauugccaucgugauggucacaaucaugcuguguugcaugaccagcugcuguagcugccugaagggcuguuguagcuguggcagcugcugcaaguucgacgaggacgauucugagcccgugcugaagggcgugaaacugcacuacaccugaggacuaguuauaagacugacuagcccgaugggccucccaacgggcccuccuccccuccuugcaccgagauuaauaaaaaaaaaaaaaaaaaaaaaaaaaaaaaaaaaaaaaaaaaaaaaaaaaaaaaaaaaaaaaaaaugcaucccccccccccccccccccccccccccccccaaaggcucuuuucagagccaccagaauu

SEQ ID NO: 23275 - RNA, 4030 nt, Artificial Sequence
  SARS-CoV-2/Wuhan/WIV05/2019__EPI_ISL_402128 spike protein mRNA gc mod (1-1273)(L18F_D80A_D215G_L242del_A243del_L244del_R246I_K417N_E484 K_N501Y_D614G_A701V)
aggagaaagcuuaccauguucguguuucuggugcugcugccccugguguccagccagugugugaacuucaccaccagaacacagcugccuccagccuacaccaacagcuucaccagaggcguguacuaccccgacaagguguucagauccagcgugcugcacucuacccaggaccuguuccugccuuucuucagcaacgugaccugguuccacgccauccacguguccggcaccaauggcaccaagagauucgccaaccccgugcugcccuucaacgacgggguguacuuugccagcaccgagaaguccaacaucaucagaggcuggaucuucggcaccacacuggacagcaagacccagagccugcugaucgugaacaacgccaccaacguggucaucaaagugugcgaguuccaguucugcaacgaccccuuccugggcgucuacuaccacaagaacaacaagagcuggauggaaagcgaguuccggguguacagcagcgccaacaacugcaccuucgaguacgugucccagccuuuccugauggaccuggaaggcaagcagggcaacuucaagaaccugcgcgaguucguguucaagaacaucgacggcuacuucaaaaucuacagcaagcacaccccuaucaaccucgugcggggccugccucagggcuucucugcucuggaaccccugguggaucugcccaucggcaucaacaucacccgguuucagacacugcacaucagcuaccugacaccuggcgauagcagcagcggauggacagcuggugccgccgcuuacuaugugggcuaccugcagccuagaaccuuccugcugaaguacaacgagaacggcaccaucaccgacgccguggauugugcucuggauccucugagcgagacaaagugcacccugaaguccuucaccguggaaaagggcaucuaccagaccagcaacuuccgggugcagcccaccgaauccaucgugcgguuccccaauaucaccaaucugugccccuucggcgagguguucaaugccaccagauucgccucuguguacgccuggaaccggaagcggaucagcaauugcguggccgacuacuccgugcuguacaacuccgccagcuucagcaccuucaagugcuacggcguguccccuaccaagcugaacgaccugugcuucacaaacguguacgccgacagcuucgugauccggggagaugaagugcggcagauugccccuggacagacaggcaacaucgccgacuacaacuacaagcugcccgacgacuucaccggcugugugauugccuggaacagcaacaaccuggacuccaaagucggcggcaacuacaauuaccuguaccggcuguuccggaaguccaaucugaagcccuucgagcgggacaucagcaccgaaaucuaucaggccggcagcaccccuugcaacggcgugaagggcuucaacugcuacuucccacugcaguccuacggcuuucagcccacauacggcgugggcuaucagcccuacagagugguggugcugagcuucgaacugcugcaugcuccugccacagugugcggcccuaagaaaagcaccaaucucgugaagaacaaaugcgugaacuucaacuucaacggccugaccggcaccggcgugcugacagagagcaacaagaaguuccugccauuccagcaguuuggccgggauaucgccgauaccacagacgccguuagagauccccagacacuggaaauccuggacaucaccccaugcagcuucggcggagugucugugaucaccccuggcaccaacaccagcaaucagguggcagugcuguaccagggcgugaacuguaccgaagugcccguggccauucacgccgaucagcugacaccuacauggcggguguacuccaccggcagcaauguguuucagaccagagccggcugucugaucggagccgagcacgugaacaauagcuacgagugcgacauccccaucggcgcuggcaucugugccagcuaccagacacagacaaacagccccagacgggcuagaagcguggccagccagagcaucauugccuacacaaugucucugggcguggagaacagcguggccuacuccaacaacucuaucgcuauccccaccaacuucaccaucagcgugaccaccgagauccugccuguguccaugaccaagaccagcguggacugcaccauguacaucugcggcgauuccaccgagugcuccaaccugcugcugcaguacggcagcuucugcacccagcugaauagagcccugacagggaucgccguggaacaggacaagaacacccaagagguguucgcccaagugaagcaaaucuacaagaccccuccuaucaaggacuucggcggcuucaauuucagccagauucugcccgauccuagcaagcccagcaagcggagcuucaucgaggaccugcuguucaacaaagugacacuggccgacgccggcuucaucaagcaguauggcgauugucugggcgacauugccgccagggaucugauuugcgcccagaaguuuaacggacugacagugcugccuccucugcugaccgaugagaugaucgcccaguacacaucugcccugcuggccggcacaaucacaagcggcuggacauuuggagcuggcgccgcucugcagauccccuuugcuaugcagauggccuaccgguucaacggcaucggagugacccagaaugugcuguacgagaaccagaagcugaucgccaaccaguucaacagcgccaucggcaagauccaggacagccugagcagcacagcaagcgcccugggaaagcugcaggacguggucaaccagaaugcccaggcacugaacacccuggucaagcagcuguccuccaacuucggcgccaucagcucugugcugaacgauauccugagcagacuggacaaggucgaggccgaggugcagaucgacagacugaucacaggcagacugcagagccuccagacauacgugacccagcagcugaucagagccgccgagauuagagccucugccaaucuggccgccaccaagaugucugagugugugcugggccagagcaagagaguggacuuuugcggcaagggcuaccaccugaugagcuucccucagucugccccucacggcgugguguuucugcacgugacauaugugcccgcucaagagaagaauuucaccaccgcuccagccaucugccacgacggcaaagcccacuuuccuagagaaggcguguucguguccaacggcacccauugguucgugacacagcggaacuucuacgagccccagaucaucaccaccgacaacaccuucgugucuggcaacugcgacguugugaucggcauugugaacaauaccguguacgacccucugcagcccgagcuggacagcuucaaagaggaacuggacaaguacuuuaagaaccacacaagccccgacguggaccugggcgauaucagcggaaucaaugccagcgucgugaacauccagaaagagaucgaccggcugaacgagguggccaagaaucugaacgagagccugaucgaccugcaagaacuggggaaguacgagcaguacaucaaguggcccugguacaucuggcugggcuuuaucgccggacugauugccaucgugauggucacaaucaugcuguguugcaugaccagcugcuguagcugccugaagggcuguuguagcuguggcagcugcugcaaguucgacgaggacgauucugagcccgugcugaagggcgugaaacugcacuacaccugaggacuaguuauaagacugacuagcccgaugggccucccaacgggcccuccuccccuccuugcaccgagauuaauaaaaaaaaaaaaaaaaaaaaaaaaaaaaaaaaaaaaaaaaaaaaaaaaaaaaaaaaaaaaaaaaugcaucccccccccccccccccccccccccccccccaaaggcucuuuucagagccaccagaauu

SEQ ID NO: 23276 - RNA, 4039 nt, Artificial Sequence
  SARS-CoV-2/Wuhan/WIV05/2019__EPI_ISL_402128 spike protein mRNA gc mod (1-1273)(E484K_D614G)
aggagaaagcuuaccauguucguguuucuggugcugcugccccugguguccagccagugugugaaccugaccaccagaacacagcugccuccagccuacaccaacagcuucaccagaggcguguacuaccccgacaagguguucagauccagcgugcugcacucuacccaggaccuguuccugccuuucuucagcaacgugaccugguuccacgccauccacguguccggcaccaauggcaccaagagauucgacaaccccgugcugcccuucaacgacgggguguacuuugccagcaccgagaaguccaacaucaucagaggcuggaucuucggcaccacacuggacagcaagacccagagccugcugaucgugaacaacgccaccaacguggucaucaaagugugcgaguuccaguucugcaacgaccccuuccugggcgucuacuaccacaagaacaacaagagcuggauggaaagcgaguuccggguguacagcagcgccaacaacugcaccuucgaguacgugucccagccuuuccugauggaccuggaaggcaagcagggcaacuucaagaaccugcgcgaguucguguucaagaacaucgacggcuacuucaaaaucuacagcaagcacaccccuaucaaccucgugcgggaucugccucagggcuucucugcucuggaaccccugguggaucugcccaucggcaucaacaucacccgguuucagacacugcuggcccugcacagaagcuaccugacaccuggcgauagcagcagcggauggacagcuggugccgccgcuuacuaugugggcuaccugcagccuagaaccuuccugcugaaguacaacgagaacggcaccaucaccgacgccguggauugugcucuggauccucugagcgagacaaagugcacccugaaguccuucaccguggaaaagggcaucuaccagaccagcaacuuccgggugcagcccaccgaauccaucgugcgguuccccaauaucaccaaucugugccccuucggcgagguguucaaugccaccagauucgccucuguguacgccuggaaccggaagcggaucagcaauugcguggccgacuacuccgugcuguacaacuccgccagcuucagcaccuucaagugcuacggcguguccccuaccaagcugaacgaccugugcuucacaaacguguacgccgacagcuucgugauccggggagaugaagugcggcagauugccccuggacagacaggcaagaucgccgacuacaacuacaagcugcccgacgacuucaccggcugugugauugccuggaacagcaacaaccuggacuccaaagucggcggcaacuacaauuaccuguaccggcuguuccggaaguccaaucugaagcccuucgagcgggacaucagcaccgaaaucuaucaggccggcagcaccccuugcaacggcgugaagggcuucaacugcuacuucccacugcaguccuacggcuuucagcccacaaauggcgugggcuaucagcccuacagagugguggugcugagcuucgaacugcugcaugcuccugccacagugugcggcccuaagaaaagcaccaaucucgugaagaacaaaugcgugaacuucaacuucaacggccugaccggcaccggcgugcugacagagagcaacaagaaguuccugccauuccagcaguuuggccgggauaucgccgauaccacagacgccguuagagauccccagacacuggaaauccuggacaucaccccaugcagcuucggcggagugucugugaucaccccuggcaccaacaccagcaaucagguggcagugcuguaccagggcgugaacuguaccgaagugcccguggccauucacgccgaucagcugacaccuacauggcggguguacuccaccggcagcaauguguuucagaccagagccggcugucugaucggagccgagcacgugaacaauagcuacgagugcgacauccccaucggcgcuggcaucugugccagcuaccagacacagacaaacagccccagacgggcuagaagcguggccagccagagcaucauugccuacacaaugucucugggcgccgagaacagcguggccuacuccaacaacucuaucgcuauccccaccaacuucaccaucagcgugaccaccgagauccugccuguguccaugaccaagaccagcguggacugcaccauguacaucugcggcgauuccaccgagugcuccaaccugcugcugcaguacggcagcuucugcacccagcugaauagagcccugacagggaucgccguggaacaggacaagaacacccaagagguguucgcccaagugaagcaaaucuacaagaccccuccuaucaaggacuucggcggcuucaauuucagccagauucugcccgauccuagcaagcccagcaagcggagcuucaucgaggaccugcuguucaacaaagugacacuggccgacgccggcuucaucaagcaguauggcgauugucugggcgacauugccgccagggaucugauuugcgcccagaaguuuaacggacugacagugcugccuccucugcugaccgaugagaugaucgcccaguacacaucugcccugcuggccggcacaaucacaagcggcuggacauuuggagcuggcgccgcucugcagauccccuuugcuaugcagauggccuaccgguucaacggcaucggagugacccagaaugugcuguacgagaaccagaagcugaucgccaaccaguucaacagcgccaucggcaagauccaggacagccugagcagcacagcaagcgcccugggaaagcugcaggacguggucaaccagaaugcccaggcacugaacacccuggucaagcagcuguccuccaacuucggcgccaucagcucugugcugaacgauauccugagcagacuggacaaggucgaggccgaggugcagaucgacagacugaucacaggcagacugcagagccuccagacauacgugacccagcagcugaucagagccgccgagauuagagccucugccaaucuggccgccaccaagaugucugagugugugcugggccagagcaagagaguggacuuuugcggcaagggcuaccaccugaugagcuucccucagucugccccucacggcgugguguuucugcacgugacauaugugcccgcucaagagaagaauuucaccaccgcuccagccaucugccacgacggcaaagcccacuuuccuagagaaggcguguucguguccaacggcacccauugguucgugacacagcggaacuucuacgagccccagaucaucaccaccgacaacaccuucgugucuggcaacugcgacguugugaucggcauugugaacaauaccguguacgacccucugcagcccgagcuggacagcuucaaagaggaacuggacaaguacuuuaagaaccacacaagccccgacguggaccugggcgauaucagcggaaucaaugccagcgucgugaacauccagaaagagaucgaccggcugaacgagguggccaagaaucugaacgagagccugaucgaccugcaagaacuggggaaguacgagcaguacaucaaguggcccugguacaucuggcugggcuuuaucgccggacugauugccaucgugauggucacaaucaugcuguguugcaugaccagcugcuguagcugccugaagggcuguuguagcuguggcagcugcugcaaguucgacgaggacgauucugagcccgugcugaagggcgugaaacugcacuacaccugaggacuaguuauaagacugacuagcccgaugggccucccaacgggcccuccuccccuccuugcaccgagauuaauaaaaaaaaaaaaaaaaaaaaaaaaaaaaaaaaaaaaaaaaaaaaaaaaaaaaaaaaaaaaaaaaugcaucccccccccccccccccccccccccccccccaaaggcucuuuucagagccaccagaauu

SEQ ID NO: 23277 - RNA, 4039 nt, Artificial Sequence
  SARS-CoV-2/Wuhan/WIV05/2019__EPI_ISL_402128 spike protein mRNA gc mod (1-1273)(L18F_T20N_P26S_D138Y_R190S_K417T_E484K_N501Y_D614G_H655Y _T1027I)
aggagaaagcuuaccauguucguguuucuggugcugcugccccugguguccagccagugugugaacuucaccaacagaacacagcugccuagcgccuacaccaacagcuucaccagaggcguguacuaccccgacaagguguucagauccagcgugcugcacucuacccaggaccuguuccugccuuucuucagcaacgugaccugguuccacgccauccacguguccggcaccaauggcaccaagagauucgacaaccccgugcugcccuucaacgacgggguguacuuugccagcaccgagaaguccaacaucaucagaggcuggaucuucggcaccacacuggacagcaagacccagagccugcugaucgugaacaacgccaccaacguggucaucaaagugugcgaguuccaguucugcaacuaccccuuccugggcgucuacuaccacaagaacaacaagagcuggauggaaagcgaguuccggguguacagcagcgccaacaacugcaccuucgaguacgugucccagccuuuccugauggaccuggaaggcaagcagggcaacuucaagaaccugagcgaguucguguucaagaacaucgacggcuacuucaaaaucuacagcaagcacaccccuaucaaccucgugcgggaucugccucagggcuucucugcucuggaaccccugguggaucugcccaucggcaucaacaucacccgguuucagacacugcuggcccugcacagaagcuaccugacaccuggcgauagcagcagcggauggacagcuggugccgccgcuuacuaugugggcuaccugcagccuagaaccuuccugcugaaguacaacgagaacggcaccaucaccgacgccguggauugugcucuggauccucugagcgagacaaagugcacccugaaguccuucaccguggaaaagggcaucuaccagaccagcaacuuccgggugcagcccaccgaauccaucgugcgguuccccaauaucaccaaucugugccccuucggcgagguguucaaugccaccagauucgccucuguguacgccuggaaccggaagcggaucagcaauugcguggccgacuacuccgugcuguacaacuccgccagcuucagcaccuucaagugcuacggcguguccccuaccaagcugaacgaccugugcuucacaaacguguacgccgacagcuucgugauccggggagaugaagugcggcagauugccccuggacagacaggcaccaucgccgacuacaacuacaagcugcccgacgacuucaccggcugugugauugccuggaacagcaacaaccuggacuccaaagucggcggcaacuacaauuaccuguaccggcuguuccggaaguccaaucugaagcccuucgagcgggacaucagcaccgaaaucuaucaggccggcagcaccccuugcaacggcgugaagggcuucaacugcuacuucccacugcaguccuacggcuuucagcccacauacggcgugggcuaucagcccuacagagugguggugcugagcuucgaacugcugcaugcuccugccacagugugcggcccuaagaaaagcaccaaucucgugaagaacaaaugcgugaacuucaacuucaacggccugaccggcaccggcgugcugacagagagcaacaagaaguuccugccauuccagcaguuuggccgggauaucgccgauaccacagacgccguuagagauccccagacacuggaaauccuggacaucaccccaugcagcuucggcggagugucugugaucaccccuggcaccaacaccagcaaucagguggcagugcuguaccagggcgugaacuguaccgaagugcccguggccauucacgccgaucagcugacaccuacauggcggguguacuccaccggcagcaauguguuucagaccagagccggcugucugaucggagccgaguacgugaacaauagcuacgagugcgacauccccaucggcgcuggcaucugugccagcuaccagacacagacaaacagccccagacgggcuagaagcguggccagccagagcaucauugccuacacaaugucucugggcgccgagaacagcguggccuacuccaacaacucuaucgcuauccccaccaacuucaccaucagcgugaccaccgagauccugccuguguccaugaccaagaccagcguggacugcaccauguacaucugcggcgauuccaccgagugcuccaaccugcugcugcaguacggcagcuucugcacccagcugaauagagcccugacagggaucgccguggaacaggacaagaacacccaagagguguucgcccaagugaagcaaaucuacaagaccccuccuaucaaggacuucggcggcuucaauuucagccagauucugcccgauccuagcaagcccagcaagcggagcuucaucgaggaccugcuguucaacaaagugacacuggccgacgccggcuucaucaagcaguauggcgauugucugggcgacauugccgccagggaucugauuugcgcccagaaguuuaacggacugacagugcugccuccucugcugaccgaugagaugaucgcccaguacacaucugcccugcuggccggcacaaucacaagcggcuggacauuuggagcuggcgccgcucugcagauccccuuugcuaugcagauggccuaccgguucaacggcaucggagugacccagaaugugcuguacgagaaccagaagcugaucgccaaccaguucaacagcgccaucggcaagauccaggacagccugagcagcacagcaagcgcccugggaaagcugcaggacguggucaaccagaaugcccaggcacugaacacccuggucaagcagcuguccuccaacuucggcgccaucagcucugugcugaacgauauccugagcagacuggacaaggucgaggccgaggugcagaucgacagacugaucacaggcagacugcagagccuccagacauacgugacccagcagcugaucagagccgccgagauuagagccucugccaaucuggccgccaucaagaugucugagugugugcugggccagagcaagagaguggacuuuugcggcaagggcuaccaccugaugagcuucccucagucugccccucacggcgugguguuucugcacgugacauaugugcccgcucaagagaagaauuucaccaccgcuccagccaucugccacgacggcaaagcccacuuuccuagagaaggcguguucguguccaacggcacccauugguucgugacacagcggaacuucuacgagccccagaucaucaccaccgacaacaccuucgugucuggcaacugcgacguugugaucggcauugugaacaauaccguguacgacccucugcagcccgagcuggacagcuucaaagaggaacuggacaaguacuuuaagaaccacacaagccccgacguggaccugggcgauaucagcggaaucaaugccagcgucgugaacauccagaaagagaucgaccggcugaacgagguggccaagaaucugaacgagagccugaucgaccugcaagaacuggggaaguacgagcaguacaucaaguggcccugguacaucuggcugggcuuuaucgccggacugauugccaucgugauggucacaaucaugcuguguugcaugaccagcugcuguagcugccugaagggcuguuguagcuguggcagcugcugcaaguucgacgaggacgauucugagcccgugcugaagggcgugaaacugcacuacaccugaggacuaguuauaagacugacuagcccgaugggccucccaacgggcccuccuccccuccuugcaccgagauuaauaaaaaaaaaaaaaaaaaaaaaaaaaaaaaaaaaaaaaaaaaaaaaaaaaaaaaaaaaaaaaaaaugcaucccccccccccccccccccccccccccccccaaaggcucuuuucagagccaccagaauu

SEQ ID NO: 23278 - RNA, 4039 nt, Artificial Sequence
  SARS-CoV-2/Wuhan/WIV05/2019__EPI_ISL_402128 spike protein mRNA gc mod (1-1273)(S13I_W152C_L452R_D614G)
aggagaaagcuuaccauguucguguuucuggugcugcugccccugguguccauccagugugugaaccugaccaccagaacacagcugccuccagccuacaccaacagcuucaccagaggcguguacuaccccgacaagguguucagauccagcgugcugcacucuacccaggaccuguuccugccuuucuucagcaacgugaccugguuccacgccauccacguguccggcaccaauggcaccaagagauucgacaaccccgugcugcccuucaacgacgggguguacuuugccagcaccgagaaguccaacaucaucagaggcuggaucuucggcaccacacuggacagcaagacccagagccugcugaucgugaacaacgccaccaacguggucaucaaagugugcgaguuccaguucugcaacgaccccuuccugggcgucuacuaccacaagaacaacaagagcugcauggaaagcgaguuccggguguacagcagcgccaacaacugcaccuucgaguacgugucccagccuuuccugauggaccuggaaggcaagcagggcaacuucaagaaccugcgcgaguucguguucaagaacaucgacggcuacuucaaaaucuacagcaagcacaccccuaucaaccucgugcgggaucugccucagggcuucucugcucuggaaccccugguggaucugcccaucggcaucaacaucacccgguuucagacacugcuggcccugcacagaagcuaccugacaccuggcgauagcagcagcggauggacagcuggugccgccgcuuacuaugugggcuaccugcagccuagaaccuuccugcugaaguacaacgagaacggcaccaucaccgacgccguggauugugcucuggauccucugagcgagacaaagugcacccugaaguccuucaccguggaaaagggcaucuaccagaccagcaacuuccgggugcagcccaccgaauccaucgugcgguuccccaauaucaccaaucugugccccuucggcgagguguucaaugccaccagauucgccucuguguacgccuggaaccggaagcggaucagcaauugcguggccgacuacuccgugcuguacaacuccgccagcuucagcaccuucaagugcuacggcguguccccuaccaagcugaacgaccugugcuucacaaacguguacgccgacagcuucgugauccggggagaugaagugcggcagauugccccuggacagacaggcaagaucgccgacuacaacuacaagcugcccgacgacuucaccggcugugugauugccuggaacagcaacaaccuggacuccaaagucggcggcaacuacaauuaccgcuaccggcuguuccggaaguccaaucugaagcccuucgagcgggacaucagcaccgaaaucuaucaggccggcagcaccccuugcaacggcguggaaggcuucaacugcuacuucccacugcaguccuacggcuuucagcccacaaauggcgugggcuaucagcccuacagagugguggugcugagcuucgaacugcugcaugcuccugccacagugugcggcccuaagaaaagcaccaaucucgugaagaacaaaugcgugaacuucaacuucaacggccugaccggcaccggcgugcugacagagagcaacaagaaguuccugccauuccagcaguuuggccgggauaucgccgauaccacagacgccguuagagauccccagacacuggaaauccuggacaucaccccaugcagcuucggcggagugucugugaucaccccuggcaccaacaccagcaaucagguggcagugcuguaccagggcgugaacuguaccgaagugcccguggccauucacgccgaucagcugacaccuacauggcggguguacuccaccggcagcaauguguuucagaccagagccggcugucugaucggagccgagcacgugaacaauagcuacgagugcgacauccccaucggcgcuggcaucugugccagcuaccagacacagacaaacagccccagacgggcuagaagcguggccagccagagcaucauugccuacacaaugucucugggcgccgagaacagcguggccuacuccaacaacucuaucgcuauccccaccaacuucaccaucagcgugaccaccgagauccugccuguguccaugaccaagaccagcguggacugcaccauguacaucugcggcgauuccaccgagugcuccaaccugcugcugcaguacggcagcuucugcacccagcugaauagagcccugacagggaucgccguggaacaggacaagaacacccaagagguguucgcccaagugaagcaaaucuacaagaccccuccuaucaaggacuucggcggcuucaauuucagccagauucugcccgauccuagcaagcccagcaagcggagcuucaucgaggaccugcuguucaacaaagugacacuggccgacgccggcuucaucaagcaguauggcgauugucugggcgacauugccgccagggaucugauuugcgcccagaaguuuaacggacugacagugcugccuccucugcugaccgaugagaugaucgcccaguacacaucugcccugcuggccggcacaaucacaagcggcuggacauuuggagcuggcgccgcucugcagauccccuuugcuaugcagauggccuaccgguucaacggcaucggagugacccagaaugugcuguacgagaaccagaagcugaucgccaaccaguucaacagcgccaucggcaagauccaggacagccugagcagcacagcaagcgcccugggaaagcugcaggacguggucaaccagaaugcccaggcacugaacacccuggucaagcagcuguccuccaacuucggcgccaucagcucugugcugaacgauauccugagcagacuggacaaggucgaggccgaggugcagaucgacagacugaucacaggcagacugcagagccuccagacauacgugacccagcagcugaucagagccgccgagauuagagccucugccaaucuggccgccaccaagaugucugagugugugcugggccagagcaagagaguggacuuuugcggcaagggcuaccaccugaugagcuucccucagucugccccucacggcgugguguuucugcacgugacauaugugcccgcucaagagaagaauuucaccaccgcuccagccaucugccacgacggcaaagcccacuuuccuagagaaggcguguucguguccaacggcacccauugguucgugacacagcggaacuucuacgagccccagaucaucaccaccgacaacaccuucgugucuggcaacugcgacguugugaucggcauugugaacaauaccguguacgacccucugcagcccgagcuggacagcuucaaagaggaacuggacaaguacuuuaagaaccacacaagccccgacguggaccugggcgauaucagcggaaucaaugccagcgucgugaacauccagaaagagaucgaccggcugaacgagguggccaagaaucugaacgagagccugaucgaccugcaagaacuggggaaguacgagcaguacaucaaguggcccugguacaucuggcugggcuuuaucgccggacugauugccaucgugauggucacaaucaugcuguguugcaugaccagcugcuguagcugccugaagggcuguuguagcuguggcagcugcugcaaguucgacgaggacgauucugagcccgugcugaagggcgugaaacugcacuacaccugaggacuaguuauaagacugacuagcccgaugggccucccaacgggcccuccuccccuccuugcaccgagauuaauaaaaaaaaaaaaaaaaaaaaaaaaaaaaaaaaaaaaaaaaaaaaaaaaaaaaaaaaaaaaaaaaugcaucccccccccccccccccccccccccccccccaaaggcucuuuucagagccaccagaauu

SEQ ID NO: 23279 - RNA, 4039 nt, Artificial Sequence
  SARS-CoV-2/Wuhan/WIV05/2019__EPI_ISL_402128 spike protein mRNA gc mod (1-1273)
aggagaaagcuuaccauguucguguuccuggugcugcugccucugguguccagccagugugugaaccugaccaccagaacacagcugccuccagccuacaccaacagcuuuaccagaggcguguacuaccccgacaagguguucagauccagcgugcugcacucuacccaggaccuguuccugccuuucuucagcaacgugaccugguuccacgccauccacguguccggcaccaauggcaccaagagauucgacaaccccgugcugcccuucaacgacgggguguacuuugccagcaccgagaaguccaacaucaucagaggcuggaucuucggcaccacacuggacagcaagacccagagccugcugaucgugaacaacgccaccaacguggucaucaaagugugcgaguuccaguucugcaacgaccccuuccugggcgucuacuaccacaagaacaacaagagcuggauggaaagcgaguuccggguguacagcagcgccaacaacugcaccuucgaguacgugucccagccuuuccugauggaccuggaaggcaagcagggcaacuucaagaaccugcgcgaguucguguuuaagaacaucgacggcuacuucaagaucuacagcaagcacaccccuaucaaccucgugcgggaucugccucagggcuucucugcucuggaaccccugguggaucugcccaucggcaucaacaucacccgguuucagacacugcuggcccugcacagaagcuaccugacaccuggcgauagcagcagcggauggacagcuggugccgccgcuuacuaugugggcuaccugcagccuagaaccuuccugcugaaguacaacgagaacggcaccaucaccgacgccguggauugugcucuggauccucugagcgagacaaagugcacccugaaguccuucaccguggaaaagggcaucuaccagaccagcaacuuccgggugcagcccaccgaauccaucgugcgguuccccaauaucaccaaucugugccccuucggcgagguguucaaugccaccagauucgccucuguguacgccuggaaccggaagcggaucagcaauugcguggccgacuacuccgugcuguacaacuccgccagcuucagcaccuucaagugcuacggcguguccccuaccaagcugaacgaccugugcuucacaaacguguacgccgacagcuucgugauccggggagaugaagugcggcagauugccccuggacagacaggcaagaucgccgacuacaacuacaagcugcccgacgacuucaccggcugugugauugccuggaacagcaacaaccuggacuccaaagucggcggcaacuacaauuaccuguaccggcuguuccggaaguccaaucugaagcccuucgagcgggacaucuccaccgagaucuaucaggccggcagcaccccuuguaacggcguggaaggcuucaacugcuacuucccacugcaguccuacggcuuucagcccacaaauggcgugggcuaucagcccuacagagugguggugcugagcuucgaacugcugcaugccccugccacagugugcggcccuaagaaaagcaccaaucucgugaagaacaaaugcgugaacuucaacuucaacggccugaccggcaccggcgugcugacagagagcaacaagaaguuccugccauuccagcaguuuggccgggauaucgccgauaccacagacgccguuagagauccccagacacuggaaauccuggacaucaccccuugcagcuucggcggagugucugugaucaccccuggcaccaacaccagcaaucagguggcagugcuguaccaggacgugaacuguaccgaagugcccguggccauucacgccgaucagcugacaccuacauggcggguguacuccaccggcagcaauguguuucagaccagagccggcugucugaucggagccgagcacgugaacaauagcuacgagugcgacauccccaucggcgcuggaaucugcgccagcuaccagacacagacaaacagcccucggagagccagaagcguggccagccagagcaucauugccuacacaaugucucugggcgccgagaacagcguggccuacuccaacaacucuaucgcuauccccaccaacuucaccaucagcgugaccacagagauccugccuguguccaugaccaagaccagcguggacugcaccauguacaucugcggcgauuccaccgagugcuccaaccugcugcugcaguacggcagcuucugcacccagcugaauagagcccugacagggaucgccguggaacaggacaagaacacccaagagguguucgcccaagugaagcagaucuacaagaccccuccuaucaaggacuucggcggcuucaauuucagccagauucugcccgauccuagcaagcccagcaagcggagcuucaucgaggaccugcuguucaacaaagugacacuggccgacgccggcuucaucaagcaguauggcgauugucugggcgacauugccgccagggaucugauuugcgcccagaaguuuaacggacugacagugcugccuccucugcugaccgaugagaugaucgcccaguacacaucugcccugcuggccggcacaaucacaagcggcuggacauuuggagcaggcgccgcucugcagauccccuuugcuaugcagauggccuaccgguucaacggcaucggagugacccagaaugugcuguacgagaaccagaagcugaucgccaaccaguucaacagcgccaucggcaagauccaggacagccugagcagcacagcaagcgcccugggaaagcugcaggacguggucaaccagaaugcccaggcacugaacacccuggucaagcagcuguccuccaacuucggcgccaucagcucugugcugaacgauauccugagcagacuggacaaggucgaggccgaggugcagaucgacagacugaucacaggcagacugcagagccuccagacauacgugacccagcagcugaucagagccgccgagauuagagccucugccaaucuggccgccaccaagaugucugagugugugcugggccagagcaagagaguggacuuuugcggcaagggcuaccaccugaugagcuucccucagucugccccucacggcgugguguuucugcacgugacauaugugcccgcucaagagaagaauuucaccaccgcuccagccaucugccacgacggcaaagcccacuuuccuagagaaggcguguucguguccaacggcacccauugguucgugacacagcggaacuucuacgagccccagaucaucaccaccgacaacaccuucgugucuggcaacugcgacgucgugaucggcauugugaacaauaccguguacgacccucugcagcccgagcuggacagcuucaaagaggaacuggacaaguacuuuaagaaccacacaagccccgacguggaccugggcgauaucagcggaaucaaugccagcgucgugaacauccagaaagagaucgaccggcugaacgagguggccaagaaucugaacgagagccugaucgaccugcaagaacuggggaaguacgagcaguacaucaaguggcccugguacaucuggcugggcuuuaucgccggacugauugccaucgugauggucacaaucaugcuguguugcaugaccagcugcuguagcugccugaagggcuguuguagcuguggcagcugcugcaaguucgacgaggacgauucugagcccgugcugaagggcgugaaacugcacuacacaugaggacuaguuauaagacugacuagcccgaugggccucccaacgggcccuccuccccuccuugcaccgagauuaauaaaaaaaaaaaaaaaaaaaaaaaaaaaaaaaaaaaaaaaaaaaaaaaaaaaaaaaaaaaaaaaaugcaucccccccccccccccccccccccccccccccaaaggcucuuuucagagccaccagaauu

SEQ ID NO: 23280 - RNA, 4039 nt, Artificial Sequence
  SARS-CoV-2/Wuhan/WIV05/2019__EPI_ISL_402128 spike protein mRNA gc mod (1-1273)(D614G)
aggagaaagcuuaccauguucguguuccuggugcugcugccucugguguccagccagugugugaaccugaccaccagaacacagcugccuccagccuacaccaacagcuuuaccagaggcguguacuaccccgacaagguguucagauccagcgugcugcacucuacccaggaccuguuccugccuuucuucagcaacgugaccugguuccacgccauccacguguccggcaccaauggcaccaagagauucgacaaccccgugcugcccuucaacgacgggguguacuuugccagcaccgagaaguccaacaucaucagaggcuggaucuucggcaccacacuggacagcaagacccagagccugcugaucgugaacaacgccaccaacguggucaucaaagugugcgaguuccaguucugcaacgaccccuuccugggcgucuacuaccacaagaacaacaagagcuggauggaaagcgaguuccggguguacagcagcgccaacaacugcaccuucgaguacgugucccagccuuuccugauggaccuggaaggcaagcagggcaacuucaagaaccugcgcgaguucguguuuaagaacaucgacggcuacuucaagaucuacagcaagcacaccccuaucaaccucgugcgggaucugccucagggcuucucugcucuggaaccccugguggaucugcccaucggcaucaacaucacccgguuucagacacugcuggcccugcacagaagcuaccugacaccuggcgauagcagcagcggauggacagcuggugccgccgcuuacuaugugggcuaccugcagccuagaaccuuccugcugaaguacaacgagaacggcaccaucaccgacgccguggauugugcucuggauccucugagcgagacaaagugcacccugaaguccuucaccguggaaaagggcaucuaccagaccagcaacuuccgggugcagcccaccgaauccaucgugcgguuccccaauaucaccaaucugugccccuucggcgagguguucaaugccaccagauucgccucuguguacgccuggaaccggaagcggaucagcaauugcguggccgacuacuccgugcuguacaacuccgccagcuucagcaccuucaagugcuacggcguguccccuaccaagcugaacgaccugugcuucacaaacguguacgccgacagcuucgugauccggggagaugaagugcggcagauugccccuggacagacaggcaagaucgccgacuacaacuacaagcugcccgacgacuucaccggcugugugauugccuggaacagcaacaaccuggacuccaaagucggcggcaacuacaauuaccuguaccggcuguuccggaaguccaaucugaagcccuucgagcgggacaucuccaccgagaucuaucaggccggcagcaccccuuguaacggcguggaaggcuucaacugcuacuucccacugcaguccuacggcuuucagcccacaaauggcgugggcuaucagcccuacagagugguggugcugagcuucgaacugcugcaugccccugccacagugugcggcccuaagaaaagcaccaaucucgugaagaacaaaugcgugaacuucaacuucaacggccugaccggcaccggcgugcugacagagagcaacaagaaguuccugccauuccagcaguuuggccgggauaucgccgauaccacagacgccguuagagauccccagacacuggaaauccuggacaucaccccuugcagcuucggcggagugucugugaucaccccuggcaccaacaccagcaaucagguggcagugcuguaccagggcgugaacuguaccgaagugcccguggccauucacgccgaucagcugacaccuacauggcggguguacuccaccggcagcaauguguuucagaccagagccggcugucugaucggagccgagcacgugaacaauagcuacgagugcgacauccccaucggcgcuggaaucugcgccagcuaccagacacagacaaacagcccucggagagccagaagcguggccagccagagcaucauugccuacacaaugucucugggcgccgagaacagcguggccuacuccaacaacucuaucgcuauccccaccaacuucaccaucagcgugaccacagagauccugccuguguccaugaccaagaccagcguggacugcaccauguacaucugcggcgauuccaccgagugcuccaaccugcugcugcaguacggcagcuucugcacccagcugaauagagcccugacagggaucgccguggaacaggacaagaacacccaagagguguucgcccaagugaagcagaucuacaagaccccuccuaucaaggacuucggcggcuucaauuucagccagauucugcccgauccuagcaagcccagcaagcggagcuucaucgaggaccugcuguucaacaaagugacacuggccgacgccggcuucaucaagcaguauggcgauugucugggcgacauugccgccagggaucugauuugcgcccagaaguuuaacggacugacagugcugccuccucugcugaccgaugagaugaucgcccaguacacaucugcccugcuggccggcacaaucacaagcggcuggacauuuggagcaggcgccgcucugcagauccccuuugcuaugcagauggccuaccgguucaacggcaucggagugacccagaaugugcuguacgagaaccagaagcugaucgccaaccaguucaacagcgccaucggcaagauccaggacagccugagcagcacagcaagcgcccugggaaagcugcaggacguggucaaccagaaugcccaggcacugaacacccuggucaagcagcuguccuccaacuucggcgccaucagcucugugcugaacgauauccugagcagacuggacaaggucgaggccgaggugcagaucgacagacugaucacaggcagacugcagagccuccagacauacgugacccagcagcugaucagagccgccgagauuagagccucugccaaucuggccgccaccaagaugucugagugugugcugggccagagcaagagaguggacuuuugcggcaagggcuaccaccugaugagcuucccucagucugccccucacggcgugguguuucugcacgugacauaugugcccgcucaagagaagaauuucaccaccgcuccagccaucugccacgacggcaaagcccacuuuccuagagaaggcguguucguguccaacggcacccauugguucgugacacagcggaacuucuacgagccccagaucaucaccaccgacaacaccuucgugucuggcaacugcgacgucgugaucggcauugugaacaauaccguguacgacccucugcagcccgagcuggacagcuucaaagaggaacuggacaaguacuuuaagaaccacacaagccccgacguggaccugggcgauaucagcggaaucaaugccagcgucgugaacauccagaaagagaucgaccggcugaacgagguggccaagaaucugaacgagagccugaucgaccugcaagaacuggggaaguacgagcaguacaucaaguggcccugguacaucuggcugggcuuuaucgccggacugauugccaucgugauggucacaaucaugcuguguugcaugaccagcugcuguagcugccugaagggcuguuguagcuguggcagcugcugcaaguucgacgaggacgauucugagcccgugcugaagggcgugaaacugcacuacacaugaggacuaguuauaagacugacuagcccgaugggccucccaacgggcccuccuccccuccuugcaccgagauuaauaaaaaaaaaaaaaaaaaaaaaaaaaaaaaaaaaaaaaaaaaaaaaaaaaaaaaaaaaaaaaaaaugcaucccccccccccccccccccccccccccccccaaaggcucuuuucagagccaccagaauu

SEQ ID NO: 23281 - RNA, 4039 nt, Artificial Sequence
  SARS-CoV-2/Wuhan/WIV05/2019__EPI_ISL_402128 spike protein mRNA gc mod (1-1273)(A222V_D614G)
aggagaaagcuuaccauguucguguuccuggugcugcugccucugguguccagccagugugugaaccugaccaccagaacacagcugccuccagccuacaccaacagcuuuaccagaggcguguacuaccccgacaagguguucagauccagcgugcugcacucuacccaggaccuguuccugccuuucuucagcaacgugaccugguuccacgccauccacguguccggcaccaauggcaccaagagauucgacaaccccgugcugcccuucaacgacgggguguacuuugccagcaccgagaaguccaacaucaucagaggcuggaucuucggcaccacacuggacagcaagacccagagccugcugaucgugaacaacgccaccaacguggucaucaaagugugcgaguuccaguucugcaacgaccccuuccugggcgucuacuaccacaagaacaacaagagcuggauggaaagcgaguuccggguguacagcagcgccaacaacugcaccuucgaguacgugucccagccuuuccugauggaccuggaaggcaagcagggcaacuucaagaaccugcgcgaguucguguuuaagaacaucgacggcuacuucaagaucuacagcaagcacaccccuaucaaccucgugcgggaucugccucagggcuucucugugcuggaaccccugguggaucugcccaucggcaucaacaucacccgguuucagacacugcuggcccugcacagaagcuaccugacaccuggcgauagcagcagcggauggacagcuggugccgccgcuuacuaugugggcuaccugcagccuagaaccuuccugcugaaguacaacgagaacggcaccaucaccgacgccguggauugugcucuggauccucugagcgagacaaagugcacccugaaguccuucaccguggaaaagggcaucuaccagaccagcaacuuccgggugcagcccaccgaauccaucgugcgguuccccaauaucaccaaucugugccccuucggcgagguguucaaugccaccagauucgccucuguguacgccuggaaccggaagcggaucagcaauugcguggccgacuacuccgugcuguacaacuccgccagcuucagcaccuucaagugcuacggcguguccccuaccaagcugaacgaccugugcuucacaaacguguacgccgacagcuucgugauccggggagaugaagugcggcagauugccccuggacagacaggcaagaucgccgacuacaacuacaagcugcccgacgacuucaccggcugugugauugccuggaacagcaacaaccuggacuccaaagucggcggcaacuacaauuaccuguaccggcuguuccggaaguccaaucugaagcccuucgagcgggacaucuccaccgagaucuaucaggccggcagcaccccuuguaacggcguggaaggcuucaacugcuacuucccacugcaguccuacggcuuucagcccacaaauggcgugggcuaucagcccuacagagugguggugcugagcuucgaacugcugcaugccccugccacagugugcggcccuaagaaaagcaccaaucucgugaagaacaaaugcgugaacuucaacuucaacggccugaccggcaccggcgugcugacagagagcaacaagaaguuccugccauuccagcaguuuggccgggauaucgccgauaccacagacgccguuagagauccccagacacuggaaauccuggacaucaccccuugcagcuucggcggagugucugugaucaccccuggcaccaacaccagcaaucagguggcagugcuguaccagggcgugaacuguaccgaagugcccguggccauucacgccgaucagcugacaccuacauggcggguguacuccaccggcagcaauguguuucagaccagagccggcugucugaucggagccgagcacgugaacaauagcuacgagugcgacauccccaucggcgcuggaaucugcgccagcuaccagacacagacaaacagcccucggagagccagaagcguggccagccagagcaucauugccuacacaaugucucugggcgccgagaacagcguggccuacuccaacaacucuaucgcuauccccaccaacuucaccaucagcgugaccacagagauccugccuguguccaugaccaagaccagcguggacugcaccauguacaucugcggcgauuccaccgagugcuccaaccugcugcugcaguacggcagcuucugcacccagcugaauagagcccugacagggaucgccguggaacaggacaagaacacccaagagguguucgcccaagugaagcagaucuacaagaccccuccuaucaaggacuucggcggcuucaauuucagccagauucugcccgauccuagcaagcccagcaagcggagcuucaucgaggaccugcuguucaacaaagugacacuggccgacgccggcuucaucaagcaguauggcgauugucugggcgacauugccgccagggaucugauuugcgcccagaaguuuaacggacugacagugcugccuccucugcugaccgaugagaugaucgcccaguacacaucugcccugcuggccggcacaaucacaagcggcuggacauuuggagcaggcgccgcucugcagauccccuuugcuaugcagauggccuaccgguucaacggcaucggagugacccagaaugugcuguacgagaaccagaagcugaucgccaaccaguucaacagcgccaucggcaagauccaggacagccugagcagcacagcaagcgcccugggaaagcugcaggacguggucaaccagaaugcccaggcacugaacacccuggucaagcagcuguccuccaacuucggcgccaucagcucugugcugaacgauauccugagcagacuggacaaggucgaggccgaggugcagaucgacagacugaucacaggcagacugcagagccuccagacauacgugacccagcagcugaucagagccgccgagauuagagccucugccaaucuggccgccaccaagaugucugagugugugcugggccagagcaagagaguggacuuuugcggcaagggcuaccaccugaugagcuucccucagucugccccucacggcgugguguuucugcacgugacauaugugcccgcucaagagaagaauuucaccaccgcuccagccaucugccacgacggcaaagcccacuuuccuagagaaggcguguucguguccaacggcacccauugguucgugacacagcggaacuucuacgagccccagaucaucaccaccgacaacaccuucgugucuggcaacugcgacgucgugaucggcauugugaacaauaccguguacgacccucugcagcccgagcuggacagcuucaaagaggaacuggacaaguacuuuaagaaccacacaagccccgacguggaccugggcgauaucagcggaaucaaugccagcgucgugaacauccagaaagagaucgaccggcugaacgagguggccaagaaucugaacgagagccugaucgaccugcaagaacuggggaaguacgagcaguacaucaaguggcccugguacaucuggcugggcuuuaucgccggacugauugccaucgugauggucacaaucaugcuguguugcaugaccagcugcuguagcugccugaagggcuguuguagcuguggcagcugcugcaaguucgacgaggacgauucugagcccgugcugaagggcgugaaacugcacuacacaugaggacuaguuauaagacugacuagcccgaugggccucccaacgggcccuccuccccuccuugcaccgagauuaauaaaaaaaaaaaaaaaaaaaaaaaaaaaaaaaaaaaaaaaaaaaaaaaaaaaaaaaaaaaaaaaaugcaucccccccccccccccccccccccccccccccaaaggcucuuuucagagccaccagaauu

SEQ ID NO: 23282 - RNA, 4039 nt, Artificial Sequence
  SARS-CoV-2/Wuhan/WIV05/2019__EPI_ISL_402128 spike protein mRNA gc mod (1-1273)(N439K_D614G)
aggagaaagcuuaccauguucguguuccuggugcugcugccucugguguccagccagugugugaaccugaccaccagaacacagcugccuccagccuacaccaacagcuuuaccagaggcguguacuaccccgacaagguguucagauccagcgugcugcacucuacccaggaccuguuccugccuuucuucagcaacgugaccugguuccacgccauccacguguccggcaccaauggcaccaagagauucgacaaccccgugcugcccuucaacgacgggguguacuuugccagcaccgagaaguccaacaucaucagaggcuggaucuucggcaccacacuggacagcaagacccagagccugcugaucgugaacaacgccaccaacguggucaucaaagugugcgaguuccaguucugcaacgaccccuuccugggcgucuacuaccacaagaacaacaagagcuggauggaaagcgaguuccggguguacagcagcgccaacaacugcaccuucgaguacgugucccagccuuuccugauggaccuggaaggcaagcagggcaacuucaagaaccugcgcgaguucguguuuaagaacaucgacggcuacuucaagaucuacagcaagcacaccccuaucaaccucgugcgggaucugccucagggcuucucugcucuggaaccccugguggaucugcccaucggcaucaacaucacccgguuucagacacugcuggcccugcacagaagcuaccugacaccuggcgauagcagcagcggauggacagcuggugccgccgcuuacuaugugggcuaccugcagccuagaaccuuccugcugaaguacaacgagaacggcaccaucaccgacgccguggauugugcucuggauccucugagcgagacaaagugcacccugaaguccuucaccguggaaaagggcaucuaccagaccagcaacuuccgggugcagcccaccgaauccaucgugcgguuccccaauaucaccaaucugugccccuucggcgagguguucaaugccaccagauucgccucuguguacgccuggaaccggaagcggaucagcaauugcguggccgacuacuccgugcuguacaacuccgccagcuucagcaccuucaagugcuacggcguguccccuaccaagcugaacgaccugugcuucacaaacguguacgccgacagcuucgugauccggggagaugaagugcggcagauugccccuggacagacaggcaagaucgccgacuacaacuacaagcugcccgacgacuucaccggcugugugauugccuggaacagcaagaaccuggacuccaaagucggcggcaacuacaauuaccuguaccggcuguuccggaaguccaaucugaagcccuucgagcgggacaucuccaccgagaucuaucaggccggcagcaccccuuguaacggcguggaaggcuucaacugcuacuucccacugcaguccuacggcuuucagcccacaaauggcgugggcuaucagcccuacagagugguggugcugagcuucgaacugcugcaugccccugccacagugugcggcccuaagaaaagcaccaaucucgugaagaacaaaugcgugaacuucaacuucaacggccugaccggcaccggcgugcugacagagagcaacaagaaguuccugccauuccagcaguuuggccgggauaucgccgauaccacagacgccguuagagauccccagacacuggaaauccuggacaucaccccuugcagcuucggcggagugucugugaucaccccuggcaccaacaccagcaaucagguggcagugcuguaccagggcgugaacuguaccgaagugcccguggccauucacgccgaucagcugacaccuacauggcggguguacuccaccggcagcaauguguuucagaccagagccggcugucugaucggagccgagcacgugaacaauagcuacgagugcgacauccccaucggcgcuggaaucugcgccagcuaccagacacagacaaacagcccucggagagccagaagcguggccagccagagcaucauugccuacacaaugucucugggcgccgagaacagcguggccuacuccaacaacucuaucgcuauccccaccaacuucaccaucagcgugaccacagagauccugccuguguccaugaccaagaccagcguggacugcaccauguacaucugcggcgauuccaccgagugcuccaaccugcugcugcaguacggcagcuucugcacccagcugaauagagcccugacagggaucgccguggaacaggacaagaacacccaagagguguucgcccaagugaagcagaucuacaagaccccuccuaucaaggacuucggcggcuucaauuucagccagauucugcccgauccuagcaagcccagcaagcggagcuucaucgaggaccugcuguucaacaaagugacacuggccgacgccggcuucaucaagcaguauggcgauugucugggcgacauugccgccagggaucugauuugcgcccagaaguuuaacggacugacagugcugccuccucugcugaccgaugagaugaucgcccaguacacaucugcccugcuggccggcacaaucacaagcggcuggacauuuggagcaggcgccgcucugcagauccccuuugcuaugcagauggccuaccgguucaacggcaucggagugacccagaaugugcuguacgagaaccagaagcugaucgccaaccaguucaacagcgccaucggcaagauccaggacagccugagcagcacagcaagcgcccugggaaagcugcaggacguggucaaccagaaugcccaggcacugaacacccuggucaagcagcuguccuccaacuucggcgccaucagcucugugcugaacgauauccugagcagacuggacaaggucgaggccgaggugcagaucgacagacugaucacaggcagacugcagagccuccagacauacgugacccagcagcugaucagagccgccgagauuagagccucugccaaucuggccgccaccaagaugucugagugugugcugggccagagcaagagaguggacuuuugcggcaagggcuaccaccugaugagcuucccucagucugccccucacggcgugguguuucugcacgugacauaugugcccgcucaagagaagaauuucaccaccgcuccagccaucugccacgacggcaaagcccacuuuccuagagaaggcguguucguguccaacggcacccauugguucgugacacagcggaacuucuacgagccccagaucaucaccaccgacaacaccuucgugucuggcaacugcgacgucgugaucggcauugugaacaauaccguguacgacccucugcagcccgagcuggacagcuucaaagaggaacuggacaaguacuuuaagaaccacacaagccccgacguggaccugggcgauaucagcggaaucaaugccagcgucgugaacauccagaaagagaucgaccggcugaacgagguggccaagaaucugaacgagagccugaucgaccugcaagaacuggggaaguacgagcaguacaucaaguggcccugguacaucuggcugggcuuuaucgccggacugauugccaucgugauggucacaaucaugcuguguugcaugaccagcugcuguagcugccugaagggcuguuguagcuguggcagcugcugcaaguucgacgaggacgauucugagcccgugcugaagggcgugaaacugcacuacacaugaggacuaguuauaagacugacuagcccgaugggccucccaacgggcccuccuccccuccuugcaccgagauuaauaaaaaaaaaaaaaaaaaaaaaaaaaaaaaaaaaaaaaaaaaaaaaaaaaaaaaaaaaaaaaaaaugcaucccccccccccccccccccccccccccccccaaaggcucuuuucagagccaccagaauu

SEQ ID NO: 23283 - RNA, 4039 nt, Artificial Sequence
  SARS-CoV-2/Wuhan/WIV05/2019__EPI_ISL_402128 spike protein mRNA gc mod (1-1273)(S477N_D614G)
aggagaaagcuuaccauguucguguuccuggugcugcugccucugguguccagccagugugugaaccugaccaccagaacacagcugccuccagccuacaccaacagcuuuaccagaggcguguacuaccccgacaagguguucagauccagcgugcugcacucuacccaggaccuguuccugccuuucuucagcaacgugaccugguuccacgccauccacguguccggcaccaauggcaccaagagauucgacaaccccgugcugcccuucaacgacgggguguacuuugccagcaccgagaaguccaacaucaucagaggcuggaucuucggcaccacacuggacagcaagacccagagccugcugaucgugaacaacgccaccaacguggucaucaaagugugcgaguuccaguucugcaacgaccccuuccugggcgucuacuaccacaagaacaacaagagcuggauggaaagcgaguuccggguguacagcagcgccaacaacugcaccuucgaguacgugucccagccuuuccugauggaccuggaaggcaagcagggcaacuucaagaaccugcgcgaguucguguuuaagaacaucgacggcuacuucaagaucuacagcaagcacaccccuaucaaccucgugcgggaucugccucagggcuucucugcucuggaaccccugguggaucugcccaucggcaucaacaucacccgguuucagacacugcuggcccugcacagaagcuaccugacaccuggcgauagcagcagcggauggacagcuggugccgccgcuuacuaugugggcuaccugcagccuagaaccuuccugcugaaguacaacgagaacggcaccaucaccgacgccguggauugugcucuggauccucugagcgagacaaagugcacccugaaguccuucaccguggaaaagggcaucuaccagaccagcaacuuccgggugcagcccaccgaauccaucgugcgguuccccaauaucaccaaucugugccccuucggcgagguguucaaugccaccagauucgccucuguguacgccuggaaccggaagcggaucagcaauugcguggccgacuacuccgugcuguacaacuccgccagcuucagcaccuucaagugcuacggcguguccccuaccaagcugaacgaccugugcuucacaaacguguacgccgacagcuucgugauccggggagaugaagugcggcagauugccccuggacagacaggcaagaucgccgacuacaacuacaagcugcccgacgacuucaccggcugugugauugccuggaacagcaacaaccuggacuccaaagucggcggcaacuacaauuaccuguaccggcuguuccggaaguccaaucugaagcccuucgagcgggacaucuccaccgagaucuaucaggccggcaacaccccuuguaacggcguggaaggcuucaacugcuacuucccacugcaguccuacggcuuucagcccacaaauggcgugggcuaucagcccuacagagugguggugcugagcuucgaacugcugcaugccccugccacagugugcggcccuaagaaaagcaccaaucucgugaagaacaaaugcgugaacuucaacuucaacggccugaccggcaccggcgugcugacagagagcaacaagaaguuccugccauuccagcaguuuggccgggauaucgccgauaccacagacgccguuagagauccccagacacuggaaauccuggacaucaccccuugcagcuucggcggagugucugugaucaccccuggcaccaacaccagcaaucagguggcagugcuguaccagggcgugaacuguaccgaagugcccguggccauucacgccgaucagcugacaccuacauggcggguguacuccaccggcagcaauguguuucagaccagagccggcugucugaucggagccgagcacgugaacaauagcuacgagugcgacauccccaucggcgcuggaaucugcgccagcuaccagacacagacaaacagcccucggagagccagaagcguggccagccagagcaucauugccuacacaaugucucugggcgccgagaacagcguggccuacuccaacaacucuaucgcuauccccaccaacuucaccaucagcgugaccacagagauccugccuguguccaugaccaagaccagcguggacugcaccauguacaucugcggcgauuccaccgagugcuccaaccugcugcugcaguacggcagcuucugcacccagcugaauagagcccugacagggaucgccguggaacaggacaagaacacccaagagguguucgcccaagugaagcagaucuacaagaccccuccuaucaaggacuucggcggcuucaauuucagccagauucugcccgauccuagcaagcccagcaagcggagcuucaucgaggaccugcuguucaacaaagugacacuggccgacgccggcuucaucaagcaguauggcgauugucugggcgacauugccgccagggaucugauuugcgcccagaaguuuaacggacugacagugcugccuccucugcugaccgaugagaugaucgcccaguacacaucugcccugcuggccggcacaaucacaagcggcuggacauuuggagcaggcgccgcucugcagauccccuuugcuaugcagauggccuaccgguucaacggcaucggagugacccagaaugugcuguacgagaaccagaagcugaucgccaaccaguucaacagcgccaucggcaagauccaggacagccugagcagcacagcaagcgcccugggaaagcugcaggacguggucaaccagaaugcccaggcacugaacacccuggucaagcagcuguccuccaacuucggcgccaucagcucugugcugaacgauauccugagcagacuggacaaggucgaggccgaggugcagaucgacagacugaucacaggcagacugcagagccuccagacauacgugacccagcagcugaucagagccgccgagauuagagccucugccaaucuggccgccaccaagaugucugagugugugcugggccagagcaagagaguggacuuuugcggcaagggcuaccaccugaugagcuucccucagucugccccucacggcgugguguuucugcacgugacauaugugcccgcucaagagaagaauuucaccaccgcuccagccaucugccacgacggcaaagcccacuuuccuagagaaggcguguucguguccaacggcacccauugguucgugacacagcggaacuucuacgagccccagaucaucaccaccgacaacaccuucgugucuggcaacugcgacgucgugaucggcauugugaacaauaccguguacgacccucugcagcccgagcuggacagcuucaaagaggaacuggacaaguacuuuaagaaccacacaagccccgacguggaccugggcgauaucagcggaaucaaugccagcgucgugaacauccagaaagagaucgaccggcugaacgagguggccaagaaucugaacgagagccugaucgaccugcaagaacuggggaaguacgagcaguacaucaaguggcccugguacaucuggcugggcuuuaucgccggacugauugccaucgugauggucacaaucaugcuguguugcaugaccagcugcuguagcugccugaagggcuguuguagcuguggcagcugcugcaaguucgacgaggacgauucugagcccgugcugaagggcgugaaacugcacuacacaugaggacuaguuauaagacugacuagcccgaugggccucccaacgggcccuccuccccuccuugcaccgagauuaauaaaaaaaaaaaaaaaaaaaaaaaaaaaaaaaaaaaaaaaaaaaaaaaaaaaaaaaaaaaaaaaaugcaucccccccccccccccccccccccccccccccaaaggcucuuuucagagccaccagaauu

SEQ ID NO: 23284 - RNA, 4039 nt, Artificial Sequence
  SARS-CoV-2/Wuhan/WIV05/2019__EPI_ISL_402128 spike protein mRNA gc mod (1-1273)(N501Y_D614G)
aggagaaagcuuaccauguucguguuccuggugcugcugccucugguguccagccagugugugaaccugaccaccagaacacagcugccuccagccuacaccaacagcuuuaccagaggcguguacuaccccgacaagguguucagauccagcgugcugcacucuacccaggaccuguuccugccuuucuucagcaacgugaccugguuccacgccauccacguguccggcaccaauggcaccaagagauucgacaaccccgugcugcccuucaacgacgggguguacuuugccagcaccgagaaguccaacaucaucagaggcuggaucuucggcaccacacuggacagcaagacccagagccugcugaucgugaacaacgccaccaacguggucaucaaagugugcgaguuccaguucugcaacgaccccuuccugggcgucuacuaccacaagaacaacaagagcuggauggaaagcgaguuccggguguacagcagcgccaacaacugcaccuucgaguacgugucccagccuuuccugauggaccuggaaggcaagcagggcaacuucaagaaccugcgcgaguucguguuuaagaacaucgacggcuacuucaagaucuacagcaagcacaccccuaucaaccucgugcgggaucugccucagggcuucucugcucuggaaccccugguggaucugcccaucggcaucaacaucacccgguuucagacacugcuggcccugcacagaagcuaccugacaccuggcgauagcagcagcggauggacagcuggugccgccgcuuacuaugugggcuaccugcagccuagaaccuuccugcugaaguacaacgagaacggcaccaucaccgacgccguggauugugcucuggauccucugagcgagacaaagugcacccugaaguccuucaccguggaaaagggcaucuaccagaccagcaacuuccgggugcagcccaccgaauccaucgugcgguuccccaauaucaccaaucugugccccuucggcgagguguucaaugccaccagauucgccucuguguacgccuggaaccggaagcggaucagcaauugcguggccgacuacuccgugcuguacaacuccgccagcuucagcaccuucaagugcuacggcguguccccuaccaagcugaacgaccugugcuucacaaacguguacgccgacagcuucgugauccggggagaugaagugcggcagauugccccuggacagacaggcaagaucgccgacuacaacuacaagcugcccgacgacuucaccggcugugugauugccuggaacagcaacaaccuggacuccaaagucggcggcaacuacaauuaccuguaccggcuguuccggaaguccaaucugaagcccuucgagcgggacaucuccaccgagaucuaucaggccggcagcaccccuuguaacggcguggaaggcuucaacugcuacuucccacugcaguccuacggcuuucagcccacauacggcgugggcuaucagcccuacagagugguggugcugagcuucgaacugcugcaugccccugccacagugugcggcccuaagaaaagcaccaaucucgugaagaacaaaugcgugaacuucaacuucaacggccugaccggcaccggcgugcugacagagagcaacaagaaguuccugccauuccagcaguuuggccgggauaucgccgauaccacagacgccguuagagauccccagacacuggaaauccuggacaucaccccuugcagcuucggcggagugucugugaucaccccuggcaccaacaccagcaaucagguggcagugcuguaccagggcgugaacuguaccgaagugcccguggccauucacgccgaucagcugacaccuacauggcggguguacuccaccggcagcaauguguuucagaccagagccggcugucugaucggagccgagcacgugaacaauagcuacgagugcgacauccccaucggcgcuggaaucugcgccagcuaccagacacagacaaacagcccucggagagccagaagcguggccagccagagcaucauugccuacacaaugucucugggcgccgagaacagcguggccuacuccaacaacucuaucgcuauccccaccaacuucaccaucagcgugaccacagagauccugccuguguccaugaccaagaccagcguggacugcaccauguacaucugcggcgauuccaccgagugcuccaaccugcugcugcaguacggcagcuucugcacccagcugaauagagcccugacagggaucgccguggaacaggacaagaacacccaagagguguucgcccaagugaagcagaucuacaagaccccuccuaucaaggacuucggcggcuucaauuucagccagauucugcccgauccuagcaagcccagcaagcggagcuucaucgaggaccugcuguucaacaaagugacacuggccgacgccggcuucaucaagcaguauggcgauugucugggcgacauugccgccagggaucugauuugcgcccagaaguuuaacggacugacagugcugccuccucugcugaccgaugagaugaucgcccaguacacaucugcccugcuggccggcacaaucacaagcggcuggacauuuggagcaggcgccgcucugcagauccccuuugcuaugcagauggccuaccgguucaacggcaucggagugacccagaaugugcuguacgagaaccagaagcugaucgccaaccaguucaacagcgccaucggcaagauccaggacagccugagcagcacagcaagcgcccugggaaagcugcaggacguggucaaccagaaugcccaggcacugaacacccuggucaagcagcuguccuccaacuucggcgccaucagcucugugcugaacgauauccugagcagacuggacaaggucgaggccgaggugcagaucgacagacugaucacaggcagacugcagagccuccagacauacgugacccagcagcugaucagagccgccgagauuagagccucugccaaucuggccgccaccaagaugucugagugugugcugggccagagcaagagaguggacuuuugcggcaagggcuaccaccugaugagcuucccucagucugccccucacggcgugguguuucugcacgugacauaugugcccgcucaagagaagaauuucaccaccgcuccagccaucugccacgacggcaaagcccacuuuccuagagaaggcguguucguguccaacggcacccauugguucgugacacagcggaacuucuacgagccccagaucaucaccaccgacaacaccuucgugucuggcaacugcgacgucgugaucggcauugugaacaauaccguguacgacccucugcagcccgagcuggacagcuucaaagaggaacuggacaaguacuuuaagaaccacacaagccccgacguggaccugggcgauaucagcggaaucaaugccagcgucgugaacauccagaaagagaucgaccggcugaacgagguggccaagaaucugaacgagagccugaucgaccugcaagaacuggggaaguacgagcaguacaucaaguggcccugguacaucuggcugggcuuuaucgccggacugauugccaucgugauggucacaaucaugcuguguugcaugaccagcugcuguagcugccugaagggcuguuguagcuguggcagcugcugcaaguucgacgaggacgauucugagcccgugcugaagggcgugaaacugcacuacacaugaggacuaguuauaagacugacuagcccgaugggccucccaacgggcccuccuccccuccuugcaccgagauuaauaaaaaaaaaaaaaaaaaaaaaaaaaaaaaaaaaaaaaaaaaaaaaaaaaaaaaaaaaaaaaaaaugcaucccccccccccccccccccccccccccccccaaaggcucuuuucagagccaccagaauu

SEQ ID NO: 23285 - RNA, 4033 nt, Artificial Sequence
  SARS-CoV-2/Wuhan/WIV05/2019__EPI_ISL_402128 spike protein mRNA gc mod (1-1273)(H69del_V70del_D614G)
aggagaaagcuuaccauguucguguuccuggugcugcugccucugguguccagccagugugugaaccugaccaccagaacacagcugccuccagccuacaccaacagcuuuaccagaggcguguacuaccccgacaagguguucagauccagcgugcugcacucuacccaggaccuguuccugccuuucuucagcaacgugaccugguuccacgccaucuccggcaccaauggcaccaagagauucgacaaccccgugcugcccuucaacgacgggguguacuuugccagcaccgagaaguccaacaucaucagaggcuggaucuucggcaccacacuggacagcaagacccagagccugcugaucgugaacaacgccaccaacguggucaucaaagugugcgaguuccaguucugcaacgaccccuuccugggcgucuacuaccacaagaacaacaagagcuggauggaaagcgaguuccggguguacagcagcgccaacaacugcaccuucgaguacgugucccagccuuuccugauggaccuggaaggcaagcagggcaacuucaagaaccugcgcgaguucguguuuaagaacaucgacggcuacuucaagaucuacagcaagcacaccccuaucaaccucgugcgggaucugccucagggcuucucugcucuggaaccccugguggaucugcccaucggcaucaacaucacccgguuucagacacugcuggcccugcacagaagcuaccugacaccuggcgauagcagcagcggauggacagcuggugccgccgcuuacuaugugggcuaccugcagccuagaaccuuccugcugaaguacaacgagaacggcaccaucaccgacgccguggauugugcucuggauccucugagcgagacaaagugcacccugaaguccuucaccguggaaaagggcaucuaccagaccagcaacuuccgggugcagcccaccgaauccaucgugcgguuccccaauaucaccaaucugugccccuucggcgagguguucaaugccaccagauucgccucuguguacgccuggaaccggaagcggaucagcaauugcguggccgacuacuccgugcuguacaacuccgccagcuucagcaccuucaagugcuacggcguguccccuaccaagcugaacgaccugugcuucacaaacguguacgccgacagcuucgugauccggggagaugaagugcggcagauugccccuggacagacaggcaagaucgccgacuacaacuacaagcugcccgacgacuucaccggcugugugauugccuggaacagcaacaaccuggacuccaaagucggcggcaacuacaauuaccuguaccggcuguuccggaaguccaaucugaagcccuucgagcgggacaucuccaccgagaucuaucaggccggcagcaccccuuguaacggcguggaaggcuucaacugcuacuucccacugcaguccuacggcuuucagcccacaaauggcgugggcuaucagcccuacagagugguggugcugagcuucgaacugcugcaugccccugccacagugugcggcccuaagaaaagcaccaaucucgugaagaacaaaugcgugaacuucaacuucaacggccugaccggcaccggcgugcugacagagagcaacaagaaguuccugccauuccagcaguuuggccgggauaucgccgauaccacagacgccguuagagauccccagacacuggaaauccuggacaucaccccuugcagcuucggcggagugucugugaucaccccuggcaccaacaccagcaaucagguggcagugcuguaccagggcgugaacuguaccgaagugcccguggccauucacgccgaucagcugacaccuacauggcggguguacuccaccggcagcaauguguuucagaccagagccggcugucugaucggagccgagcacgugaacaauagcuacgagugcgacauccccaucggcgcuggaaucugcgccagcuaccagacacagacaaacagcccucggagagccagaagcguggccagccagagcaucauugccuacacaaugucucugggcgccgagaacagcguggccuacuccaacaacucuaucgcuauccccaccaacuucaccaucagcgugaccacagagauccugccuguguccaugaccaagaccagcguggacugcaccauguacaucugcggcgauuccaccgagugcuccaaccugcugcugcaguacggcagcuucugcacccagcugaauagagcccugacagggaucgccguggaacaggacaagaacacccaagagguguucgcccaagugaagcagaucuacaagaccccuccuaucaaggacuucggcggcuucaauuucagccagauucugcccgauccuagcaagcccagcaagcggagcuucaucgaggaccugcuguucaacaaagugacacuggccgacgccggcuucaucaagcaguauggcgauugucugggcgacauugccgccagggaucugauuugcgcccagaaguuuaacggacugacagugcugccuccucugcugaccgaugagaugaucgcccaguacacaucugcccugcuggccggcacaaucacaagcggcuggacauuuggagcaggcgccgcucugcagauccccuuugcuaugcagauggccuaccgguucaacggcaucggagugacccagaaugugcuguacgagaaccagaagcugaucgccaaccaguucaacagcgccaucggcaagauccaggacagccugagcagcacagcaagcgcccugggaaagcugcaggacguggucaaccagaaugcccaggcacugaacacccuggucaagcagcuguccuccaacuucggcgccaucagcucugugcugaacgauauccugagcagacuggacaaggucgaggccgaggugcagaucgacagacugaucacaggcagacugcagagccuccagacauacgugacccagcagcugaucagagccgccgagauuagagccucugccaaucuggccgccaccaagaugucugagugugugcugggccagagcaagagaguggacuuuugcggcaagggcuaccaccugaugagcuucccucagucugccccucacggcgugguguuucugcacgugacauaugugcccgcucaagagaagaauuucaccaccgcuccagccaucugccacgacggcaaagcccacuuuccuagagaaggcguguucguguccaacggcacccauugguucgugacacagcggaacuucuacgagccccagaucaucaccaccgacaacaccuucgugucuggcaacugcgacgucgugaucggcauugugaacaauaccguguacgacccucugcagcccgagcuggacagcuucaaagaggaacuggacaaguacuuuaagaaccacacaagccccgacguggaccugggcgauaucagcggaaucaaugccagcgucgugaacauccagaaagagaucgaccggcugaacgagguggccaagaaucugaacgagagccugaucgaccugcaagaacuggggaaguacgagcaguacaucaaguggcccugguacaucuggcugggcuuuaucgccggacugauugccaucgugauggucacaaucaugcuguguugcaugaccagcugcuguagcugccugaagggcuguuguagcuguggcagcugcugcaaguucgacgaggacgauucugagcccgugcugaagggcgugaaacugcacuacacaugaggacuaguuauaagacugacuagcccgaugggccucccaacgggcccuccuccccuccuugcaccgagauuaauaaaaaaaaaaaaaaaaaaaaaaaaaaaaaaaaaaaaaaaaaaaaaaaaaaaaaaaaaaaaaaaaugcaucccccccccccccccccccccccccccccccaaaggcucuuuucagagccaccagaauu

SEQ ID NO: 23286 - RNA, 4039 nt, Artificial Sequence
  SARS-CoV-2/Wuhan/WIV05/2019__EPI_ISL_402128 spike protein mRNA gc mod (1-1273)(Y453F_D614G)
aggagaaagcuuaccauguucguguuccuggugcugcugccucugguguccagccagugugugaaccugaccaccagaacacagcugccuccagccuacaccaacagcuuuaccagaggcguguacuaccccgacaagguguucagauccagcgugcugcacucuacccaggaccuguuccugccuuucuucagcaacgugaccugguuccacgccauccacguguccggcaccaauggcaccaagagauucgacaaccccgugcugcccuucaacgacgggguguacuuugccagcaccgagaaguccaacaucaucagaggcuggaucuucggcaccacacuggacagcaagacccagagccugcugaucgugaacaacgccaccaacguggucaucaaagugugcgaguuccaguucugcaacgaccccuuccugggcgucuacuaccacaagaacaacaagagcuggauggaaagcgaguuccggguguacagcagcgccaacaacugcaccuucgaguacgugucccagccuuuccugauggaccuggaaggcaagcagggcaacuucaagaaccugcgcgaguucguguuuaagaacaucgacggcuacuucaagaucuacagcaagcacaccccuaucaaccucgugcgggaucugccucagggcuucucugcucuggaaccccugguggaucugcccaucggcaucaacaucacccgguuucagacacugcuggcccugcacagaagcuaccugacaccuggcgauagcagcagcggauggacagcuggugccgccgcuuacuaugugggcuaccugcagccuagaaccuuccugcugaaguacaacgagaacggcaccaucaccgacgccguggauugugcucuggauccucugagcgagacaaagugcacccugaaguccuucaccguggaaaagggcaucuaccagaccagcaacuuccgggugcagcccaccgaauccaucgugcgguuccccaauaucaccaaucugugccccuucggcgagguguucaaugccaccagauucgccucuguguacgccuggaaccggaagcggaucagcaauugcguggccgacuacuccgugcuguacaacuccgccagcuucagcaccuucaagugcuacggcguguccccuaccaagcugaacgaccugugcuucacaaacguguacgccgacagcuucgugauccggggagaugaagugcggcagauugccccuggacagacaggcaagaucgccgacuacaacuacaagcugcccgacgacuucaccggcugugugauugccuggaacagcaacaaccuggacuccaaagucggcggcaacuacaauuaccuguuccggcuguuccggaaguccaaucugaagcccuucgagcgggacaucuccaccgagaucuaucaggccggcagcaccccuuguaacggcguggaaggcuucaacugcuacuucccacugcaguccuacggcuuucagcccacaaauggcgugggcuaucagcccuacagagugguggugcugagcuucgaacugcugcaugccccugccacagugugcggcccuaagaaaagcaccaaucucgugaagaacaaaugcgugaacuucaacuucaacggccugaccggcaccggcgugcugacagagagcaacaagaaguuccugccauuccagcaguuuggccgggauaucgccgauaccacagacgccguuagagauccccagacacuggaaauccuggacaucaccccuugcagcuucggcggagugucugugaucaccccuggcaccaacaccagcaaucagguggcagugcuguaccagggcgugaacuguaccgaagugcccguggccauucacgccgaucagcugacaccuacauggcggguguacuccaccggcagcaauguguuucagaccagagccggcugucugaucggagccgagcacgugaacaauagcuacgagugcgacauccccaucggcgcuggaaucugcgccagcuaccagacacagacaaacagcccucggagagccagaagcguggccagccagagcaucauugccuacacaaugucucugggcgccgagaacagcguggccuacuccaacaacucuaucgcuauccccaccaacuucaccaucagcgugaccacagagauccugccuguguccaugaccaagaccagcguggacugcaccauguacaucugcggcgauuccaccgagugcuccaaccugcugcugcaguacggcagcuucugcacccagcugaauagagcccugacagggaucgccguggaacaggacaagaacacccaagagguguucgcccaagugaagcagaucuacaagaccccuccuaucaaggacuucggcggcuucaauuucagccagauucugcccgauccuagcaagcccagcaagcggagcuucaucgaggaccugcuguucaacaaagugacacuggccgacgccggcuucaucaagcaguauggcgauugucugggcgacauugccgccagggaucugauuugcgcccagaaguuuaacggacugacagugcugccuccucugcugaccgaugagaugaucgcccaguacacaucugcccugcuggccggcacaaucacaagcggcuggacauuuggagcaggcgccgcucugcagauccccuuugcuaugcagauggccuaccgguucaacggcaucggagugacccagaaugugcuguacgagaaccagaagcugaucgccaaccaguucaacagcgccaucggcaagauccaggacagccugagcagcacagcaagcgcccugggaaagcugcaggacguggucaaccagaaugcccaggcacugaacacccuggucaagcagcuguccuccaacuucggcgccaucagcucugugcugaacgauauccugagcagacuggacaaggucgaggccgaggugcagaucgacagacugaucacaggcagacugcagagccuccagacauacgugacccagcagcugaucagagccgccgagauuagagccucugccaaucuggccgccaccaagaugucugagugugugcugggccagagcaagagaguggacuuuugcggcaagggcuaccaccugaugagcuucccucagucugccccucacggcgugguguuucugcacgugacauaugugcccgcucaagagaagaauuucaccaccgcuccagccaucugccacgacggcaaagcccacuuuccuagagaaggcguguucguguccaacggcacccauugguucgugacacagcggaacuucuacgagccccagaucaucaccaccgacaacaccuucgugucuggcaacugcgacgucgugaucggcauugugaacaauaccguguacgacccucugcagcccgagcuggacagcuucaaagaggaacuggacaaguacuuuaagaaccacacaagccccgacguggaccugggcgauaucagcggaaucaaugccagcgucgugaacauccagaaagagaucgaccggcugaacgagguggccaagaaucugaacgagagccugaucgaccugcaagaacuggggaaguacgagcaguacaucaaguggcccugguacaucuggcugggcuuuaucgccggacugauugccaucgugauggucacaaucaugcuguguugcaugaccagcugcuguagcugccugaagggcuguuguagcuguggcagcugcugcaaguucgacgaggacgauucugagcccgugcugaagggcgugaaacugcacuacacaugaggacuaguuauaagacugacuagcccgaugggccucccaacgggcccuccuccccuccuugcaccgagauuaauaaaaaaaaaaaaaaaaaaaaaaaaaaaaaaaaaaaaaaaaaaaaaaaaaaaaaaaaaaaaaaaaugcaucccccccccccccccccccccccccccccccaaaggcucuuuucagagccaccagaauu

SEQ ID NO: 23287 - RNA, 4039 nt, Artificial Sequence
  SARS-CoV-2/Wuhan/WIV05/2019__EPI_ISL_402128 spike protein mRNA gc mod (1-1273)(D614G_I692V)
aggagaaagcuuaccauguucguguuccuggugcugcugccucugguguccagccagugugugaaccugaccaccagaacacagcugccuccagccuacaccaacagcuuuaccagaggcguguacuaccccgacaagguguucagauccagcgugcugcacucuacccaggaccuguuccugccuuucuucagcaacgugaccugguuccacgccauccacguguccggcaccaauggcaccaagagauucgacaaccccgugcugcccuucaacgacgggguguacuuugccagcaccgagaaguccaacaucaucagaggcuggaucuucggcaccacacuggacagcaagacccagagccugcugaucgugaacaacgccaccaacguggucaucaaagugugcgaguuccaguucugcaacgaccccuuccugggcgucuacuaccacaagaacaacaagagcuggauggaaagcgaguuccggguguacagcagcgccaacaacugcaccuucgaguacgugucccagccuuuccugauggaccuggaaggcaagcagggcaacuucaagaaccugcgcgaguucguguuuaagaacaucgacggcuacuucaagaucuacagcaagcacaccccuaucaaccucgugcgggaucugccucagggcuucucugcucuggaaccccugguggaucugcccaucggcaucaacaucacccgguuucagacacugcuggcccugcacagaagcuaccugacaccuggcgauagcagcagcggauggacagcuggugccgccgcuuacuaugugggcuaccugcagccuagaaccuuccugcugaaguacaacgagaacggcaccaucaccgacgccguggauugugcucuggauccucugagcgagacaaagugcacccugaaguccuucaccguggaaaagggcaucuaccagaccagcaacuuccgggugcagcccaccgaauccaucgugcgguuccccaauaucaccaaucugugccccuucggcgagguguucaaugccaccagauucgccucuguguacgccuggaaccggaagcggaucagcaauugcguggccgacuacuccgugcuguacaacuccgccagcuucagcaccuucaagugcuacggcguguccccuaccaagcugaacgaccugugcuucacaaacguguacgccgacagcuucgugauccggggagaugaagugcggcagauugccccuggacagacaggcaagaucgccgacuacaacuacaagcugcccgacgacuucaccggcugugugauugccuggaacagcaacaaccuggacuccaaagucggcggcaacuacaauuaccuguaccggcuguuccggaaguccaaucugaagcccuucgagcgggacaucuccaccgagaucuaucaggccggcagcaccccuuguaacggcguggaaggcuucaacugcuacuucccacugcaguccuacggcuuucagcccacaaauggcgugggcuaucagcccuacagagugguggugcugagcuucgaacugcugcaugccccugccacagugugcggcccuaagaaaagcaccaaucucgugaagaacaaaugcgugaacuucaacuucaacggccugaccggcaccggcgugcugacagagagcaacaagaaguuccugccauuccagcaguuuggccgggauaucgccgauaccacagacgccguuagagauccccagacacuggaaauccuggacaucaccccuugcagcuucggcggagugucugugaucaccccuggcaccaacaccagcaaucagguggcagugcuguaccagggcgugaacuguaccgaagugcccguggccauucacgccgaucagcugacaccuacauggcggguguacuccaccggcagcaauguguuucagaccagagccggcugucugaucggagccgagcacgugaacaauagcuacgagugcgacauccccaucggcgcuggaaucugcgccagcuaccagacacagacaaacagcccucggagagccagaagcguggccagccagagcgugauugccuacacaaugucucugggcgccgagaacagcguggccuacuccaacaacucuaucgcuauccccaccaacuucaccaucagcgugaccacagagauccugccuguguccaugaccaagaccagcguggacugcaccauguacaucugcggcgauuccaccgagugcuccaaccugcugcugcaguacggcagcuucugcacccagcugaauagagcccugacagggaucgccguggaacaggacaagaacacccaagagguguucgcccaagugaagcagaucuacaagaccccuccuaucaaggacuucggcggcuucaauuucagccagauucugcccgauccuagcaagcccagcaagcggagcuucaucgaggaccugcuguucaacaaagugacacuggccgacgccggcuucaucaagcaguauggcgauugucugggcgacauugccgccagggaucugauuugcgcccagaaguuuaacggacugacagugcugccuccucugcugaccgaugagaugaucgcccaguacacaucugcccugcuggccggcacaaucacaagcggcuggacauuuggagcaggcgccgcucugcagauccccuuugcuaugcagauggccuaccgguucaacggcaucggagugacccagaaugugcuguacgagaaccagaagcugaucgccaaccaguucaacagcgccaucggcaagauccaggacagccugagcagcacagcaagcgcccugggaaagcugcaggacguggucaaccagaaugcccaggcacugaacacccuggucaagcagcuguccuccaacuucggcgccaucagcucugugcugaacgauauccugagcagacuggacaaggucgaggccgaggugcagaucgacagacugaucacaggcagacugcagagccuccagacauacgugacccagcagcugaucagagccgccgagauuagagccucugccaaucuggccgccaccaagaugucugagugugugcugggccagagcaagagaguggacuuuugcggcaagggcuaccaccugaugagcuucccucagucugccccucacggcgugguguuucugcacgugacauaugugcccgcucaagagaagaauuucaccaccgcuccagccaucugccacgacggcaaagcccacuuuccuagagaaggcguguucguguccaacggcacccauugguucgugacacagcggaacuucuacgagccccagaucaucaccaccgacaacaccuucgugucuggcaacugcgacgucgugaucggcauugugaacaauaccguguacgacccucugcagcccgagcuggacagcuucaaagaggaacuggacaaguacuuuaagaaccacacaagccccgacguggaccugggcgauaucagcggaaucaaugccagcgucgugaacauccagaaagagaucgaccggcugaacgagguggccaagaaucugaacgagagccugaucgaccugcaagaacuggggaaguacgagcaguacaucaaguggcccugguacaucuggcugggcuuuaucgccggacugauugccaucgugauggucacaaucaugcuguguugcaugaccagcugcuguagcugccugaagggcuguuguagcuguggcagcugcugcaaguucgacgaggacgauucugagcccgugcugaagggcgugaaacugcacuacacaugaggacuaguuauaagacugacuagcccgaugggccucccaacgggcccuccuccccuccuugcaccgagauuaauaaaaaaaaaaaaaaaaaaaaaaaaaaaaaaaaaaaaaaaaaaaaaaaaaaaaaaaaaaaaaaaaugcaucccccccccccccccccccccccccccccccaaaggcucuuuucagagccaccagaauu

SEQ ID NO: 23288 - RNA, 4039 nt, Artificial Sequence
  SARS-CoV-2/Wuhan/WIV05/2019__EPI_ISL_402128 spike protein mRNA gc mod (1-1273)(D614G_M1229I)
aggagaaagcuuaccauguucguguuccuggugcugcugccucugguguccagccagugugugaaccugaccaccagaacacagcugccuccagccuacaccaacagcuuuaccagaggcguguacuaccccgacaagguguucagauccagcgugcugcacucuacccaggaccuguuccugccuuucuucagcaacgugaccugguuccacgccauccacguguccggcaccaauggcaccaagagauucgacaaccccgugcugcccuucaacgacgggguguacuuugccagcaccgagaaguccaacaucaucagaggcuggaucuucggcaccacacuggacagcaagacccagagccugcugaucgugaacaacgccaccaacguggucaucaaagugugcgaguuccaguucugcaacgaccccuuccugggcgucuacuaccacaagaacaacaagagcuggauggaaagcgaguuccggguguacagcagcgccaacaacugcaccuucgaguacgugucccagccuuuccugauggaccuggaaggcaagcagggcaacuucaagaaccugcgcgaguucguguuuaagaacaucgacggcuacuucaagaucuacagcaagcacaccccuaucaaccucgugcgggaucugccucagggcuucucugcucuggaaccccugguggaucugcccaucggcaucaacaucacccgguuucagacacugcuggcccugcacagaagcuaccugacaccuggcgauagcagcagcggauggacagcuggugccgccgcuuacuaugugggcuaccugcagccuagaaccuuccugcugaaguacaacgagaacggcaccaucaccgacgccguggauugugcucuggauccucugagcgagacaaagugcacccugaaguccuucaccguggaaaagggcaucuaccagaccagcaacuuccgggugcagcccaccgaauccaucgugcgguuccccaauaucaccaaucugugccccuucggcgagguguucaaugccaccagauucgccucuguguacgccuggaaccggaagcggaucagcaauugcguggccgacuacuccgugcuguacaacuccgccagcuucagcaccuucaagugcuacggcguguccccuaccaagcugaacgaccugugcuucacaaacguguacgccgacagcuucgugauccggggagaugaagugcggcagauugccccuggacagacaggcaagaucgccgacuacaacuacaagcugcccgacgacuucaccggcugugugauugccuggaacagcaacaaccuggacuccaaagucggcggcaacuacaauuaccuguaccggcuguuccggaaguccaaucugaagcccuucgagcgggacaucuccaccgagaucuaucaggccggcagcaccccuuguaacggcguggaaggcuucaacugcuacuucccacugcaguccuacggcuuucagcccacaaauggcgugggcuaucagcccuacagagugguggugcugagcuucgaacugcugcaugccccugccacagugugcggcccuaagaaaagcaccaaucucgugaagaacaaaugcgugaacuucaacuucaacggccugaccggcaccggcgugcugacagagagcaacaagaaguuccugccauuccagcaguuuggccgggauaucgccgauaccacagacgccguuagagauccccagacacuggaaauccuggacaucaccccuugcagcuucggcggagugucugugaucaccccuggcaccaacaccagcaaucagguggcagugcuguaccagggcgugaacuguaccgaagugcccguggccauucacgccgaucagcugacaccuacauggcggguguacuccaccggcagcaauguguuucagaccagagccggcugucugaucggagccgagcacgugaacaauagcuacgagugcgacauccccaucggcgcuggaaucugcgccagcuaccagacacagacaaacagcccucggagagccagaagcguggccagccagagcaucauugccuacacaaugucucugggcgccgagaacagcguggccuacuccaacaacucuaucgcuauccccaccaacuucaccaucagcgugaccacagagauccugccuguguccaugaccaagaccagcguggacugcaccauguacaucugcggcgauuccaccgagugcuccaaccugcugcugcaguacggcagcuucugcacccagcugaauagagcccugacagggaucgccguggaacaggacaagaacacccaagagguguucgcccaagugaagcagaucuacaagaccccuccuaucaaggacuucggcggcuucaauuucagccagauucugcccgauccuagcaagcccagcaagcggagcuucaucgaggaccugcuguucaacaaagugacacuggccgacgccggcuucaucaagcaguauggcgauugucugggcgacauugccgccagggaucugauuugcgcccagaaguuuaacggacugacagugcugccuccucugcugaccgaugagaugaucgcccaguacacaucugcccugcuggccggcacaaucacaagcggcuggacauuuggagcaggcgccgcucugcagauccccuuugcuaugcagauggccuaccgguucaacggcaucggagugacccagaaugugcuguacgagaaccagaagcugaucgccaaccaguucaacagcgccaucggcaagauccaggacagccugagcagcacagcaagcgcccugggaaagcugcaggacguggucaaccagaaugcccaggcacugaacacccuggucaagcagcuguccuccaacuucggcgccaucagcucugugcugaacgauauccugagcagacuggacaaggucgaggccgaggugcagaucgacagacugaucacaggcagacugcagagccuccagacauacgugacccagcagcugaucagagccgccgagauuagagccucugccaaucuggccgccaccaagaugucugagugugugcugggccagagcaagagaguggacuuuugcggcaagggcuaccaccugaugagcuucccucagucugccccucacggcgugguguuucugcacgugacauaugugcccgcucaagagaagaauuucaccaccgcuccagccaucugccacgacggcaaagcccacuuuccuagagaaggcguguucguguccaacggcacccauugguucgugacacagcggaacuucuacgagccccagaucaucaccaccgacaacaccuucgugucuggcaacugcgacgucgugaucggcauugugaacaauaccguguacgacccucugcagcccgagcuggacagcuucaaagaggaacuggacaaguacuuuaagaaccacacaagccccgacguggaccugggcgauaucagcggaaucaaugccagcgucgugaacauccagaaagagaucgaccggcugaacgagguggccaagaaucugaacgagagccugaucgaccugcaagaacuggggaaguacgagcaguacaucaaguggcccugguacaucuggcugggcuuuaucgccggacugauugccaucgugaucgucacaaucaugcuguguugcaugaccagcugcuguagcugccugaagggcuguuguagcuguggcagcugcugcaaguucgacgaggacgauucugagcccgugcugaagggcgugaaacugcacuacacaugaggacuaguuauaagacugacuagcccgaugggccucccaacgggcccuccuccccuccuugcaccgagauuaauaaaaaaaaaaaaaaaaaaaaaaaaaaaaaaaaaaaaaaaaaaaaaaaaaaaaaaaaaaaaaaaaugcaucccccccccccccccccccccccccccccccaaaggcucuuuucagagccaccagaauu

SEQ ID NO: 23289 - RNA, 4033 nt, Artificial Sequence
  SARS-CoV-2/Wuhan/WIV05/2019__EPI_ISL_402128 spike protein mRNA gc mod (1-1273)(H69del_V70del_A222V_Y453F_S477N_D614G_I692V)
aggagaaagcuuaccauguucguguuccuggugcugcugccucugguguccagccagugugugaaccugaccaccagaacacagcugccuccagccuacaccaacagcuuuaccagaggcguguacuaccccgacaagguguucagauccagcgugcugcacucuacccaggaccuguuccugccuuucuucagcaacgugaccugguuccacgccaucuccggcaccaauggcaccaagagauucgacaaccccgugcugcccuucaacgacgggguguacuuugccagcaccgagaaguccaacaucaucagaggcuggaucuucggcaccacacuggacagcaagacccagagccugcugaucgugaacaacgccaccaacguggucaucaaagugugcgaguuccaguucugcaacgaccccuuccugggcgucuacuaccacaagaacaacaagagcuggauggaaagcgaguuccggguguacagcagcgccaacaacugcaccuucgaguacgugucccagccuuuccugauggaccuggaaggcaagcagggcaacuucaagaaccugcgcgaguucguguuuaagaacaucgacggcuacuucaagaucuacagcaagcacaccccuaucaaccucgugcgggaucugccucagggcuucucugugcuggaaccccugguggaucugcccaucggcaucaacaucacccgguuucagacacugcuggcccugcacagaagcuaccugacaccuggcgauagcagcagcggauggacagcuggugccgccgcuuacuaugugggcuaccugcagccuagaaccuuccugcugaaguacaacgagaacggcaccaucaccgacgccguggauugugcucuggauccucugagcgagacaaagugcacccugaaguccuucaccguggaaaagggcaucuaccagaccagcaacuuccgggugcagcccaccgaauccaucgugcgguuccccaauaucaccaaucugugccccuucggcgagguguucaaugccaccagauucgccucuguguacgccuggaaccggaagcggaucagcaauugcguggccgacuacuccgugcuguacaacuccgccagcuucagcaccuucaagugcuacggcguguccccuaccaagcugaacgaccugugcuucacaaacguguacgccgacagcuucgugauccggggagaugaagugcggcagauugccccuggacagacaggcaagaucgccgacuacaacuacaagcugcccgacgacuucaccggcugugugauugccuggaacagcaacaaccuggacuccaaagucggcggcaacuacaauuaccuguuccggcuguuccggaaguccaaucugaagcccuucgagcgggacaucuccaccgagaucuaucaggccggcaacaccccuuguaacggcguggaaggcuucaacugcuacuucccacugcaguccuacggcuuucagcccacaaauggcgugggcuaucagcccuacagagugguggugcugagcuucgaacugcugcaugccccugccacagugugcggcccuaagaaaagcaccaaucucgugaagaacaaaugcgugaacuucaacuucaacggccugaccggcaccggcgugcugacagagagcaacaagaaguuccugccauuccagcaguuuggccgggauaucgccgauaccacagacgccguuagagauccccagacacuggaaauccuggacaucaccccuugcagcuucggcggagugucugugaucaccccuggcaccaacaccagcaaucagguggcagugcuguaccagggcgugaacuguaccgaagugcccguggccauucacgccgaucagcugacaccuacauggcggguguacuccaccggcagcaauguguuucagaccagagccggcugucugaucggagccgagcacgugaacaauagcuacgagugcgacauccccaucggcgcuggaaucugcgccagcuaccagacacagacaaacagcccucggagagccagaagcguggccagccagagcgugauugccuacacaaugucucugggcgccgagaacagcguggccuacuccaacaacucuaucgcuauccccaccaacuucaccaucagcgugaccacagagauccugccuguguccaugaccaagaccagcguggacugcaccauguacaucugcggcgauuccaccgagugcuccaaccugcugcugcaguacggcagcuucugcacccagcugaauagagcccugacagggaucgccguggaacaggacaagaacacccaagagguguucgcccaagugaagcagaucuacaagaccccuccuaucaaggacuucggcggcuucaauuucagccagauucugcccgauccuagcaagcccagcaagcggagcuucaucgaggaccugcuguucaacaaagugacacuggccgacgccggcuucaucaagcaguauggcgauugucugggcgacauugccgccagggaucugauuugcgcccagaaguuuaacggacugacagugcugccuccucugcugaccgaugagaugaucgcccaguacacaucugcccugcuggccggcacaaucacaagcggcuggacauuuggagcaggcgccgcucugcagauccccuuugcuaugcagauggccuaccgguucaacggcaucggagugacccagaaugugcuguacgagaaccagaagcugaucgccaaccaguucaacagcgccaucggcaagauccaggacagccugagcagcacagcaagcgcccugggaaagcugcaggacguggucaaccagaaugcccaggcacugaacacccuggucaagcagcuguccuccaacuucggcgccaucagcucugugcugaacgauauccugagcagacuggacaaggucgaggccgaggugcagaucgacagacugaucacaggcagacugcagagccuccagacauacgugacccagcagcugaucagagccgccgagauuagagccucugccaaucuggccgccaccaagaugucugagugugugcugggccagagcaagagaguggacuuuugcggcaagggcuaccaccugaugagcuucccucagucugccccucacggcgugguguuucugcacgugacauaugugcccgcucaagagaagaauuucaccaccgcuccagccaucugccacgacggcaaagcccacuuuccuagagaaggcguguucguguccaacggcacccauugguucgugacacagcggaacuucuacgagccccagaucaucaccaccgacaacaccuucgugucuggcaacugcgacgucgugaucggcauugugaacaauaccguguacgacccucugcagcccgagcuggacagcuucaaagaggaacuggacaaguacuuuaagaaccacacaagccccgacguggaccugggcgauaucagcggaaucaaugccagcgucgugaacauccagaaagagaucgaccggcugaacgagguggccaagaaucugaacgagagccugaucgaccugcaagaacuggggaaguacgagcaguacaucaaguggcccugguacaucuggcugggcuuuaucgccggacugauugccaucgugauggucacaaucaugcuguguugcaugaccagcugcuguagcugccugaagggcuguuguagcuguggcagcugcugcaaguucgacgaggacgauucugagcccgugcugaagggcgugaaacugcacuacacaugaggacuaguuauaagacugacuagcccgaugggccucccaacgggcccuccuccccuccuugcaccgagauuaauaaaaaaaaaaaaaaaaaaaaaaaaaaaaaaaaaaaaaaaaaaaaaaaaaaaaaaaaaaaaaaaaugcaucccccccccccccccccccccccccccccccaaaggcucuuuucagagccaccagaauu

SEQ ID NO: 23290 - RNA, 4033 nt, Artificial Sequence
  SARS-CoV-2/Wuhan/WIV05/2019__EPI_ISL_402128 spike protein mRNA gc mod (1-1273)(H69del_V70del_Y453F_D614G_I692V_M1229I)
aggagaaagcuuaccauguucguguuccuggugcugcugccucugguguccagccagugugugaaccugaccaccagaacacagcugccuccagccuacaccaacagcuuuaccagaggcguguacuaccccgacaagguguucagauccagcgugcugcacucuacccaggaccuguuccugccuuucuucagcaacgugaccugguuccacgccaucuccggcaccaauggcaccaagagauucgacaaccccgugcugcccuucaacgacgggguguacuuugccagcaccgagaaguccaacaucaucagaggcuggaucuucggcaccacacuggacagcaagacccagagccugcugaucgugaacaacgccaccaacguggucaucaaagugugcgaguuccaguucugcaacgaccccuuccugggcgucuacuaccacaagaacaacaagagcuggauggaaagcgaguuccggguguacagcagcgccaacaacugcaccuucgaguacgugucccagccuuuccugauggaccuggaaggcaagcagggcaacuucaagaaccugcgcgaguucguguuuaagaacaucgacggcuacuucaagaucuacagcaagcacaccccuaucaaccucgugcgggaucugccucagggcuucucugcucuggaaccccugguggaucugcccaucggcaucaacaucacccgguuucagacacugcuggcccugcacagaagcuaccugacaccuggcgauagcagcagcggauggacagcuggugccgccgcuuacuaugugggcuaccugcagccuagaaccuuccugcugaaguacaacgagaacggcaccaucaccgacgccguggauugugcucuggauccucugagcgagacaaagugcacccugaaguccuucaccguggaaaagggcaucuaccagaccagcaacuuccgggugcagcccaccgaauccaucgugcgguuccccaauaucaccaaucugugccccuucggcgagguguucaaugccaccagauucgccucuguguacgccuggaaccggaagcggaucagcaauugcguggccgacuacuccgugcuguacaacuccgccagcuucagcaccuucaagugcuacggcguguccccuaccaagcugaacgaccugugcuucacaaacguguacgccgacagcuucgugauccggggagaugaagugcggcagauugccccuggacagacaggcaagaucgccgacuacaacuacaagcugcccgacgacuucaccggcugugugauugccuggaacagcaacaaccuggacuccaaagucggcggcaacuacaauuaccuguuccggcuguuccggaaguccaaucugaagcccuucgagcgggacaucuccaccgagaucuaucaggccggcagcaccccuuguaacggcguggaaggcuucaacugcuacuucccacugcaguccuacggcuuucagcccacaaauggcgugggcuaucagcccuacagagugguggugcugagcuucgaacugcugcaugccccugccacagugugcggcccuaagaaaagcaccaaucucgugaagaacaaaugcgugaacuucaacuucaacggccugaccggcaccggcgugcugacagagagcaacaagaaguuccugccauuccagcaguuuggccgggauaucgccgauaccacagacgccguuagagauccccagacacuggaaauccuggacaucaccccuugcagcuucggcggagugucugugaucaccccuggcaccaacaccagcaaucagguggcagugcuguaccagggcgugaacuguaccgaagugcccguggccauucacgccgaucagcugacaccuacauggcggguguacuccaccggcagcaauguguuucagaccagagccggcugucugaucggagccgagcacgugaacaauagcuacgagugcgacauccccaucggcgcuggaaucugcgccagcuaccagacacagacaaacagcccucggagagccagaagcguggccagccagagcgugauugccuacacaaugucucugggcgccgagaacagcguggccuacuccaacaacucuaucgcuauccccaccaacuucaccaucagcgugaccacagagauccugccuguguccaugaccaagaccagcguggacugcaccauguacaucugcggcgauuccaccgagugcuccaaccugcugcugcaguacggcagcuucugcacccagcugaauagagcccugacagggaucgccguggaacaggacaagaacacccaagagguguucgcccaagugaagcagaucuacaagaccccuccuaucaaggacuucggcggcuucaauuucagccagauucugcccgauccuagcaagcccagcaagcggagcuucaucgaggaccugcuguucaacaaagugacacuggccgacgccggcuucaucaagcaguauggcgauugucugggcgacauugccgccagggaucugauuugcgcccagaaguuuaacggacugacagugcugccuccucugcugaccgaugagaugaucgcccaguacacaucugcccugcuggccggcacaaucacaagcggcuggacauuuggagcaggcgccgcucugcagauccccuuugcuaugcagauggccuaccgguucaacggcaucggagugacccagaaugugcuguacgagaaccagaagcugaucgccaaccaguucaacagcgccaucggcaagauccaggacagccugagcagcacagcaagcgcccugggaaagcugcaggacguggucaaccagaaugcccaggcacugaacacccuggucaagcagcuguccuccaacuucggcgccaucagcucugugcugaacgauauccugagcagacuggacaaggucgaggccgaggugcagaucgacagacugaucacaggcagacugcagagccuccagacauacgugacccagcagcugaucagagccgccgagauuagagccucugccaaucuggccgccaccaagaugucugagugugugcugggccagagcaagagaguggacuuuugcggcaagggcuaccaccugaugagcuucccucagucugccccucacggcgugguguuucugcacgugacauaugugcccgcucaagagaagaauuucaccaccgcuccagccaucugccacgacggcaaagcccacuuuccuagagaaggcguguucguguccaacggcacccauugguucgugacacagcggaacuucuacgagccccagaucaucaccaccgacaacaccuucgugucuggcaacugcgacgucgugaucggcauugugaacaauaccguguacgacccucugcagcccgagcuggacagcuucaaagaggaacuggacaaguacuuuaagaaccacacaagccccgacguggaccugggcgauaucagcggaaucaaugccagcgucgugaacauccagaaagagaucgaccggcugaacgagguggccaagaaucugaacgagagccugaucgaccugcaagaacuggggaaguacgagcaguacaucaaguggcccugguacaucuggcugggcuuuaucgccggacugauugccaucgugaucgucacaaucaugcuguguugcaugaccagcugcuguagcugccugaagggcuguuguagcuguggcagcugcugcaaguucgacgaggacgauucugagcccgugcugaagggcgugaaacugcacuacacaugaggacuaguuauaagacugacuagcccgaugggccucccaacgggcccuccuccccuccuugcaccgagauuaauaaaaaaaaaaaaaaaaaaaaaaaaaaaaaaaaaaaaaaaaaaaaaaaaaaaaaaaaaaaaaaaaugcaucccccccccccccccccccccccccccccccaaaggcucuuuucagagccaccagaauu

SEQ ID NO: 23291 - RNA, 4030 nt, Artificial Sequence
  SARS-CoV-2/Wuhan/WIV05/2019__EPI_ISL_402128 spike protein mRNA gc mod (1-1273)(H69del_V70del_Y144del_N501Y_A570D_D614G_P681H_T716I_S982 A_D1118H)
aggagaaagcuuaccauguucguguuccuggugcugcugccucugguguccagccagugugugaaccugaccaccagaacacagcugccuccagccuacaccaacagcuuuaccagaggcguguacuaccccgacaagguguucagauccagcgugcugcacucuacccaggaccuguuccugccuuucuucagcaacgugaccugguuccacgccaucuccggcaccaauggcaccaagagauucgacaaccccgugcugcccuucaacgacgggguguacuuugccagcaccgagaaguccaacaucaucagaggcuggaucuucggcaccacacuggacagcaagacccagagccugcugaucgugaacaacgccaccaacguggucaucaaagugugcgaguuccaguucugcaacgaccccuuccugggcgucuaccacaagaacaacaagagcuggauggaaagcgaguuccggguguacagcagcgccaacaacugcaccuucgaguacgugucccagccuuuccugauggaccuggaaggcaagcagggcaacuucaagaaccugcgcgaguucguguuuaagaacaucgacggcuacuucaagaucuacagcaagcacaccccuaucaaccucgugcgggaucugccucagggcuucucugcucuggaaccccugguggaucugcccaucggcaucaacaucacccgguuucagacacugcuggcccugcacagaagcuaccugacaccuggcgauagcagcagcggauggacagcuggugccgccgcuuacuaugugggcuaccugcagccuagaaccuuccugcugaaguacaacgagaacggcaccaucaccgacgccguggauugugcucuggauccucugagcgagacaaagugcacccugaaguccuucaccguggaaaagggcaucuaccagaccagcaacuuccgggugcagcccaccgaauccaucgugcgguuccccaauaucaccaaucugugccccuucggcgagguguucaaugccaccagauucgccucuguguacgccuggaaccggaagcggaucagcaauugcguggccgacuacuccgugcuguacaacuccgccagcuucagcaccuucaagugcuacggcguguccccuaccaagcugaacgaccugugcuucacaaacguguacgccgacagcuucgugauccggggagaugaagugcggcagauugccccuggacagacaggcaagaucgccgacuacaacuacaagcugcccgacgacuucaccggcugugugauugccuggaacagcaacaaccuggacuccaaagucggcggcaacuacaauuaccuguaccggcuguuccggaaguccaaucugaagcccuucgagcgggacaucuccaccgagaucuaucaggccggcagcaccccuuguaacggcguggaaggcuucaacugcuacuucccacugcaguccuacggcuuucagcccacauacggcgugggcuaucagcccuacagagugguggugcugagcuucgaacugcugcaugccccugccacagugugcggcccuaagaaaagcaccaaucucgugaagaacaaaugcgugaacuucaacuucaacggccugaccggcaccggcgugcugacagagagcaacaagaaguuccugccauuccagcaguuuggccgggauaucgacgauaccacagacgccguuagagauccccagacacuggaaauccuggacaucaccccuugcagcuucggcggagugucugugaucaccccuggcaccaacaccagcaaucagguggcagugcuguaccagggcgugaacuguaccgaagugcccguggccauucacgccgaucagcugacaccuacauggcggguguacuccaccggcagcaauguguuucagaccagagccggcugucugaucggagccgagcacgugaacaauagcuacgagugcgacauccccaucggcgcuggaaucugcgccagcuaccagacacagacaaacagccaccggagagccagaagcguggccagccagagcaucauugccuacacaaugucucugggcgccgagaacagcguggccuacuccaacaacucuaucgcuauccccaucaacuucaccaucagcgugaccacagagauccugccuguguccaugaccaagaccagcguggacugcaccauguacaucugcggcgauuccaccgagugcuccaaccugcugcugcaguacggcagcuucugcacccagcugaauagagcccugacagggaucgccguggaacaggacaagaacacccaagagguguucgcccaagugaagcagaucuacaagaccccuccuaucaaggacuucggcggcuucaauuucagccagauucugcccgauccuagcaagcccagcaagcggagcuucaucgaggaccugcuguucaacaaagugacacuggccgacgccggcuucaucaagcaguauggcgauugucugggcgacauugccgccagggaucugauuugcgcccagaaguuuaacggacugacagugcugccuccucugcugaccgaugagaugaucgcccaguacacaucugcccugcuggccggcacaaucacaagcggcuggacauuuggagcaggcgccgcucugcagauccccuuugcuaugcagauggccuaccgguucaacggcaucggagugacccagaaugugcuguacgagaaccagaagcugaucgccaaccaguucaacagcgccaucggcaagauccaggacagccugagcagcacagcaagcgcccugggaaagcugcaggacguggucaaccagaaugcccaggcacugaacacccuggucaagcagcuguccuccaacuucggcgccaucagcucugugcugaacgauauccuggccagacuggacaaggucgaggccgaggugcagaucgacagacugaucacaggcagacugcagagccuccagacauacgugacccagcagcugaucagagccgccgagauuagagccucugccaaucuggccgccaccaagaugucugagugugugcugggccagagcaagagaguggacuuuugcggcaagggcuaccaccugaugagcuucccucagucugccccucacggcgugguguuucugcacgugacauaugugcccgcucaagagaagaauuucaccaccgcuccagccaucugccacgacggcaaagcccacuuuccuagagaaggcguguucguguccaacggcacccauugguucgugacacagcggaacuucuacgagccccagaucaucaccacccacaacaccuucgugucuggcaacugcgacgucgugaucggcauugugaacaauaccguguacgacccucugcagcccgagcuggacagcuucaaagaggaacuggacaaguacuuuaagaaccacacaagccccgacguggaccugggcgauaucagcggaaucaaugccagcgucgugaacauccagaaagagaucgaccggcugaacgagguggccaagaaucugaacgagagccugaucgaccugcaagaacuggggaaguacgagcaguacaucaaguggcccugguacaucuggcugggcuuuaucgccggacugauugccaucgugauggucacaaucaugcuguguugcaugaccagcugcuguagcugccugaagggcuguuguagcuguggcagcugcugcaaguucgacgaggacgauucugagcccgugcugaagggcgugaaacugcacuacacaugaggacuaguuauaagacugacuagcccgaugggccucccaacgggcccuccuccccuccuugcaccgagauuaauaaaaaaaaaaaaaaaaaaaaaaaaaaaaaaaaaaaaaaaaaaaaaaaaaaaaaaaaaaaaaaaaugcaucccccccccccccccccccccccccccccccaaaggcucuuuucagagccaccagaauu

SEQ ID NO: 23292 - RNA, 4039 nt, Artificial Sequence
  SARS-CoV-2/Wuhan/WIV05/2019__EPI_ISL_402128 spike protein mRNA gc mod (1-1273)(K417N_E484K_N501Y_D614G)
aggagaaagcuuaccauguucguguuccuggugcugcugccucugguguccagccagugugugaaccugaccaccagaacacagcugccuccagccuacaccaacagcuuuaccagaggcguguacuaccccgacaagguguucagauccagcgugcugcacucuacccaggaccuguuccugccuuucuucagcaacgugaccugguuccacgccauccacguguccggcaccaauggcaccaagagauucgacaaccccgugcugcccuucaacgacgggguguacuuugccagcaccgagaaguccaacaucaucagaggcuggaucuucggcaccacacuggacagcaagacccagagccugcugaucgugaacaacgccaccaacguggucaucaaagugugcgaguuccaguucugcaacgaccccuuccugggcgucuacuaccacaagaacaacaagagcuggauggaaagcgaguuccggguguacagcagcgccaacaacugcaccuucgaguacgugucccagccuuuccugauggaccuggaaggcaagcagggcaacuucaagaaccugcgcgaguucguguuuaagaacaucgacggcuacuucaagaucuacagcaagcacaccccuaucaaccucgugcgggaucugccucagggcuucucugcucuggaaccccugguggaucugcccaucggcaucaacaucacccgguuucagacacugcuggcccugcacagaagcuaccugacaccuggcgauagcagcagcggauggacagcuggugccgccgcuuacuaugugggcuaccugcagccuagaaccuuccugcugaaguacaacgagaacggcaccaucaccgacgccguggauugugcucuggauccucugagcgagacaaagugcacccugaaguccuucaccguggaaaagggcaucuaccagaccagcaacuuccgggugcagcccaccgaauccaucgugcgguuccccaauaucaccaaucugugccccuucggcgagguguucaaugccaccagauucgccucuguguacgccuggaaccggaagcggaucagcaauugcguggccgacuacuccgugcuguacaacuccgccagcuucagcaccuucaagugcuacggcguguccccuaccaagcugaacgaccugugcuucacaaacguguacgccgacagcuucgugauccggggagaugaagugcggcagauugccccuggacagacaggcaacaucgccgacuacaacuacaagcugcccgacgacuucaccggcugugugauugccuggaacagcaacaaccuggacuccaaagucggcggcaacuacaauuaccuguaccggcuguuccggaaguccaaucugaagcccuucgagcgggacaucuccaccgagaucuaucaggccggcagcaccccuuguaacggcgugaagggcuucaacugcuacuucccacugcaguccuacggcuuucagcccacauacggcgugggcuaucagcccuacagagugguggugcugagcuucgaacugcugcaugccccugccacagugugcggcccuaagaaaagcaccaaucucgugaagaacaaaugcgugaacuucaacuucaacggccugaccggcaccggcgugcugacagagagcaacaagaaguuccugccauuccagcaguuuggccgggauaucgccgauaccacagacgccguuagagauccccagacacuggaaauccuggacaucaccccuugcagcuucggcggagugucugugaucaccccuggcaccaacaccagcaaucagguggcagugcuguaccagggcgugaacuguaccgaagugcccguggccauucacgccgaucagcugacaccuacauggcggguguacuccaccggcagcaauguguuucagaccagagccggcugucugaucggagccgagcacgugaacaauagcuacgagugcgacauccccaucggcgcuggaaucugcgccagcuaccagacacagacaaacagcccucggagagccagaagcguggccagccagagcaucauugccuacacaaugucucugggcgccgagaacagcguggccuacuccaacaacucuaucgcuauccccaccaacuucaccaucagcgugaccacagagauccugccuguguccaugaccaagaccagcguggacugcaccauguacaucugcggcgauuccaccgagugcuccaaccugcugcugcaguacggcagcuucugcacccagcugaauagagcccugacagggaucgccguggaacaggacaagaacacccaagagguguucgcccaagugaagcagaucuacaagaccccuccuaucaaggacuucggcggcuucaauuucagccagauucugcccgauccuagcaagcccagcaagcggagcuucaucgaggaccugcuguucaacaaagugacacuggccgacgccggcuucaucaagcaguauggcgauugucugggcgacauugccgccagggaucugauuugcgcccagaaguuuaacggacugacagugcugccuccucugcugaccgaugagaugaucgcccaguacacaucugcccugcuggccggcacaaucacaagcggcuggacauuuggagcaggcgccgcucugcagauccccuuugcuaugcagauggccuaccgguucaacggcaucggagugacccagaaugugcuguacgagaaccagaagcugaucgccaaccaguucaacagcgccaucggcaagauccaggacagccugagcagcacagcaagcgcccugggaaagcugcaggacguggucaaccagaaugcccaggcacugaacacccuggucaagcagcuguccuccaacuucggcgccaucagcucugugcugaacgauauccugagcagacuggacaaggucgaggccgaggugcagaucgacagacugaucacaggcagacugcagagccuccagacauacgugacccagcagcugaucagagccgccgagauuagagccucugccaaucuggccgccaccaagaugucugagugugugcugggccagagcaagagaguggacuuuugcggcaagggcuaccaccugaugagcuucccucagucugccccucacggcgugguguuucugcacgugacauaugugcccgcucaagagaagaauuucaccaccgcuccagccaucugccacgacggcaaagcccacuuuccuagagaaggcguguucguguccaacggcacccauugguucgugacacagcggaacuucuacgagccccagaucaucaccaccgacaacaccuucgugucuggcaacugcgacgucgugaucggcauugugaacaauaccguguacgacccucugcagcccgagcuggacagcuucaaagaggaacuggacaaguacuuuaagaaccacacaagccccgacguggaccugggcgauaucagcggaaucaaugccagcgucgugaacauccagaaagagaucgaccggcugaacgagguggccaagaaucugaacgagagccugaucgaccugcaagaacuggggaaguacgagcaguacaucaaguggcccugguacaucuggcugggcuuuaucgccggacugauugccaucgugauggucacaaucaugcuguguugcaugaccagcugcuguagcugccugaagggcuguuguagcuguggcagcugcugcaaguucgacgaggacgauucugagcccgugcugaagggcgugaaacugcacuacacaugaggacuaguuauaagacugacuagcccgaugggccucccaacgggcccuccuccccuccuugcaccgagauuaauaaaaaaaaaaaaaaaaaaaaaaaaaaaaaaaaaaaaaaaaaaaaaaaaaaaaaaaaaaaaaaaaugcaucccccccccccccccccccccccccccccccaaaggcucuuuucagagccaccagaauu

SEQ ID NO: 23293 - RNA, 4030 nt, Artificial Sequence
  SARS-CoV-2/Wuhan/WIV05/2019__EPI_ISL_402128 spike protein mRNA gc mod (1-1273)(L18F_D80A_D215G_L242del_A243del_L244del_R246I_K417N_E484 K_N501Y_D614G_A701V)
aggagaaagcuuaccauguucguguuccuggugcugcugccucugguguccagccagugugugaacuucaccaccagaacacagcugccuccagccuacaccaacagcuuuaccagaggcguguacuaccccgacaagguguucagauccagcgugcugcacucuacccaggaccuguuccugccuuucuucagcaacgugaccugguuccacgccauccacguguccggcaccaauggcaccaagagauucgccaaccccgugcugcccuucaacgacgggguguacuuugccagcaccgagaaguccaacaucaucagaggcuggaucuucggcaccacacuggacagcaagacccagagccugcugaucgugaacaacgccaccaacguggucaucaaagugugcgaguuccaguucugcaacgaccccuuccugggcgucuacuaccacaagaacaacaagagcuggauggaaagcgaguuccggguguacagcagcgccaacaacugcaccuucgaguacgugucccagccuuuccugauggaccuggaaggcaagcagggcaacuucaagaaccugcgcgaguucguguuuaagaacaucgacggcuacuucaagaucuacagcaagcacaccccuaucaaccucgugcggggccugccucagggcuucucugcucuggaaccccugguggaucugcccaucggcaucaacaucacccgguuucagacacugcacaucagcuaccugacaccuggcgauagcagcagcggauggacagcuggugccgccgcuuacuaugugggcuaccugcagccuagaaccuuccugcugaaguacaacgagaacggcaccaucaccgacgccguggauugugcucuggauccucugagcgagacaaagugcacccugaaguccuucaccguggaaaagggcaucuaccagaccagcaacuuccgggugcagcccaccgaauccaucgugcgguuccccaauaucaccaaucugugccccuucggcgagguguucaaugccaccagauucgccucuguguacgccuggaaccggaagcggaucagcaauugcguggccgacuacuccgugcuguacaacuccgccagcuucagcaccuucaagugcuacggcguguccccuaccaagcugaacgaccugugcuucacaaacguguacgccgacagcuucgugauccggggagaugaagugcggcagauugccccuggacagacaggcaacaucgccgacuacaacuacaagcugcccgacgacuucaccggcugugugauugccuggaacagcaacaaccuggacuccaaagucggcggcaacuacaauuaccuguaccggcuguuccggaaguccaaucugaagcccuucgagcgggacaucuccaccgagaucuaucaggccggcagcaccccuuguaacggcgugaagggcuucaacugcuacuucccacugcaguccuacggcuuucagcccacauacggcgugggcuaucagcccuacagagugguggugcugagcuucgaacugcugcaugccccugccacagugugcggcccuaagaaaagcaccaaucucgugaagaacaaaugcgugaacuucaacuucaacggccugaccggcaccggcgugcugacagagagcaacaagaaguuccugccauuccagcaguuuggccgggauaucgccgauaccacagacgccguuagagauccccagacacuggaaauccuggacaucaccccuugcagcuucggcggagugucugugaucaccccuggcaccaacaccagcaaucagguggcagugcuguaccagggcgugaacuguaccgaagugcccguggccauucacgccgaucagcugacaccuacauggcggguguacuccaccggcagcaauguguuucagaccagagccggcugucugaucggagccgagcacgugaacaauagcuacgagugcgacauccccaucggcgcuggaaucugcgccagcuaccagacacagacaaacagcccucggagagccagaagcguggccagccagagcaucauugccuacacaaugucucugggcguggagaacagcguggccuacuccaacaacucuaucgcuauccccaccaacuucaccaucagcgugaccacagagauccugccuguguccaugaccaagaccagcguggacugcaccauguacaucugcggcgauuccaccgagugcuccaaccugcugcugcaguacggcagcuucugcacccagcugaauagagcccugacagggaucgccguggaacaggacaagaacacccaagagguguucgcccaagugaagcagaucuacaagaccccuccuaucaaggacuucggcggcuucaauuucagccagauucugcccgauccuagcaagcccagcaagcggagcuucaucgaggaccugcuguucaacaaagugacacuggccgacgccggcuucaucaagcaguauggcgauugucugggcgacauugccgccagggaucugauuugcgcccagaaguuuaacggacugacagugcugccuccucugcugaccgaugagaugaucgcccaguacacaucugcccugcuggccggcacaaucacaagcggcuggacauuuggagcaggcgccgcucugcagauccccuuugcuaugcagauggccuaccgguucaacggcaucggagugacccagaaugugcuguacgagaaccagaagcugaucgccaaccaguucaacagcgccaucggcaagauccaggacagccugagcagcacagcaagcgcccugggaaagcugcaggacguggucaaccagaaugcccaggcacugaacacccuggucaagcagcuguccuccaacuucggcgccaucagcucugugcugaacgauauccugagcagacuggacaaggucgaggccgaggugcagaucgacagacugaucacaggcagacugcagagccuccagacauacgugacccagcagcugaucagagccgccgagauuagagccucugccaaucuggccgccaccaagaugucugagugugugcugggccagagcaagagaguggacuuuugcggcaagggcuaccaccugaugagcuucccucagucugccccucacggcgugguguuucugcacgugacauaugugcccgcucaagagaagaauuucaccaccgcuccagccaucugccacgacggcaaagcccacuuuccuagagaaggcguguucguguccaacggcacccauugguucgugacacagcggaacuucuacgagccccagaucaucaccaccgacaacaccuucgugucuggcaacugcgacgucgugaucggcauugugaacaauaccguguacgacccucugcagcccgagcuggacagcuucaaagaggaacuggacaaguacuuuaagaaccacacaagccccgacguggaccugggcgauaucagcggaaucaaugccagcgucgugaacauccagaaagagaucgaccggcugaacgagguggccaagaaucugaacgagagccugaucgaccugcaagaacuggggaaguacgagcaguacaucaaguggcccugguacaucuggcugggcuuuaucgccggacugauugccaucgugauggucacaaucaugcuguguugcaugaccagcugcuguagcugccugaagggcuguuguagcuguggcagcugcugcaaguucgacgaggacgauucugagcccgugcugaagggcgugaaacugcacuacacaugaggacuaguuauaagacugacuagcccgaugggccucccaacgggcccuccuccccuccuugcaccgagauuaauaaaaaaaaaaaaaaaaaaaaaaaaaaaaaaaaaaaaaaaaaaaaaaaaaaaaaaaaaaaaaaaaugcaucccccccccccccccccccccccccccccccaaaggcucuuuucagagccaccagaauu

SEQ ID NO: 23294 - RNA, 4039 nt, Artificial Sequence
  SARS-CoV-2/Wuhan/WIV05/2019__EPI_ISL_402128 spike protein mRNA gc mod (1-1273)(E484K_D614G)
aggagaaagcuuaccauguucguguuccuggugcugcugccucugguguccagccagugugugaaccugaccaccagaacacagcugccuccagccuacaccaacagcuuuaccagaggcguguacuaccccgacaagguguucagauccagcgugcugcacucuacccaggaccuguuccugccuuucuucagcaacgugaccugguuccacgccauccacguguccggcaccaauggcaccaagagauucgacaaccccgugcugcccuucaacgacgggguguacuuugccagcaccgagaaguccaacaucaucagaggcuggaucuucggcaccacacuggacagcaagacccagagccugcugaucgugaacaacgccaccaacguggucaucaaagugugcgaguuccaguucugcaacgaccccuuccugggcgucuacuaccacaagaacaacaagagcuggauggaaagcgaguuccggguguacagcagcgccaacaacugcaccuucgaguacgugucccagccuuuccugauggaccuggaaggcaagcagggcaacuucaagaaccugcgcgaguucguguuuaagaacaucgacggcuacuucaagaucuacagcaagcacaccccuaucaaccucgugcgggaucugccucagggcuucucugcucuggaaccccugguggaucugcccaucggcaucaacaucacccgguuucagacacugcuggcccugcacagaagcuaccugacaccuggcgauagcagcagcggauggacagcuggugccgccgcuuacuaugugggcuaccugcagccuagaaccuuccugcugaaguacaacgagaacggcaccaucaccgacgccguggauugugcucuggauccucugagcgagacaaagugcacccugaaguccuucaccguggaaaagggcaucuaccagaccagcaacuuccgggugcagcccaccgaauccaucgugcgguuccccaauaucaccaaucugugccccuucggcgagguguucaaugccaccagauucgccucuguguacgccuggaaccggaagcggaucagcaauugcguggccgacuacuccgugcuguacaacuccgccagcuucagcaccuucaagugcuacggcguguccccuaccaagcugaacgaccugugcuucacaaacguguacgccgacagcuucgugauccggggagaugaagugcggcagauugccccuggacagacaggcaagaucgccgacuacaacuacaagcugcccgacgacuucaccggcugugugauugccuggaacagcaacaaccuggacuccaaagucggcggcaacuacaauuaccuguaccggcuguuccggaaguccaaucugaagcccuucgagcgggacaucuccaccgagaucuaucaggccggcagcaccccuuguaacggcgugaagggcuucaacugcuacuucccacugcaguccuacggcuuucagcccacaaauggcgugggcuaucagcccuacagagugguggugcugagcuucgaacugcugcaugccccugccacagugugcggcccuaagaaaagcaccaaucucgugaagaacaaaugcgugaacuucaacuucaacggccugaccggcaccggcgugcugacagagagcaacaagaaguuccugccauuccagcaguuuggccgggauaucgccgauaccacagacgccguuagagauccccagacacuggaaauccuggacaucaccccuugcagcuucggcggagugucugugaucaccccuggcaccaacaccagcaaucagguggcagugcuguaccagggcgugaacuguaccgaagugcccguggccauucacgccgaucagcugacaccuacauggcggguguacuccaccggcagcaauguguuucagaccagagccggcugucugaucggagccgagcacgugaacaauagcuacgagugcgacauccccaucggcgcuggaaucugcgccagcuaccagacacagacaaacagcccucggagagccagaagcguggccagccagagcaucauugccuacacaaugucucugggcgccgagaacagcguggccuacuccaacaacucuaucgcuauccccaccaacuucaccaucagcgugaccacagagauccugccuguguccaugaccaagaccagcguggacugcaccauguacaucugcggcgauuccaccgagugcuccaaccugcugcugcaguacggcagcuucugcacccagcugaauagagcccugacagggaucgccguggaacaggacaagaacacccaagagguguucgcccaagugaagcagaucuacaagaccccuccuaucaaggacuucggcggcuucaauuucagccagauucugcccgauccuagcaagcccagcaagcggagcuucaucgaggaccugcuguucaacaaagugacacuggccgacgccggcuucaucaagcaguauggcgauugucugggcgacauugccgccagggaucugauuugcgcccagaaguuuaacggacugacagugcugccuccucugcugaccgaugagaugaucgcccaguacacaucugcccugcuggccggcacaaucacaagcggcuggacauuuggagcaggcgccgcucugcagauccccuuugcuaugcagauggccuaccgguucaacggcaucggagugacccagaaugugcuguacgagaaccagaagcugaucgccaaccaguucaacagcgccaucggcaagauccaggacagccugagcagcacagcaagcgcccugggaaagcugcaggacguggucaaccagaaugcccaggcacugaacacccuggucaagcagcuguccuccaacuucggcgccaucagcucugugcugaacgauauccugagcagacuggacaaggucgaggccgaggugcagaucgacagacugaucacaggcagacugcagagccuccagacauacgugacccagcagcugaucagagccgccgagauuagagccucugccaaucuggccgccaccaagaugucugagugugugcugggccagagcaagagaguggacuuuugcggcaagggcuaccaccugaugagcuucccucagucugccccucacggcgugguguuucugcacgugacauaugugcccgcucaagagaagaauuucaccaccgcuccagccaucugccacgacggcaaagcccacuuuccuagagaaggcguguucguguccaacggcacccauugguucgugacacagcggaacuucuacgagccccagaucaucaccaccgacaacaccuucgugucuggcaacugcgacgucgugaucggcauugugaacaauaccguguacgacccucugcagcccgagcuggacagcuucaaagaggaacuggacaaguacuuuaagaaccacacaagccccgacguggaccugggcgauaucagcggaaucaaugccagcgucgugaacauccagaaagagaucgaccggcugaacgagguggccaagaaucugaacgagagccugaucgaccugcaagaacuggggaaguacgagcaguacaucaaguggcccugguacaucuggcugggcuuuaucgccggacugauugccaucgugauggucacaaucaugcuguguugcaugaccagcugcuguagcugccugaagggcuguuguagcuguggcagcugcugcaaguucgacgaggacgauucugagcccgugcugaagggcgugaaacugcacuacacaugaggacuaguuauaagacugacuagcccgaugggccucccaacgggcccuccuccccuccuugcaccgagauuaauaaaaaaaaaaaaaaaaaaaaaaaaaaaaaaaaaaaaaaaaaaaaaaaaaaaaaaaaaaaaaaaaugcaucccccccccccccccccccccccccccccccaaaggcucuuuucagagccaccagaauu

SEQ ID NO: 23295 - RNA, 4039 nt, Artificial Sequence
  SARS-CoV-2/Wuhan/WIV05/2019__EPI_ISL_402128 spike protein mRNA gc mod (1-1273)(L18F_T20N_P26S_D138Y_R190S_K417T_E484K_N501Y_D614G_H655Y _T1027I)
aggagaaagcuuaccauguucguguuccuggugcugcugccucugguguccagccagugugugaacuucaccaacagaacacagcugccuagcgccuacaccaacagcuuuaccagaggcguguacuaccccgacaagguguucagauccagcgugcugcacucuacccaggaccuguuccugccuuucuucagcaacgugaccugguuccacgccauccacguguccggcaccaauggcaccaagagauucgacaaccccgugcugcccuucaacgacgggguguacuuugccagcaccgagaaguccaacaucaucagaggcuggaucuucggcaccacacuggacagcaagacccagagccugcugaucgugaacaacgccaccaacguggucaucaaagugugcgaguuccaguucugcaacuaccccuuccugggcgucuacuaccacaagaacaacaagagcuggauggaaagcgaguuccggguguacagcagcgccaacaacugcaccuucgaguacgugucccagccuuuccugauggaccuggaaggcaagcagggcaacuucaagaaccugagcgaguucguguuuaagaacaucgacggcuacuucaagaucuacagcaagcacaccccuaucaaccucgugcgggaucugccucagggcuucucugcucuggaaccccugguggaucugcccaucggcaucaacaucacccgguuucagacacugcuggcccugcacagaagcuaccugacaccuggcgauagcagcagcggauggacagcuggugccgccgcuuacuaugugggcuaccugcagccuagaaccuuccugcugaaguacaacgagaacggcaccaucaccgacgccguggauugugcucuggauccucugagcgagacaaagugcacccugaaguccuucaccguggaaaagggcaucuaccagaccagcaacuuccgggugcagcccaccgaauccaucgugcgguuccccaauaucaccaaucugugccccuucggcgagguguucaaugccaccagauucgccucuguguacgccuggaaccggaagcggaucagcaauugcguggccgacuacuccgugcuguacaacuccgccagcuucagcaccuucaagugcuacggcguguccccuaccaagcugaacgaccugugcuucacaaacguguacgccgacagcuucgugauccggggagaugaagugcggcagauugccccuggacagacaggcaccaucgccgacuacaacuacaagcugcccgacgacuucaccggcugugugauugccuggaacagcaacaaccuggacuccaaagucggcggcaacuacaauuaccuguaccggcuguuccggaaguccaaucugaagcccuucgagcgggacaucuccaccgagaucuaucaggccggcagcaccccuuguaacggcgugaagggcuucaacugcuacuucccacugcaguccuacggcuuucagcccacauacggcgugggcuaucagcccuacagagugguggugcugagcuucgaacugcugcaugccccugccacagugugcggcccuaagaaaagcaccaaucucgugaagaacaaaugcgugaacuucaacuucaacggccugaccggcaccggcgugcugacagagagcaacaagaaguuccugccauuccagcaguuuggccgggauaucgccgauaccacagacgccguuagagauccccagacacuggaaauccuggacaucaccccuugcagcuucggcggagugucugugaucaccccuggcaccaacaccagcaaucagguggcagugcuguaccagggcgugaacuguaccgaagugcccguggccauucacgccgaucagcugacaccuacauggcggguguacuccaccggcagcaauguguuucagaccagagccggcugucugaucggagccgaguacgugaacaauagcuacgagugcgacauccccaucggcgcuggaaucugcgccagcuaccagacacagacaaacagcccucggagagccagaagcguggccagccagagcaucauugccuacacaaugucucugggcgccgagaacagcguggccuacuccaacaacucuaucgcuauccccaccaacuucaccaucagcgugaccacagagauccugccuguguccaugaccaagaccagcguggacugcaccauguacaucugcggcgauuccaccgagugcuccaaccugcugcugcaguacggcagcuucugcacccagcugaauagagcccugacagggaucgccguggaacaggacaagaacacccaagagguguucgcccaagugaagcagaucuacaagaccccuccuaucaaggacuucggcggcuucaauuucagccagauucugcccgauccuagcaagcccagcaagcggagcuucaucgaggaccugcuguucaacaaagugacacuggccgacgccggcuucaucaagcaguauggcgauugucugggcgacauugccgccagggaucugauuugcgcccagaaguuuaacggacugacagugcugccuccucugcugaccgaugagaugaucgcccaguacacaucugcccugcuggccggcacaaucacaagcggcuggacauuuggagcaggcgccgcucugcagauccccuuugcuaugcagauggccuaccgguucaacggcaucggagugacccagaaugugcuguacgagaaccagaagcugaucgccaaccaguucaacagcgccaucggcaagauccaggacagccugagcagcacagcaagcgcccugggaaagcugcaggacguggucaaccagaaugcccaggcacugaacacccuggucaagcagcuguccuccaacuucggcgccaucagcucugugcugaacgauauccugagcagacuggacaaggucgaggccgaggugcagaucgacagacugaucacaggcagacugcagagccuccagacauacgugacccagcagcugaucagagccgccgagauuagagccucugccaaucuggccgccaucaagaugucugagugugugcugggccagagcaagagaguggacuuuugcggcaagggcuaccaccugaugagcuucccucagucugccccucacggcgugguguuucugcacgugacauaugugcccgcucaagagaagaauuucaccaccgcuccagccaucugccacgacggcaaagcccacuuuccuagagaaggcguguucguguccaacggcacccauugguucgugacacagcggaacuucuacgagccccagaucaucaccaccgacaacaccuucgugucuggcaacugcgacgucgugaucggcauugugaacaauaccguguacgacccucugcagcccgagcuggacagcuucaaagaggaacuggacaaguacuuuaagaaccacacaagccccgacguggaccugggcgauaucagcggaaucaaugccagcgucgugaacauccagaaagagaucgaccggcugaacgagguggccaagaaucugaacgagagccugaucgaccugcaagaacuggggaaguacgagcaguacaucaaguggcccugguacaucuggcugggcuuuaucgccggacugauugccaucgugauggucacaaucaugcuguguugcaugaccagcugcuguagcugccugaagggcuguuguagcuguggcagcugcugcaaguucgacgaggacgauucugagcccgugcugaagggcgugaaacugcacuacacaugaggacuaguuauaagacugacuagcccgaugggccucccaacgggcccuccuccccuccuugcaccgagauuaauaaaaaaaaaaaaaaaaaaaaaaaaaaaaaaaaaaaaaaaaaaaaaaaaaaaaaaaaaaaaaaaaugcaucccccccccccccccccccccccccccccccaaaggcucuuuucagagccaccagaauu

SEQ ID NO: 23296 - RNA, 4039 nt, Artificial Sequence
  SARS-CoV-2/Wuhan/WIV05/2019__EPI_ISL_402128 spike protein mRNA gc mod (1-1273)(S13I_W152C_L452R_D614G)
aggagaaagcuuaccauguucguguuccuggugcugcugccucugguguccauccagugugugaaccugaccaccagaacacagcugccuccagccuacaccaacagcuuuaccagaggcguguacuaccccgacaagguguucagauccagcgugcugcacucuacccaggaccuguuccugccuuucuucagcaacgugaccugguuccacgccauccacguguccggcaccaauggcaccaagagauucgacaaccccgugcugcccuucaacgacgggguguacuuugccagcaccgagaaguccaacaucaucagaggcuggaucuucggcaccacacuggacagcaagacccagagccugcugaucgugaacaacgccaccaacguggucaucaaagugugcgaguuccaguucugcaacgaccccuuccugggcgucuacuaccacaagaacaacaagagcugcauggaaagcgaguuccggguguacagcagcgccaacaacugcaccuucgaguacgugucccagccuuuccugauggaccuggaaggcaagcagggcaacuucaagaaccugcgcgaguucguguuuaagaacaucgacggcuacuucaagaucuacagcaagcacaccccuaucaaccucgugcgggaucugccucagggcuucucugcucuggaaccccugguggaucugcccaucggcaucaacaucacccgguuucagacacugcuggcccugcacagaagcuaccugacaccuggcgauagcagcagcggauggacagcuggugccgccgcuuacuaugugggcuaccugcagccuagaaccuuccugcugaaguacaacgagaacggcaccaucaccgacgccguggauugugcucuggauccucugagcgagacaaagugcacccugaaguccuucaccguggaaaagggcaucuaccagaccagcaacuuccgggugcagcccaccgaauccaucgugcgguuccccaauaucaccaaucugugccccuucggcgagguguucaaugccaccagauucgccucuguguacgccuggaaccggaagcggaucagcaauugcguggccgacuacuccgugcuguacaacuccgccagcuucagcaccuucaagugcuacggcguguccccuaccaagcugaacgaccugugcuucacaaacguguacgccgacagcuucgugauccggggagaugaagugcggcagauugccccuggacagacaggcaagaucgccgacuacaacuacaagcugcccgacgacuucaccggcugugugauugccuggaacagcaacaaccuggacuccaaagucggcggcaacuacaauuaccgcuaccggcuguuccggaaguccaaucugaagcccuucgagcgggacaucuccaccgagaucuaucaggccggcagcaccccuuguaacggcguggaaggcuucaacugcuacuucccacugcaguccuacggcuuucagcccacaaauggcgugggcuaucagcccuacagagugguggugcugagcuucgaacugcugcaugccccugccacagugugcggcccuaagaaaagcaccaaucucgugaagaacaaaugcgugaacuucaacuucaacggccugaccggcaccggcgugcugacagagagcaacaagaaguuccugccauuccagcaguuuggccgggauaucgccgauaccacagacgccguuagagauccccagacacuggaaauccuggacaucaccccuugcagcuucggcggagugucugugaucaccccuggcaccaacaccagcaaucagguggcagugcuguaccagggcgugaacuguaccgaagugcccguggccauucacgccgaucagcugacaccuacauggcggguguacuccaccggcagcaauguguuucagaccagagccggcugucugaucggagccgagcacgugaacaauagcuacgagugcgacauccccaucggcgcuggaaucugcgccagcuaccagacacagacaaacagcccucggagagccagaagcguggccagccagagcaucauugccuacacaaugucucugggcgccgagaacagcguggccuacuccaacaacucuaucgcuauccccaccaacuucaccaucagcgugaccacagagauccugccuguguccaugaccaagaccagcguggacugcaccauguacaucugcggcgauuccaccgagugcuccaaccugcugcugcaguacggcagcuucugcacccagcugaauagagcccugacagggaucgccguggaacaggacaagaacacccaagagguguucgcccaagugaagcagaucuacaagaccccuccuaucaaggacuucggcggcuucaauuucagccagauucugcccgauccuagcaagcccagcaagcggagcuucaucgaggaccugcuguucaacaaagugacacuggccgacgccggcuucaucaagcaguauggcgauugucugggcgacauugccgccagggaucugauuugcgcccagaaguuuaacggacugacagugcugccuccucugcugaccgaugagaugaucgcccaguacacaucugcccugcuggccggcacaaucacaagcggcuggacauuuggagcaggcgccgcucugcagauccccuuugcuaugcagauggccuaccgguucaacggcaucggagugacccagaaugugcuguacgagaaccagaagcugaucgccaaccaguucaacagcgccaucggcaagauccaggacagccugagcagcacagcaagcgcccugggaaagcugcaggacguggucaaccagaaugcccaggcacugaacacccuggucaagcagcuguccuccaacuucggcgccaucagcucugugcugaacgauauccugagcagacuggacaaggucgaggccgaggugcagaucgacagacugaucacaggcagacugcagagccuccagacauacgugacccagcagcugaucagagccgccgagauuagagccucugccaaucuggccgccaccaagaugucugagugugugcugggccagagcaagagaguggacuuuugcggcaagggcuaccaccugaugagcuucccucagucugccccucacggcgugguguuucugcacgugacauaugugcccgcucaagagaagaauuucaccaccgcuccagccaucugccacgacggcaaagcccacuuuccuagagaaggcguguucguguccaacggcacccauugguucgugacacagcggaacuucuacgagccccagaucaucaccaccgacaacaccuucgugucuggcaacugcgacgucgugaucggcauugugaacaauaccguguacgacccucugcagcccgagcuggacagcuucaaagaggaacuggacaaguacuuuaagaaccacacaagccccgacguggaccugggcgauaucagcggaaucaaugccagcgucgugaacauccagaaagagaucgaccggcugaacgagguggccaagaaucugaacgagagccugaucgaccugcaagaacuggggaaguacgagcaguacaucaaguggcccugguacaucuggcugggcuuuaucgccggacugauugccaucgugauggucacaaucaugcuguguugcaugaccagcugcuguagcugccugaagggcuguuguagcuguggcagcugcugcaaguucgacgaggacgauucugagcccgugcugaagggcgugaaacugcacuacacaugaggacuaguuauaagacugacuagcccgaugggccucccaacgggcccuccuccccuccuugcaccgagauuaauaaaaaaaaaaaaaaaaaaaaaaaaaaaaaaaaaaaaaaaaaaaaaaaaaaaaaaaaaaaaaaaaugcaucccccccccccccccccccccccccccccccaaaggcucuuuucagagccaccagaauu

SEQ ID NO: 23297 - RNA, 4039 nt, Artificial Sequence; identical to SEQ ID NO: 163
  SARS-CoV-2/Wuhan/WIV05/2019__EPI_ISL_402128 spike protein mRNA gc (1-1273)(K986P_V987P) R9515, R10157

SEQ ID NO: 23298 - RNA, 4039 nt, Artificial Sequence; identical to SEQ ID NO: 22819
  SARS-CoV-2/Wuhan/WIV05/2019__EPI_ISL_402128 spike protein mRNA gc (1-1273)(K986P_V987P_ D614G) R10165

SEQ ID NO: 23299 - RNA, 4039 nt, Artificial Sequence; identical to SEQ ID NO: 22821
  SARS-CoV-2/Wuhan/WIV05/2019__EPI_ISL_402128 spike protein mRNA gc (1-1273)(K986P_V987P_A222V_D614G) R10277

SEQ ID NO: 23300 - RNA, 4039 nt, Artificial Sequence; identical to SEQ ID NO: 22823
  SARS-CoV-2/Wuhan/WIV05/2019__EPI_ISL_402128 spike protein mRNA gc (1-1273)(K986P_V987P_N439K_D614G) R10297

SEQ ID NO: 23301 - RNA, 4039 nt, Artificial Sequence; identical to SEQ ID NO: 22825
  SARS-CoV-2/Wuhan/WIV05/2019__EPI_ISL_402128 spike protein mRNA gc (1-1273)(K986P_V987P_S477N_D614G) R10285

SEQ ID NO: 23302 - RNA, 4039 nt, Artificial Sequence; identical to SEQ ID NO: 22827
  SARS-CoV-2/Wuhan/WIV05/2019__EPI_ISL_402128 spike protein mRNA gc (1-1273)(K986P_V987P_N501Y_D614G) R10351

SEQ ID NO: 23303 - RNA, 4033 nt, Artificial Sequence; identical to SEQ ID NO: 22829
  SARS-CoV-2/Wuhan/WIV05/2019__EPI_ISL_402128 spike protein mRNA gc (1-1273)(K986P_V987P_H69del_V70del_D614G) R10273

SEQ ID NO: 23304 - RNA, 4039 nt, Artificial Sequence; identical to SEQ ID NO: 22831
  SARS-CoV-2/Wuhan/WIV05/2019__EPI_ISL_402128 spike protein mRNA gc (1-1273)(K986P_V987P_Y453F_D614G) R10281

SEQ ID NO: 23305 - RNA, 4039 nt, Artificial Sequence; identical to SEQ ID NO: 22833
  SARS-CoV-2/Wuhan/WIV05/2019__EPI_ISL_402128 spike protein mRNA gc (1-1273)(K986P_V987P_D614G_I692V) R10289

SEQ ID NO: 23306 - RNA, 4039 nt, Artificial Sequence; identical to SEQ ID NO: 22835
  SARS-CoV-2/Wuhan/WIV05/2019__EPI_ISL_402128 spike protein mRNA gc (1-1273)(K986P_V987P_D614G_M1229I) R10345

SEQ ID NO: 23307 - RNA, 4033 nt, Artificial Sequence; identical to SEQ ID NO: 22837
  SARS-CoV-2/Wuhan/WIV05/2019__EPI_ISL_402128 spike protein mRNA gc (1-1273)(K986P_V987P_H69del_V70del_A222V_Y453F_S477N_D614G_I692V) R10293

SEQ ID NO: 23308 - RNA, 4033 nt, Artificial Sequence; identical to SEQ ID NO: 22839
  SARS-CoV-2/Wuhan/WIV05/2019__EPI_ISL_402128 spike protein mRNA gc (1-1273)(K986P_V987P_H69del_V70del_Y453F_D614G_I692V_M1229I) R10347

SEQ ID NO: 23309 - RNA, 4030 nt, Artificial Sequence
  SARS-CoV-2/Wuhan/WIV05/2019__EPI_ISL_402128 spike protein mRNA gc (1-1273)(K986P_V987P_K986P_V987P_H69del_V70del_Y144del_N501Y_A570 D_D614G_P681H_T716I_S982A_D1118H) R10353
aggagaaagcuuaccauguucguguuccugguccuccugccccuggugagcucccagugcgugaaccucaccacccgcacgcagcugccgcccgccuacaccaacagcuucacccggggcgucuacuaccccgacaagguguuccgcuccagcgugcugcacuccacccaggaccucuuccugcccuucuucagcaacgucacgugguuccacgccaucuccgggaccaacggcaccaagcgguucgacaacccggugcugcccuucaacgacggggucuacuucgcgagcaccgagaaguccaacaucauccgcggcuggaucuucgggacgacccucgacagcaagacccagucccugcugaucgugaacaacgccaccaacguggucaucaaggugugcgaguuccaguucugcaacgaccccuuccucggcguguaccacaagaacaacaagagcuggauggaguccgaguuccgggucuacagcuccgccaacaacugcacguucgaguacgugagccagcccuuccugauggaccuggagggcaagcaggggaacuucaagaaccuccgcgaguucguguucaagaacaucgacggcuacuucaagaucuacuccaagcacaccccgaucaaccugguccgggaccugccccagggguucagcgcccucgagccccugguggaccugcccaucggcaucaacaucacccgcuuccagacccuccuggcccugcaccgguccuaccucacgccgggggacagcagcuccggcuggaccgcgggcgccgccgccuacuacgugggguaccugcagccccgcaccuuccugcucaaguacaacgagaacggcaccaucacggacgcggucgacugcgcccuggacccccugagcgagaccaagugcacccucaaguccuucaccguggagaaggggaucuaccagacgagcaacuuccgggugcagcccaccgaguccaucguccgcuucccgaacaucaccaaccugugccccuucggcgagguguucaacgccacccgguucgccagcgucuacgccuggaaccgcaagcggaucuccaacugcguggcggacuacagcgugcuguacaacuccgccagcuucuccacguucaagugcuacggcgucagccccaccaagcucaacgaccugugcuucaccaacguguacgccgacuccuucgugauccgcggggacgagguccggcagaucgcccccggccagaccgggaagaucgccgacuacaacuacaagcugccggacgacuucacgggcugcgugaucgcguggaacagcaacaaccucgacuccaaggucgggggcaacuacaacuaccuguaccgccuguuccgcaagagcaaccucaagcccuucgagcgggacaucuccaccgagaucuaccaggccggcagcacccccugcaacgggguggagggcuucaacugcuacuucccccugcaguccuacggguuccagccgaccuacggcgugggguaccagcccuaccggguggucgugcugagcuucgagcuccugcacgcccccgccacggugugcggccccaagaaguccaccaaccuggucaagaacaagugcgugaacuucaacuucaacggccucaccgggaccggcgugcugaccgagagcaacaagaaguuccugccguuccagcaguucgggcgcgacaucgacgacacgaccgacgcgguccgcgacccccagacccuggagauccucgacaucacccccugcagcuucggcgggguguccgugaucacgccgggcaccaacaccagcaaccaggucgccgugcuguaccagggcgugaacugcaccgagguccccguggccauccacgccgaccagcugacgcccaccuggcggguguacuccaccggcagcaacgucuuccagacccgcgccgggugccucaucggcgcggagcacgugaacaacuccuacgagugcgacauccccaucggggccggcaucugcgccagcuaccagacgcagaccaacucccaccggcgcgcccggagcguggcgucccagagcaucaucgccuacaccaugucccugggcgccgagaacagcgucgccuacuccaacaacagcaucgccauccccaucaacuucacgaucuccgugaccaccgagauccugcccgugagcaugaccaagacgagcgucgacugcaccauguacaucugcggggacuccaccgagugcagcaaccuccugcugcaguacggcuccuucugcacccagcucaaccgcgcgcugacggggaucgccguggagcaggacaagaacacccaggagguguucgcccaggucaagcagaucuacaagacgcccccgaucaaggacuucggcggguucaacuucagccagauccugcccgaccccuccaagcccagcaagcgguccuucaucgaggaccuccuguucaacaaggugacccuggccgacgccggcuucaucaagcaguacggcgacugccucggggacaucgcggcccgcgaccugaucugcgcccagaaguucaacggccugaccgugcucccgccccugcugaccgacgagaugaucgcccaguacaccagcgcccuccuggcggggaccaucacguccggcuggaccuucggggccggcgccgcccugcagauccccuucgcgaugcagauggccuaccgguucaacggcaucggggucacccagaacgugcucuacgagaaccagaagcugaucgccaaccaguucaacagcgccaucggcaagauccaggacucccugagcuccaccgccagcgcgcucgggaagcugcaggacguggucaaccagaacgcccaggcccugaacacgcucgugaagcagcuguccagcaacuucggcgccaucuccagcgugcugaacgacauccucgcccgccuggacccgcccgaggccgaggugcagaucgaccggcugaucaccgggcgccuccagagccugcagaccuacgugacccagcagcugauccgggcggccgagauccgcgccagcgccaaccucgccgcgaccaagauguccgagugcguccugggccagagcaagcggguggacuucugcggcaagggguaccaccugauguccuucccccagagcgccccgcacggcguggucuuccuccacgugacguacguccccgcccaggagaagaacuucaccaccgcccccgcgaucugccacgacgggaaggcccacuucccccgcgagggcguguucguguccaacgggacccacugguucgucacgcagcggaacuucuacgagccgcagaucaucaccacccacaacaccuucgugagcggcaacugcgacguggucaucggcaucgugaacaacacgguguacgacccccugcagcccgagcuggacuccuucaaggaggagcucgacaaguacuucaagaaccacaccagccccgacgucgaccugggggacaucuccggcaucaacgccagcguggugaacauccagaaggagaucgaccgccugaacgaggucgccaagaaccucaacgagucccugaucgaccugcaggagcucgggaaguacgagcaguacaucaaguggccgugguacaucuggcugggcuucaucgccggccugaucgcgaucgugauggugaccaucaugcucugcugcaugaccagcugcugcuccugccugaaggggugcugcagcugcggcuccugcugcaaguucgacgaggacgacagcgagcccguccugaagggggugaagcuccacuacacgugaggacuaguuauaagacugacuagcccgaugggccucccaacgggcccuccuccccuccuugcaccgagauuaauaaaaaaaaaaaaaaaaaaaaaaaaaaaaaaaaaaaaaaaaaaaaaaaaaaaaaaaaaaaaaaaaugcaucccccccccccccccccccccccccccccccaaaggcucuuuucagagccaccagaauu

SEQ ID NO: 23310 - RNA, 4039 nt, Artificial Sequence
  SARS-CoV-2/Wuhan/WIV05/2019__EPI_ISL_402128 spike protein mRNA gc (1-1273)(K986P_V987P_K986P_V987P_K417N_E484K_N501Y_D614G) R10360
aggagaaagcuuaccauguucguguuccugguccuccugccccuggugagcucccagugcgugaaccucaccacccgcacgcagcugccgcccgccuacaccaacagcuucacccggggcgucuacuaccccgacaagguguuccgcuccagcgugcugcacuccacccaggaccucuuccugcccuucuucagcaacgucacgugguuccacgccauccacguguccgggaccaacggcaccaagcgguucgacaacccggugcugcccuucaacgacggggucuacuucgcgagcaccgagaaguccaacaucauccgcggcuggaucuucgggacgacccucgacagcaagacccagucccugcugaucgugaacaacgccaccaacguggucaucaaggugugcgaguuccaguucugcaacgaccccuuccucggcguguacuaccacaagaacaacaagagcuggauggaguccgaguuccgggucuacagcuccgccaacaacugcacguucgaguacgugagccagcccuuccugauggaccuggagggcaagcaggggaacuucaagaaccuccgcgaguucguguucaagaacaucgacggcuacuucaagaucuacuccaagcacaccccgaucaaccugguccgggaccugccccagggguucagcgcccucgagccccugguggaccugcccaucggcaucaacaucacccgcuuccagacccuccuggcccugcaccgguccuaccucacgccgggggacagcagcuccggcuggaccgcgggcgccgccgccuacuacgugggguaccugcagccccgcaccuuccugcucaaguacaacgagaacggcaccaucacggacgcggucgacugcgcccuggacccccugagcgagaccaagugcacccucaaguccuucaccguggagaaggggaucuaccagacgagcaacuuccgggugcagcccaccgaguccaucguccgcuucccgaacaucaccaaccugugccccuucggcgagguguucaacgccacccgguucgccagcgucuacgccuggaaccgcaagcggaucuccaacugcguggcggacuacagcgugcuguacaacuccgccagcuucuccacguucaagugcuacggcgucagccccaccaagcucaacgaccugugcuucaccaacguguacgccgacuccuucgugauccgcggggacgagguccggcagaucgcccccggccagaccgggaacaucgccgacuacaacuacaagcugccggacgacuucacgggcugcgugaucgcguggaacagcaacaaccucgacuccaaggucgggggcaacuacaacuaccuguaccgccuguuccgcaagagcaaccucaagcccuucgagcgggacaucuccaccgagaucuaccaggccggcagcacccccugcaacggggugaagggcuucaacugcuacuucccccugcaguccuacggguuccagccgaccuacggcgugggguaccagcccuaccggguggucgugcugagcuucgagcuccugcacgcccccgccacggugugcggccccaagaaguccaccaaccuggucaagaacaagugcgugaacuucaacuucaacggccucaccgggaccggcgugcugaccgagagcaacaagaaguuccugccguuccagcaguucgggcgcgacaucgccgacacgaccgacgcgguccgcgacccccagacccuggagauccucgacaucacccccugcagcuucggcgggguguccgugaucacgccgggcaccaacaccagcaaccaggucgccgugcuguaccagggcgugaacugcaccgagguccccguggccauccacgccgaccagcugacgcccaccuggcggguguacuccaccggcagcaacgucuuccagacccgcgccgggugccucaucggcgcggagcacgugaacaacuccuacgagugcgacauccccaucggggccggcaucugcgccagcuaccagacgcagaccaacuccccgcggcgcgcccggagcguggcgucccagagcaucaucgccuacaccaugucccugggcgccgagaacagcgucgccuacuccaacaacagcaucgccauccccaccaacuucacgaucuccgugaccaccgagauccugcccgugagcaugaccaagacgagcgucgacugcaccauguacaucugcggggacuccaccgagugcagcaaccuccugcugcaguacggcuccuucugcacccagcucaaccgcgcgcugacggggaucgccguggagcaggacaagaacacccaggagguguucgcccaggucaagcagaucuacaagacgcccccgaucaaggacuucggcggguucaacuucagccagauccugcccgaccccuccaagcccagcaagcgguccuucaucgaggaccuccuguucaacaaggugacccuggccgacgccggcuucaucaagcaguacggcgacugccucggggacaucgcggcccgcgaccugaucugcgcccagaaguucaacggccugaccgugcucccgccccugcugaccgacgagaugaucgcccaguacaccagcgcccuccuggcggggaccaucacguccggcuggaccuucggggccggcgccgcccugcagauccccuucgcgaugcagauggccuaccgguucaacggcaucggggucacccagaacgugcucuacgagaaccagaagcugaucgccaaccaguucaacagcgccaucggcaagauccaggacucccugagcuccaccgccagcgcgcucgggaagcugcaggacguggucaaccagaacgcccaggcccugaacacgcucgugaagcagcuguccagcaacuucggcgccaucuccagcgugcugaacgacauccucucccgccuggacccgcccgaggccgaggugcagaucgaccggcugaucaccgggcgccuccagagccugcagaccuacgugacccagcagcugauccgggcggccgagauccgcgccagcgccaaccucgccgcgaccaagauguccgagugcguccugggccagagcaagcggguggacuucugcggcaagggguaccaccugauguccuucccccagagcgccccgcacggcguggucuuccuccacgugacguacguccccgcccaggagaagaacuucaccaccgcccccgcgaucugccacgacgggaaggcccacuucccccgcgagggcguguucguguccaacgggacccacugguucgucacgcagcggaacuucuacgagccgcagaucaucaccaccgacaacaccuucgugagcggcaacugcgacguggucaucggcaucgugaacaacacgguguacgacccccugcagcccgagcuggacuccuucaaggaggagcucgacaaguacuucaagaaccacaccagccccgacgucgaccugggggacaucuccggcaucaacgccagcguggugaacauccagaaggagaucgaccgccugaacgaggucgccaagaaccucaacgagucccugaucgaccugcaggagcucgggaaguacgagcaguacaucaaguggccgugguacaucuggcugggcuucaucgccggccugaucgcgaucgugauggugaccaucaugcucugcugcaugaccagcugcugcuccugccugaaggggugcugcagcugcggcuccugcugcaaguucgacgaggacgacagcgagcccguccugaagggggugaagcuccacuacacgugaggacuaguuauaagacugacuagcccgaugggccucccaacgggcccuccuccccuccuugcaccgagauuaauaaaaaaaaaaaaaaaaaaaaaaaaaaaaaaaaaaaaaaaaaaaaaaaaaaaaaaaaaaaaaaaaugcaucccccccccccccccccccccccccccccccaaaggcucuuuucagagccaccagaauu

SEQ ID NO: 23311 - RNA, 4030 nt, Artificial Sequence
  SARS-CoV-2/Wuhan/WIV05/2019__EPI_ISL_402128 spike protein mRNA gc (1-1273)(K986P_V987P_K986P_V987P_L18F_D80A_D215G_L242del_A243del_ L244del_R246I_K417N_E484K_N501Y_D614G_A701V) R10379
aggagaaagcuuaccauguucguguuccugguccuccugccccuggugagcucccagugcgugaacuucaccacccgcacgcagcugccgcccgccuacaccaacagcuucacccggggcgucuacuaccccgacaagguguuccgcuccagcgugcugcacuccacccaggaccucuuccugcccuucuucagcaacgucacgugguuccacgccauccacguguccgggaccaacggcaccaagcgguucgccaacccggugcugcccuucaacgacggggucuacuucgcgagcaccgagaaguccaacaucauccgcggcuggaucuucgggacgacccucgacagcaagacccagucccugcugaucgugaacaacgccaccaacguggucaucaaggugugcgaguuccaguucugcaacgaccccuuccucggcguguacuaccacaagaacaacaagagcuggauggaguccgaguuccgggucuacagcuccgccaacaacugcacguucgaguacgugagccagcccuuccugauggaccuggagggcaagcaggggaacuucaagaaccuccgcgaguucguguucaagaacaucgacggcuacuucaagaucuacuccaagcacaccccgaucaaccugguccggggccugccccagggguucagcgcccucgagccccugguggaccugcccaucggcaucaacaucacccgcuuccagacccuccacaucuccuaccucacgccgggggacagcagcuccggcuggaccgcgggcgccgccgccuacuacgugggguaccugcagccccgcaccuuccugcucaaguacaacgagaacggcaccaucacggacgcggucgacugcgcccuggacccccugagcgagaccaagugcacccucaaguccuucaccguggagaaggggaucuaccagacgagcaacuuccgggugcagcccaccgaguccaucguccgcuucccgaacaucaccaaccugugccccuucggcgagguguucaacgccacccgguucgccagcgucuacgccuggaaccgcaagcggaucuccaacugcguggcggacuacagcgugcuguacaacuccgccagcuucuccacguucaagugcuacggcgucagccccaccaagcucaacgaccugugcuucaccaacguguacgccgacuccuucgugauccgcggggacgagguccggcagaucgcccccggccagaccgggaacaucgccgacuacaacuacaagcugccggacgacuucacgggcugcgugaucgcguggaacagcaacaaccucgacuccaaggucgggggcaacuacaacuaccuguaccgccuguuccgcaagagcaaccucaagcccuucgagcgggacaucuccaccgagaucuaccaggccggcagcacccccugcaacggggugaagggcuucaacugcuacuucccccugcaguccuacggguuccagccgaccuacggcgugggguaccagcccuaccggguggucgugcugagcuucgagcuccugcacgcccccgccacggugugcggccccaagaaguccaccaaccuggucaagaacaagugcgugaacuucaacuucaacggccucaccgggaccggcgugcugaccgagagcaacaagaaguuccugccguuccagcaguucgggcgcgacaucgccgacacgaccgacgcgguccgcgacccccagacccuggagauccucgacaucacccccugcagcuucggcgggguguccgugaucacgccgggcaccaacaccagcaaccaggucgccgugcuguaccagggcgugaacugcaccgagguccccguggccauccacgccgaccagcugacgcccaccuggcggguguacuccaccggcagcaacgucuuccagacccgcgccgggugccucaucggcgcggagcacgugaacaacuccuacgagugcgacauccccaucggggccggcaucugcgccagcuaccagacgcagaccaacuccccgcggcgcgcccggagcguggcgucccagagcaucaucgccuacaccaugucccugggcguggagaacagcgucgccuacuccaacaacagcaucgccauccccaccaacuucacgaucuccgugaccaccgagauccugcccgugagcaugaccaagacgagcgucgacugcaccauguacaucugcggggacuccaccgagugcagcaaccuccugcugcaguacggcuccuucugcacccagcucaaccgcgcgcugacggggaucgccguggagcaggacaagaacacccaggagguguucgcccaggucaagcagaucuacaagacgcccccgaucaaggacuucggcggguucaacuucagccagauccugcccgaccccuccaagcccagcaagcgguccuucaucgaggaccuccuguucaacaaggugacccuggccgacgccggcuucaucaagcaguacggcgacugccucggggacaucgcggcccgcgaccugaucugcgcccagaaguucaacggccugaccgugcucccgccccugcugaccgacgagaugaucgcccaguacaccagcgcccuccuggcggggaccaucacguccggcuggaccuucggggccggcgccgcccugcagauccccuucgcgaugcagauggccuaccgguucaacggcaucggggucacccagaacgugcucuacgagaaccagaagcugaucgccaaccaguucaacagcgccaucggcaagauccaggacucccugagcuccaccgccagcgcgcucgggaagcugcaggacguggucaaccagaacgcccaggcccugaacacgcucgugaagcagcuguccagcaacuucggcgccaucuccagcgugcugaacgacauccucucccgccuggacccgcccgaggccgaggugcagaucgaccggcugaucaccgggcgccuccagagccugcagaccuacgugacccagcagcugauccgggcggccgagauccgcgccagcgccaaccucgccgcgaccaagauguccgagugcguccugggccagagcaagcggguggacuucugcggcaagggguaccaccugauguccuucccccagagcgccccgcacggcguggucuuccuccacgugacguacguccccgcccaggagaagaacuucaccaccgcccccgcgaucugccacgacgggaaggcccacuucccccgcgagggcguguucguguccaacgggacccacugguucgucacgcagcggaacuucuacgagccgcagaucaucaccaccgacaacaccuucgugagcggcaacugcgacguggucaucggcaucgugaacaacacgguguacgacccccugcagcccgagcuggacuccuucaaggaggagcucgacaaguacuucaagaaccacaccagccccgacgucgaccugggggacaucuccggcaucaacgccagcguggugaacauccagaaggagaucgaccgccugaacgaggucgccaagaaccucaacgagucccugaucgaccugcaggagcucgggaaguacgagcaguacaucaaguggccgugguacaucuggcugggcuucaucgccggccugaucgcgaucgugauggugaccaucaugcucugcugcaugaccagcugcugcuccugccugaaggggugcugcagcugcggcuccugcugcaaguucgacgaggacgacagcgagcccguccugaagggggugaagcuccacuacacgugaggacuaguuauaagacugacuagcccgaugggccucccaacgggcccuccuccccuccuugcaccgagauuaauaaaaaaaaaaaaaaaaaaaaaaaaaaaaaaaaaaaaaaaaaaaaaaaaaaaaaaaaaaaaaaaaugcaucccccccccccccccccccccccccccccccaaaggcucuuuucagagccaccagaauu

SEQ ID NO: 23312 - RNA, 4039 nt, Artificial Sequence
  SARS-CoV-2/Wuhan/WIV05/2019__EPI_ISL_402128 spike protein mRNA gc (1-1273)(K986P_V987P_K986P_V987P_E484K_D614G) R10378
aggagaaagcuuaccauguucguguuccugguccuccugccccuggugagcucccagugcgugaaccucaccacccgcacgcagcugccgcccgccuacaccaacagcuucacccggggcgucuacuaccccgacaagguguuccgcuccagcgugcugcacuccacccaggaccucuuccugcccuucuucagcaacgucacgugguuccacgccauccacguguccgggaccaacggcaccaagcgguucgacaacccggugcugcccuucaacgacggggucuacuucgcgagcaccgagaaguccaacaucauccgcggcuggaucuucgggacgacccucgacagcaagacccagucccugcugaucgugaacaacgccaccaacguggucaucaaggugugcgaguuccaguucugcaacgaccccuuccucggcguguacuaccacaagaacaacaagagcuggauggaguccgaguuccgggucuacagcuccgccaacaacugcacguucgaguacgugagccagcccuuccugauggaccuggagggcaagcaggggaacuucaagaaccuccgcgaguucguguucaagaacaucgacggcuacuucaagaucuacuccaagcacaccccgaucaaccugguccgggaccugccccagggguucagcgcccucgagccccugguggaccugcccaucggcaucaacaucacccgcuuccagacccuccuggcccugcaccgguccuaccucacgccgggggacagcagcuccggcuggaccgcgggcgccgccgccuacuacgugggguaccugcagccccgcaccuuccugcucaaguacaacgagaacggcaccaucacggacgcggucgacugcgcccuggacccccugagcgagaccaagugcacccucaaguccuucaccguggagaaggggaucuaccagacgagcaacuuccgggugcagcccaccgaguccaucguccgcuucccgaacaucaccaaccugugccccuucggcgagguguucaacgccacccgguucgccagcgucuacgccuggaaccgcaagcggaucuccaacugcguggcggacuacagcgugcuguacaacuccgccagcuucuccacguucaagugcuacggcgucagccccaccaagcucaacgaccugugcuucaccaacguguacgccgacuccuucgugauccgcggggacgagguccggcagaucgcccccggccagaccgggaagaucgccgacuacaacuacaagcugccggacgacuucacgggcugcgugaucgcguggaacagcaacaaccucgacuccaaggucgggggcaacuacaacuaccuguaccgccuguuccgcaagagcaaccucaagcccuucgagcgggacaucuccaccgagaucuaccaggccggcagcacccccugcaacggggugaagggcuucaacugcuacuucccccugcaguccuacggguuccagccgaccaacggcgugggguaccagcccuaccggguggucgugcugagcuucgagcuccugcacgcccccgccacggugugcggccccaagaaguccaccaaccuggucaagaacaagugcgugaacuucaacuucaacggccucaccgggaccggcgugcugaccgagagcaacaagaaguuccugccguuccagcaguucgggcgcgacaucgccgacacgaccgacgcgguccgcgacccccagacccuggagauccucgacaucacccccugcagcuucggcgggguguccgugaucacgccgggcaccaacaccagcaaccaggucgccgugcuguaccagggcgugaacugcaccgagguccccguggccauccacgccgaccagcugacgcccaccuggcggguguacuccaccggcagcaacgucuuccagacccgcgccgggugccucaucggcgcggagcacgugaacaacuccuacgagugcgacauccccaucggggccggcaucugcgccagcuaccagacgcagaccaacuccccgcggcgcgcccggagcguggcgucccagagcaucaucgccuacaccaugucccugggcgccgagaacagcgucgccuacuccaacaacagcaucgccauccccaccaacuucacgaucuccgugaccaccgagauccugcccgugagcaugaccaagacgagcgucgacugcaccauguacaucugcggggacuccaccgagugcagcaaccuccugcugcaguacggcuccuucugcacccagcucaaccgcgcgcugacggggaucgccguggagcaggacaagaacacccaggagguguucgcccaggucaagcagaucuacaagacgcccccgaucaaggacuucggcggguucaacuucagccagauccugcccgaccccuccaagcccagcaagcgguccuucaucgaggaccuccuguucaacaaggugacccuggccgacgccggcuucaucaagcaguacggcgacugccucggggacaucgcggcccgcgaccugaucugcgcccagaaguucaacggccugaccgugcucccgccccugcugaccgacgagaugaucgcccaguacaccagcgcccuccuggcggggaccaucacguccggcuggaccuucggggccggcgccgcccugcagauccccuucgcgaugcagauggccuaccgguucaacggcaucggggucacccagaacgugcucuacgagaaccagaagcugaucgccaaccaguucaacagcgccaucggcaagauccaggacucccugagcuccaccgccagcgcgcucgggaagcugcaggacguggucaaccagaacgcccaggcccugaacacgcucgugaagcagcuguccagcaacuucggcgccaucuccagcgugcugaacgacauccucucccgccuggacccgcccgaggccgaggugcagaucgaccggcugaucaccgggcgccuccagagccugcagaccuacgugacccagcagcugauccgggcggccgagauccgcgccagcgccaaccucgccgcgaccaagauguccgagugcguccugggccagagcaagcggguggacuucugcggcaagggguaccaccugauguccuucccccagagcgccccgcacggcguggucuuccuccacgugacguacguccccgcccaggagaagaacuucaccaccgcccccgcgaucugccacgacgggaaggcccacuucccccgcgagggcguguucguguccaacgggacccacugguucgucacgcagcggaacuucuacgagccgcagaucaucaccaccgacaacaccuucgugagcggcaacugcgacguggucaucggcaucgugaacaacacgguguacgacccccugcagcccgagcuggacuccuucaaggaggagcucgacaaguacuucaagaaccacaccagccccgacgucgaccugggggacaucuccggcaucaacgccagcguggugaacauccagaaggagaucgaccgccugaacgaggucgccaagaaccucaacgagucccugaucgaccugcaggagcucgggaaguacgagcaguacaucaaguggccgugguacaucuggcugggcuucaucgccggccugaucgcgaucgugauggugaccaucaugcucugcugcaugaccagcugcugcuccugccugaaggggugcugcagcugcggcuccugcugcaaguucgacgaggacgacagcgagcccguccugaagggggugaagcuccacuacacgugaggacuaguuauaagacugacuagcccgaugggccucccaacgggcccuccuccccuccuugcaccgagauuaauaaaaaaaaaaaaaaaaaaaaaaaaaaaaaaaaaaaaaaaaaaaaaaaaaaaaaaaaaaaaaaaaugcaucccccccccccccccccccccccccccccccaaaggcucuuuucagagccaccagaauu

SEQ ID NO: 23313 - RNA, 4039 nt, Artificial Sequence
  SARS-CoV-2/Wuhan/WIV05/2019__EPI_ISL_402128 spike protein mRNA gc (1-1273)(K986P_V987P_K986P_V987P_L18F_T20N_P26S_D138Y_R190S_K417T _E484K_N501Y_D614G_H655Y_T1027I) R10380
aggagaaagcuuaccauguucguguuccugguccuccugccccuggugagcucccagugcgugaacuucaccaaccgcacgcagcugccgagcgccuacaccaacagcuucacccggggcgucuacuaccccgacaagguguuccgcuccagcgugcugcacuccacccaggaccucuuccugcccuucuucagcaacgucacgugguuccacgccauccacguguccgggaccaacggcaccaagcgguucgacaacccggugcugcccuucaacgacggggucuacuucgcgagcaccgagaaguccaacaucauccgcggcuggaucuucgggacgacccucgacagcaagacccagucccugcugaucgugaacaacgccaccaacguggucaucaaggugugcgaguuccaguucugcaacuaccccuuccucggcguguacuaccacaagaacaacaagagcuggauggaguccgaguuccgggucuacagcuccgccaacaacugcacguucgaguacgugagccagcccuuccugauggaccuggagggcaagcaggggaacuucaagaaccucagcgaguucguguucaagaacaucgacggcuacuucaagaucuacuccaagcacaccccgaucaaccugguccgggaccugccccagggguucagcgcccucgagccccugguggaccugcccaucggcaucaacaucacccgcuuccagacccuccuggcccugcaccgguccuaccucacgccgggggacagcagcuccggcuggaccgcgggcgccgccgccuacuacgugggguaccugcagccccgcaccuuccugcucaaguacaacgagaacggcaccaucacggacgcggucgacugcgcccuggacccccugagcgagaccaagugcacccucaaguccuucaccguggagaaggggaucuaccagacgagcaacuuccgggugcagcccaccgaguccaucguccgcuucccgaacaucaccaaccugugccccuucggcgagguguucaacgccacccgguucgccagcgucuacgccuggaaccgcaagcggaucuccaacugcguggcggacuacagcgugcuguacaacuccgccagcuucuccacguucaagugcuacggcgucagccccaccaagcucaacgaccugugcuucaccaacguguacgccgacuccuucgugauccgcggggacgagguccggcagaucgcccccggccagaccgggaccaucgccgacuacaacuacaagcugccggacgacuucacgggcugcgugaucgcguggaacagcaacaaccucgacuccaaggucgggggcaacuacaacuaccuguaccgccuguuccgcaagagcaaccucaagcccuucgagcgggacaucuccaccgagaucuaccaggccggcagcacccccugcaacggggugaagggcuucaacugcuacuucccccugcaguccuacggguuccagccgaccuacggcgugggguaccagcccuaccggguggucgugcugagcuucgagcuccugcacgcccccgccacggugugcggccccaagaaguccaccaaccuggucaagaacaagugcgugaacuucaacuucaacggccucaccgggaccggcgugcugaccgagagcaacaagaaguuccugccguuccagcaguucgggcgcgacaucgccgacacgaccgacgcgguccgcgacccccagacccuggagauccucgacaucacccccugcagcuucggcgggguguccgugaucacgccgggcaccaacaccagcaaccaggucgccgugcuguaccagggcgugaacugcaccgagguccccguggccauccacgccgaccagcugacgcccaccuggcggguguacuccaccggcagcaacgucuuccagacccgcgccgggugccucaucggcgcggaguacgugaacaacuccuacgagugcgacauccccaucggggccggcaucugcgccagcuaccagacgcagaccaacuccccgcggcgcgcccggagcguggcgucccagagcaucaucgccuacaccaugucccugggcgccgagaacagcgucgccuacuccaacaacagcaucgccauccccaccaacuucacgaucuccgugaccaccgagauccugcccgugagcaugaccaagacgagcgucgacugcaccauguacaucugcggggacuccaccgagugcagcaaccuccugcugcaguacggcuccuucugcacccagcucaaccgcgcgcugacggggaucgccguggagcaggacaagaacacccaggagguguucgcccaggucaagcagaucuacaagacgcccccgaucaaggacuucggcggguucaacuucagccagauccugcccgaccccuccaagcccagcaagcgguccuucaucgaggaccuccuguucaacaaggugacccuggccgacgccggcuucaucaagcaguacggcgacugccucggggacaucgcggcccgcgaccugaucugcgcccagaaguucaacggccugaccgugcucccgccccugcugaccgacgagaugaucgcccaguacaccagcgcccuccuggcggggaccaucacguccggcuggaccuucggggccggcgccgcccugcagauccccuucgcgaugcagauggccuaccgguucaacggcaucggggucacccagaacgugcucuacgagaaccagaagcugaucgccaaccaguucaacagcgccaucggcaagauccaggacucccugagcuccaccgccagcgcgcucgggaagcugcaggacguggucaaccagaacgcccaggcccugaacacgcucgugaagcagcuguccagcaacuucggcgccaucuccagcgugcugaacgacauccucucccgccuggacccgcccgaggccgaggugcagaucgaccggcugaucaccgggcgccuccagagccugcagaccuacgugacccagcagcugauccgggcggccgagauccgcgccagcgccaaccucgccgcgaucaagauguccgagugcguccugggccagagcaagcggguggacuucugcggcaagggguaccaccugauguccuucccccagagcgccccgcacggcguggucuuccuccacgugacguacguccccgcccaggagaagaacuucaccaccgcccccgcgaucugccacgacgggaaggcccacuucccccgcgagggcguguucguguccaacgggacccacugguucgucacgcagcggaacuucuacgagccgcagaucaucaccaccgacaacaccuucgugagcggcaacugcgacguggucaucggcaucgugaacaacacgguguacgacccccugcagcccgagcuggacuccuucaaggaggagcucgacaaguacuucaagaaccacaccagccccgacgucgaccugggggacaucuccggcaucaacgccagcguggugaacauccagaaggagaucgaccgccugaacgaggucgccaagaaccucaacgagucccugaucgaccugcaggagcucgggaaguacgagcaguacaucaaguggccgugguacaucuggcugggcuucaucgccggccugaucgcgaucgugauggugaccaucaugcucugcugcaugaccagcugcugcuccugccugaaggggugcugcagcugcggcuccugcugcaaguucgacgaggacgacagcgagcccguccugaagggggugaagcuccacuacacgugaggacuaguuauaagacugacuagcccgaugggccucccaacgggcccuccuccccuccuugcaccgagauuaauaaaaaaaaaaaaaaaaaaaaaaaaaaaaaaaaaaaaaaaaaaaaaaaaaaaaaaaaaaaaaaaaugcaucccccccccccccccccccccccccccccccaaaggcucuuuucagagccaccagaauu

SEQ ID NO: 23314 - RNA, 4039 nt, Artificial Sequence
  SARS-CoV-2/Wuhan/WIV05/2019__EPI_ISL_402128 spike protein mRNA gc (1-1273)(K986P_V987P_K986P_V987P_S13I_W152C_L452R_D614G) R10381
aggagaaagcuuaccauguucguguuccugguccuccugccccuggugagcauccagugcgugaaccucaccacccgcacgcagcugccgcccgccuacaccaacagcuucacccggggcgucuacuaccccgacaagguguuccgcuccagcgugcugcacuccacccaggaccucuuccugcccuucuucagcaacgucacgugguuccacgccauccacguguccgggaccaacggcaccaagcgguucgacaacccggugcugcccuucaacgacggggucuacuucgcgagcaccgagaaguccaacaucauccgcggcuggaucuucgggacgacccucgacagcaagacccagucccugcugaucgugaacaacgccaccaacguggucaucaaggugugcgaguuccaguucugcaacgaccccuuccucggcguguacuaccacaagaacaacaagagcugcauggaguccgaguuccgggucuacagcuccgccaacaacugcacguucgaguacgugagccagcccuuccugauggaccuggagggcaagcaggggaacuucaagaaccuccgcgaguucguguucaagaacaucgacggcuacuucaagaucuacuccaagcacaccccgaucaaccugguccgggaccugccccagggguucagcgcccucgagccccugguggaccugcccaucggcaucaacaucacccgcuuccagacccuccuggcccugcaccgguccuaccucacgccgggggacagcagcuccggcuggaccgcgggcgccgccgccuacuacgugggguaccugcagccccgcaccuuccugcucaaguacaacgagaacggcaccaucacggacgcggucgacugcgcccuggacccccugagcgagaccaagugcacccucaaguccuucaccguggagaaggggaucuaccagacgagcaacuuccgggugcagcccaccgaguccaucguccgcuucccgaacaucaccaaccugugccccuucggcgagguguucaacgccacccgguucgccagcgucuacgccuggaaccgcaagcggaucuccaacugcguggcggacuacagcgugcuguacaacuccgccagcuucuccacguucaagugcuacggcgucagccccaccaagcucaacgaccugugcuucaccaacguguacgccgacuccuucgugauccgcggggacgagguccggcagaucgcccccggccagaccgggaagaucgccgacuacaacuacaagcugccggacgacuucacgggcugcgugaucgcguggaacagcaacaaccucgacuccaaggucgggggcaacuacaacuaccgcuaccgccuguuccgcaagagcaaccucaagcccuucgagcgggacaucuccaccgagaucuaccaggccggcagcacccccugcaacgggguggagggcuucaacugcuacuucccccugcaguccuacggguuccagccgaccaacggcgugggguaccagcccuaccggguggucgugcugagcuucgagcuccugcacgcccccgccacggugugcggccccaagaaguccaccaaccuggucaagaacaagugcgugaacuucaacuucaacggccucaccgggaccggcgugcugaccgagagcaacaagaaguuccugccguuccagcaguucgggcgcgacaucgccgacacgaccgacgcgguccgcgacccccagacccuggagauccucgacaucacccccugcagcuucggcgggguguccgugaucacgccgggcaccaacaccagcaaccaggucgccgugcuguaccagggcgugaacugcaccgagguccccguggccauccacgccgaccagcugacgcccaccuggcggguguacuccaccggcagcaacgucuuccagacccgcgccgggugccucaucggcgcggagcacgugaacaacuccuacgagugcgacauccccaucggggccggcaucugcgccagcuaccagacgcagaccaacuccccgcggcgcgcccggagcguggcgucccagagcaucaucgccuacaccaugucccugggcgccgagaacagcgucgccuacuccaacaacagcaucgccauccccaccaacuucacgaucuccgugaccaccgagauccugcccgugagcaugaccaagacgagcgucgacugcaccauguacaucugcggggacuccaccgagugcagcaaccuccugcugcaguacggcuccuucugcacccagcucaaccgcgcgcugacggggaucgccguggagcaggacaagaacacccaggagguguucgcccaggucaagcagaucuacaagacgcccccgaucaaggacuucggcggguucaacuucagccagauccugcccgaccccuccaagcccagcaagcgguccuucaucgaggaccuccuguucaacaaggugacccuggccgacgccggcuucaucaagcaguacggcgacugccucggggacaucgcggcccgcgaccugaucugcgcccagaaguucaacggccugaccgugcucccgccccugcugaccgacgagaugaucgcccaguacaccagcgcccuccuggcggggaccaucacguccggcuggaccuucggggccggcgccgcccugcagauccccuucgcgaugcagauggccuaccgguucaacggcaucggggucacccagaacgugcucuacgagaaccagaagcugaucgccaaccaguucaacagcgccaucggcaagauccaggacucccugagcuccaccgccagcgcgcucgggaagcugcaggacguggucaaccagaacgcccaggcccugaacacgcucgugaagcagcuguccagcaacuucggcgccaucuccagcgugcugaacgacauccucucccgccuggacccgcccgaggccgaggugcagaucgaccggcugaucaccgggcgccuccagagccugcagaccuacgugacccagcagcugauccgggcggccgagauccgcgccagcgccaaccucgccgcgaccaagauguccgagugcguccugggccagagcaagcggguggacuucugcggcaagggguaccaccugauguccuucccccagagcgccccgcacggcguggucuuccuccacgugacguacguccccgcccaggagaagaacuucaccaccgcccccgcgaucugccacgacgggaaggcccacuucccccgcgagggcguguucguguccaacgggacccacugguucgucacgcagcggaacuucuacgagccgcagaucaucaccaccgacaacaccuucgugagcggcaacugcgacguggucaucggcaucgugaacaacacgguguacgacccccugcagcccgagcuggacuccuucaaggaggagcucgacaaguacuucaagaaccacaccagccccgacgucgaccugggggacaucuccggcaucaacgccagcguggugaacauccagaaggagaucgaccgccugaacgaggucgccaagaaccucaacgagucccugaucgaccugcaggagcucgggaaguacgagcaguacaucaaguggccgugguacaucuggcugggcuucaucgccggccugaucgcgaucgugauggugaccaucaugcucugcugcaugaccagcugcugcuccugccugaaggggugcugcagcugcggcuccugcugcaaguucgacgaggacgacagcgagcccguccugaagggggugaagcuccacuacacgugaggacuaguuauaagacugacuagcccgaugggccucccaacgggcccuccuccccuccuugcaccgagauuaauaaaaaaaaaaaaaaaaaaaaaaaaaaaaaaaaaaaaaaaaaaaaaaaaaaaaaaaaaaaaaaaaugcaucccccccccccccccccccccccccccccccaaaggcucuuuucagagccaccagaauu

SEQ ID NO: 23315 - RNA, 4039 nt, Artificial Sequence
  SARS-CoV-2/Wuhan/WIV05/2019__EPI_ISL_402128 spike protein mRNA gc (1-1273)(K986P_V987P)
aggagaaagcuuaccauguucguguuccugguccuccugccccuggugagcucccagugcgugaaccucaccacccgcacgcagcugccgcccgccuacaccaacagcuucacccggggcgucuacuaccccgacaagguguuccgcuccagcgugcugcacuccacccaggaccucuuccugcccuucuucagcaacgucacgugguuccacgccauccacguguccgggaccaacggcaccaagcgguucgacaacccggugcugcccuucaacgacggggucuacuucgcgagcaccgagaaguccaacaucauccgcggcuggaucuucgggacgacccucgacagcaagacccagucccugcugaucgugaacaacgccaccaacguggucaucaaggugugcgaguuccaguucugcaacgaccccuuccucggcguguacuaccacaagaacaacaagagcuggauggaguccgaguuccgggucuacagcuccgccaacaacugcacguucgaguacgugagccagcccuuccugauggaccuggagggcaagcaggggaacuucaagaaccuccgcgaguucguguucaagaacaucgacggcuacuucaagaucuacuccaagcacaccccgaucaaccugguccgggaccugccccagggguucagcgcccucgagccccugguggaccugcccaucggcaucaacaucacccgcuuccagacccuccuggcccugcaccgguccuaccucacgccgggggacagcagcuccggcuggaccgcgggcgccgccgccuacuacgugggguaccugcagccccgcaccuuccugcucaaguacaacgagaacggcaccaucacggacgcggucgacugcgcccuggacccccugagcgagaccaagugcacccucaaguccuucaccguggagaaggggaucuaccagacgagcaacuuccgggugcagcccaccgaguccaucguccgcuucccgaacaucaccaaccugugccccuucggcgagguguucaacgccacccgguucgccagcgucuacgccuggaaccgcaagcggaucuccaacugcguggcggacuacagcgugcuguacaacuccgccagcuucuccacguucaagugcuacggcgucagccccaccaagcucaacgaccugugcuucaccaacguguacgccgacuccuucgugauccgcggggacgagguccggcagaucgcccccggccagaccgggaagaucgccgacuacaacuacaagcugccggacgacuucacgggcugcgugaucgcguggaacagcaacaaccucgacuccaaggucgggggcaacuacaacuaccuguaccgccuguuccgcaagagcaaccucaagcccuucgagcgggacaucuccaccgagaucuaccaggccggcagcacccccugcaacgggguggagggcuucaacugcuacuucccccugcaguccuacggguuccagccgaccaacggcgugggguaccagcccuaccggguggucgugcugagcuucgagcuccugcacgcccccgccacggugugcggccccaagaaguccaccaaccuggucaagaacaagugcgugaacuucaacuucaacggccucaccgggaccggcgugcugaccgagagcaacaagaaguuccugccguuccagcaguucgggcgcgacaucgccgacacgaccgacgcgguccgcgacccccagacccuggagauccucgacaucacccccugcagcuucggcgggguguccgugaucacgccgggcaccaacaccagcaaccaggucgccgugcuguaccaggacgugaacugcaccgagguccccguggccauccacgccgaccagcugacgcccaccuggcggguguacuccaccggcagcaacgucuuccagacccgcgccgggugccucaucggcgcggagcacgugaacaacuccuacgagugcgacauccccaucggggccggcaucugcgccagcuaccagacgcagaccaacuccccgcggcgcgcccggagcguggcgucccagagcaucaucgccuacaccaugucccugggcgccgagaacagcgucgccuacuccaacaacagcaucgccauccccaccaacuucacgaucuccgugaccaccgagauccugcccgugagcaugaccaagacgagcgucgacugcaccauguacaucugcggggacuccaccgagugcagcaaccuccugcugcaguacggcuccuucugcacccagcucaaccgcgcgcugacggggaucgccguggagcaggacaagaacacccaggagguguucgcccaggucaagcagaucuacaagacgcccccgaucaaggacuucggcggguucaacuucagccagauccugcccgaccccuccaagcccagcaagcgguccuucaucgaggaccuccuguucaacaaggugacccuggccgacgccggcuucaucaagcaguacggcgacugccucggggacaucgcggcccgcgaccugaucugcgcccagaaguucaacggccugaccgugcucccgccccugcugaccgacgagaugaucgcccaguacaccagcgcccuccuggcggggaccaucacguccggcuggaccuucggggccggcgccgcccugcagauccccuucgcgaugcagauggccuaccgguucaacggcaucggggucacccagaacgugcucuacgagaaccagaagcugaucgccaaccaguucaacagcgccaucggcaagauccaggacucccugagcuccaccgccagcgcgcucgggaagcugcaggacguggucaaccagaacgcccaggcccugaacacgcucgugaagcagcuguccagcaacuucggcgccaucuccagcgugcugaacgacauccucucccgccuggacccgcccgaggccgagguccagaucgaccggcugaucaccgggcgccuccagagccugcagaccuacgugacccagcagcugauccgggcggccgagauccgcgccagcgccaaccucgccgcgaccaagauguccgagugcgugcugggccagagcaagcgggucgacuucugcggcaagggguaccaccugauguccuucccccagagcgcgccccacggcgugguguuccuccacgucacguacgugcccgcccaggagaagaacuucaccaccgccccggccaucugccacgacgggaaggcccacuucccccgcgagggcgucuucguguccaacgggacccacugguucgugacgcagcggaacuucuacgagccccagaucaucaccaccgacaacaccuucgucagcggcaacugcgacguggugaucggcaucgucaacaacacgguguacgacccccugcagccggagcuggacuccuucaaggaggagcucgacaaguacuucaagaaccacaccagccccgacguggaccugggggacaucuccggcaucaacgccagcgucgugaacauccagaaggagaucgaccgccugaacgagguggccaagaaccucaacgagucccugaucgaccugcaggagcucgggaaguacgagcaguacaucaaguggcccugguacaucuggcugggcuucaucgccggccugaucgcgaucgucauggugaccaucaugcucugcugcaugaccagcugcugcuccugccugaaggggugcugcagcugcggcuccugcugcaaguucgacgaggacgacagcgagccggugcugaagggggucaagcuccacuacacgugaggacuaguuauaagacugacuagcccgaugggccucccaacgggcccuccuccccuccuugcaccgagauuaauaaaaaaaaaaaaaaaaaaaaaaaaaaaaaaaaaaaaaaaaaaaaaaaaaaaaaaaaaaaaaaaaugcaucccccccccccccccccccccccccccccccaaaggcucuuuucagagccaccagaauu

SEQ ID NO: 23316 - RNA, 4039 nt, Artificial Sequence
  SARS-CoV-2/Wuhan/WIV05/2019__EPI_ISL_402128 spike protein mRNA gc (1-1273)(K986P_V987P_ D614G)
aggagaaagcuuaccauguucguguuccugguccuccugccccuggugagcucccagugcgugaaccucaccacccgcacgcagcugccgcccgccuacaccaacagcuucacccggggcgucuacuaccccgacaagguguuccgcuccagcgugcugcacuccacccaggaccucuuccugcccuucuucagcaacgucacgugguuccacgccauccacguguccgggaccaacggcaccaagcgguucgacaacccggugcugcccuucaacgacggggucuacuucgcgagcaccgagaaguccaacaucauccgcggcuggaucuucgggacgacccucgacagcaagacccagucccugcugaucgugaacaacgccaccaacguggucaucaaggugugcgaguuccaguucugcaacgaccccuuccucggcguguacuaccacaagaacaacaagagcuggauggaguccgaguuccgggucuacagcuccgccaacaacugcacguucgaguacgugagccagcccuuccugauggaccuggagggcaagcaggggaacuucaagaaccuccgcgaguucguguucaagaacaucgacggcuacuucaagaucuacuccaagcacaccccgaucaaccugguccgggaccugccccagggguucagcgcccucgagccccugguggaccugcccaucggcaucaacaucacccgcuuccagacccuccuggcccugcaccgguccuaccucacgccgggggacagcagcuccggcuggaccgcgggcgccgccgccuacuacgugggguaccugcagccccgcaccuuccugcucaaguacaacgagaacggcaccaucacggacgcggucgacugcgcccuggacccccugagcgagaccaagugcacccucaaguccuucaccguggagaaggggaucuaccagacgagcaacuuccgggugcagcccaccgaguccaucguccgcuucccgaacaucaccaaccugugccccuucggcgagguguucaacgccacccgguucgccagcgucuacgccuggaaccgcaagcggaucuccaacugcguggcggacuacagcgugcuguacaacuccgccagcuucuccacguucaagugcuacggcgucagccccaccaagcucaacgaccugugcuucaccaacguguacgccgacuccuucgugauccgcggggacgagguccggcagaucgcccccggccagaccgggaagaucgccgacuacaacuacaagcugccggacgacuucacgggcugcgugaucgcguggaacagcaacaaccucgacuccaaggucgggggcaacuacaacuaccuguaccgccuguuccgcaagagcaaccucaagcccuucgagcgggacaucuccaccgagaucuaccaggccggcagcacccccugcaacgggguggagggcuucaacugcuacuucccccugcaguccuacggguuccagccgaccaacggcgugggguaccagcccuaccggguggucgugcugagcuucgagcuccugcacgcccccgccacggugugcggccccaagaaguccaccaaccuggucaagaacaagugcgugaacuucaacuucaacggccucaccgggaccggcgugcugaccgagagcaacaagaaguuccugccguuccagcaguucgggcgcgacaucgccgacacgaccgacgcgguccgcgacccccagacccuggagauccucgacaucacccccugcagcuucggcgggguguccgugaucacgccgggcaccaacaccagcaaccaggucgccgugcuguaccagggcgugaacugcaccgagguccccguggccauccacgccgaccagcugacgcccaccuggcggguguacuccaccgggagcaacgucuuccagacccgcgccggcugccucaucggggcggagcacgugaacaacuccuacgagugcgacauccccaucggcgccggcaucugcgccagcuaccagacgcagaccaacuccccgcggcgcgcccggagcguggcgucccagagcaucaucgccuacaccaugucccugggggccgagaacagcgucgccuacuccaacaacagcaucgccauccccaccaacuucacgaucuccgugaccaccgagauccugcccgugagcaugaccaagacgagcgucgacugcaccauguacaucugcggcgacuccaccgagugcagcaaccuccugcugcaguacggguccuucugcacccagcucaaccgcgcgcugacgggcaucgccguggagcaggacaagaacacccaggagguguucgcccaggucaagcagaucuacaagacgcccccgaucaaggacuucgggggcuucaacuucagccagauccugcccgaccccuccaagcccagcaagcgguccuucaucgaggaccuccuguucaacaaggugacccuggccgacgccggcuucaucaagcaguacggggacugccucggcgacaucgcggcccgcgaccugaucugcgcccagaaguucaacgggcugaccgugcucccgccccugcugaccgacgagaugaucgcccaguacaccagcgcccuccuggcgggcaccaucacguccggguggaccuucggcgccggcgccgcccugcagauccccuucgcgaugcagauggccuaccgguucaacgggaucggcgucacccagaacgugcucuacgagaaccagaagcugaucgccaaccaguucaacagcgccaucgggaagauccaggacucccugagcuccaccgccagcgcgcucggcaagcugcaggacguggucaaccagaacgcccaggcccugaacacgcucgugaagcagcuguccagcaacuucggggccaucuccagcgugcugaacgacauccucucccgccuggacccgcccgaggccgagguccagaucgaccggcugaucaccggccgccuccagagccugcagaccuacgugacccagcagcugauccgggcggccgagauccgcgccagcgccaaccucgccgcgaccaagauguccgagugcgugcugggccagagcaagcgggucgacuucugcgggaagggcuaccaccugauguccuucccccagagcgcgccccacggggugguguuccuccacgucacguacgugcccgcccaggagaagaacuucaccaccgccccggccaucugccacgacggcaaggcccacuucccccgcgagggggucuucguguccaacggcacccacugguucgugacgcagcggaacuucuacgagccccagaucaucaccaccgacaacaccuucgucagcggcaacugcgacguggugaucgggaucgucaacaacacgguguacgacccccugcagccggagcuggacuccuucaaggaggagcucgacaaguacuucaagaaccacaccagccccgacguggaccugggcgacaucuccgggaucaacgccagcgucgugaacauccagaaggagaucgaccgccugaacgagguggccaagaaccucaacgagucccugaucgaccugcaggagcucggcaaguacgagcaguacaucaaguggcccugguacaucuggcugggcuucaucgccgggcugaucgcgaucgucauggugaccaucaugcucugcugcaugaccagcugcugcuccugccugaagggcugcugcagcugcggguccugcugcaaguucgacgaggacgacagcgagccggugcugaagggcgucaagcuccacuacacgugaggacuaguuauaagacugacuagcccgaugggccucccaacgggcccuccuccccuccuugcaccgagauuaauaaaaaaaaaaaaaaaaaaaaaaaaaaaaaaaaaaaaaaaaaaaaaaaaaaaaaaaaaaaaaaaaugcaucccccccccccccccccccccccccccccccaaaggcucuuuucagagccaccagaauu

SEQ ID NO: 23317 - RNA, 4039 nt, Artificial Sequence
  SARS-CoV-2/Wuhan/WIV05/2019__EPI_ISL_402128 spike protein mRNA gc (1-1273)(K986P_V987P_A222V_D614G)
aggagaaagcuuaccauguucguguuccugguccuccugccccuggugagcucccagugcgugaaccucaccacccgcacgcagcugccgcccgccuacaccaacagcuucacccggggcgucuacuaccccgacaagguguuccgcuccagcgugcugcacuccacccaggaccucuuccugcccuucuucagcaacgucacgugguuccacgccauccacguguccgggaccaacggcaccaagcgguucgacaacccggugcugcccuucaacgacggggucuacuucgcgagcaccgagaaguccaacaucauccgcggcuggaucuucgggacgacccucgacagcaagacccagucccugcugaucgugaacaacgccaccaacguggucaucaaggugugcgaguuccaguucugcaacgaccccuuccucggcguguacuaccacaagaacaacaagagcuggauggaguccgaguuccgggucuacagcuccgccaacaacugcacguucgaguacgugagccagcccuuccugauggaccuggagggcaagcaggggaacuucaagaaccuccgcgaguucguguucaagaacaucgacggcuacuucaagaucuacuccaagcacaccccgaucaaccugguccgggaccugccccagggguucagcgugcucgagccccugguggaccugcccaucggcaucaacaucacccgcuuccagacccuccuggcccugcaccgguccuaccucacgccgggggacagcagcuccggcuggaccgccggcgcggccgccuacuacgucggguaccugcagccccgcaccuuccugcucaaguacaacgagaacggcaccaucacggacgccguggacugcgcgcuggacccccugagcgagaccaagugcacccucaaguccuucaccguggagaaggggaucuaccagacgagcaacuuccggguccagcccaccgaguccaucgugcgcuucccgaacaucaccaaccugugccccuucggcgaggucuucaacgccacccgguucgccagcguguacgccuggaaccgcaagcggaucuccaacugcguggccgacuacagcguccuguacaacuccgcgagcuucuccacguucaagugcuacggcgugagccccaccaagcucaacgaccugugcuucaccaacguguacgccgacuccuucgucauccgcggggacgaggugcggcagaucgcccccggccagaccgggaagaucgccgacuacaacuacaagcugccggacgacuucacgggcugcgugaucgccuggaacagcaacaaccucgacuccaaggucgggggcaacuacaacuaccuguaccgccuguuccgcaagagcaaccucaagcccuucgagcgggacaucuccaccgagaucuaccaggcgggcagcacccccugcaacgggguggagggcuucaacugcuacuucccccugcaguccuacggguuccagccgaccaacggcgugggguaccagcccuaccgggucguggugcugagcuucgagcuccugcacgcccccgccacggucugcggccccaagaaguccaccaaccuggugaagaacaagugcgugaacuucaacuucaacggccucaccgggaccggcguccugaccgagagcaacaagaaguuccugccguuccagcaguucgggcgcgacaucgccgacacgaccgacgccgugcgcgacccccagacccuggagauccucgacaucacccccugcagcuucggcgggguguccgucaucacgccgggcaccaacaccagcaaccagguggcggugcuguaccagggcgucaacugcaccgaggugcccguggccauccacgccgaccagcugacgcccaccuggcgggucuacuccaccgggagcaacguguuccagacccgcgccggcugccucaucggggccgagcacgugaacaacuccuacgagugcgacauccccaucggcgcgggcaucugcgccagcuaccagacgcagaccaacuccccgcggcgcgcccggagcgucgccucccagagcaucaucgcguacaccaugucccugggggccgagaacagcguggccuacuccaacaacagcaucgccauccccaccaacuucacgaucuccgugaccaccgagauccugcccgucagcaugaccaagacgagcguggacugcaccauguacaucugcggcgacuccaccgagugcagcaaccuccugcugcaguacggguccuucugcacccagcucaaccgcgcccugacgggcaucgcgguggagcaggacaagaacacccaggaggucuucgcccaggugaagcagaucuacaagacgcccccgaucaaggacuucgggggcuucaacuucagccagauccugcccgaccccuccaagcccagcaagcgguccuucaucgaggaccuccuguucaacaaggugacccuggccgacgccggcuucaucaagcaguacggggacugccucggcgacaucgccgcgcgcgaccugaucugcgcccagaaguucaacgggcugaccguccucccgccccugcugaccgacgagaugaucgcccaguacaccagcgcccuccuggccggcaccaucacguccggguggaccuucggcgcgggcgccgcccugcagauccccuucgccaugcagauggcguaccgguucaacgggaucggcgugacccagaacgugcucuacgagaaccagaagcugaucgccaaccaguucaacagcgccaucgggaagauccaggacucccugagcuccaccgccagcgcccucggcaagcugcaggacgucgugaaccagaacgcgcaggcccugaacacgcucgugaagcagcuguccagcaacuucggggccaucuccagcguccugaacgacauccucucccgccuggacccgcccgaggccgaggugcagaucgaccggcugaucaccggccgccuccagagccugcagaccuacgugacccagcagcugauccgggccgcggagauccgcgccagcgccaaccucgccgccaccaagauguccgagugcguccugggccagagcaagcggguggacuucugcgggaagggcuaccaccugauguccuucccccagagcgcgccccacgggguggucuuccuccacgugacguacguccccgcccaggagaagaacuucaccaccgccccggccaucugccacgacggcaaggcgcacuucccccgcgaggggguguucguguccaacggcacccacugguucgucacgcagcggaacuucuacgagccccagaucaucaccaccgacaacaccuucgugagcggcaacugcgacguggucaucgggaucgugaacaacacgguguacgacccccugcagccggagcuggacuccuucaaggaggagcucgacaaguacuucaagaaccacaccagccccgacgucgaccugggcgacaucuccgggaucaacgccagcguggugaacauccagaaggagaucgaccgccugaacgaggucgccaagaaccucaacgagucccugaucgaccugcaggagcucggcaaguacgagcaguacaucaaguggcccugguacaucuggcugggcuucaucgccgggcugaucgccaucgugauggugaccaucaugcucugcugcaugaccagcugcugcuccugccugaagggcugcugcagcugcggguccugcugcaaguucgacgaggacgacagcgagccgguccugaagggcgugaagcuccacuacacgugaggacuaguuauaagacugacuagcccgaugggccucccaacgggcccuccuccccuccuugcaccgagauuaauaaaaaaaaaaaaaaaaaaaaaaaaaaaaaaaaaaaaaaaaaaaaaaaaaaaaaaaaaaaaaaaaugcaucccccccccccccccccccccccccccccccaaaggcucuuuucagagccaccagaauu

SEQ ID NO: 23318 - RNA, 4039 nt, Artificial Sequence
  SARS-CoV-2/Wuhan/WIV05/2019__EPI_ISL_402128 spike protein mRNA gc (1-1273)(K986P_V987P_N439K_D614G)
aggagaaagcuuaccauguucguguuccugguccuccugccccuggugagcucccagugcgugaaccucaccacccgcacgcagcugccgcccgccuacaccaacagcuucacccggggcgucuacuaccccgacaagguguuccgcuccagcgugcugcacuccacccaggaccucuuccugcccuucuucagcaacgucacgugguuccacgccauccacguguccgggaccaacggcaccaagcgguucgacaacccggugcugcccuucaacgacggggucuacuucgcgagcaccgagaaguccaacaucauccgcggcuggaucuucgggacgacccucgacagcaagacccagucccugcugaucgugaacaacgccaccaacguggucaucaaggugugcgaguuccaguucugcaacgaccccuuccucggcguguacuaccacaagaacaacaagagcuggauggaguccgaguuccgggucuacagcuccgccaacaacugcacguucgaguacgugagccagcccuuccugauggaccuggagggcaagcaggggaacuucaagaaccuccgcgaguucguguucaagaacaucgacggcuacuucaagaucuacuccaagcacaccccgaucaaccugguccgggaccugccccagggguucagcgcccucgagccccugguggaccugcccaucggcaucaacaucacccgcuuccagacccuccuggcccugcaccgguccuaccucacgccgggggacagcagcuccggcuggaccgcgggcgccgccgccuacuacgugggguaccugcagccccgcaccuuccugcucaaguacaacgagaacggcaccaucacggacgcggucgacugcgcccuggacccccugagcgagaccaagugcacccucaaguccuucaccguggagaaggggaucuaccagacgagcaacuuccgggugcagcccaccgaguccaucguccgcuucccgaacaucaccaaccugugccccuucggcgagguguucaacgccacccgguucgccagcgucuacgccuggaaccgcaagcggaucuccaacugcguggcggacuacagcgugcuguacaacuccgccagcuucuccacguucaagugcuacggcgucagccccaccaagcucaacgaccugugcuucaccaacguguacgccgacuccuucgugauccgcggggacgagguccggcagaucgcccccggccagaccgggaagaucgccgacuacaacuacaagcugccggacgacuucacgggcugcgugaucgcguggaacagcaagaaccucgacuccaaggucgggggcaacuacaacuaccuguaccgccuguuccgcaagagcaaccucaagcccuucgagcgggacaucuccaccgagaucuaccaggccggcagcacccccugcaacgggguggagggcuucaacugcuacuucccccugcaguccuacggguuccagccgaccaacggcgugggguaccagcccuaccggguggucgugcugagcuucgagcuccugcacgcccccgccacggugugcggccccaagaaguccaccaaccuggucaagaacaagugcgugaacuucaacuucaacggccucaccgggaccggcgugcugaccgagagcaacaagaaguuccugccguuccagcaguucgggcgcgacaucgccgacacgaccgacgcgguccgcgacccccagacccuggagauccucgacaucacccccugcagcuucggcgggguguccgugaucacgccgggcaccaacaccagcaaccaggucgccgugcuguaccagggcgugaacugcaccgagguccccguggccauccacgccgaccagcugacgcccaccuggcggguguacuccaccgggagcaacgucuuccagacccgcgccggcugccucaucggggcggagcacgugaacaacuccuacgagugcgacauccccaucggcgccggcaucugcgccagcuaccagacgcagaccaacuccccgcggcgcgcccggagcguggcgucccagagcaucaucgccuacaccaugucccugggggccgagaacagcgucgccuacuccaacaacagcaucgccauccccaccaacuucacgaucuccgugaccaccgagauccugcccgugagcaugaccaagacgagcgucgacugcaccauguacaucugcggcgacuccaccgagugcagcaaccuccugcugcaguacggguccuucugcacccagcucaaccgcgcgcugacgggcaucgccguggagcaggacaagaacacccaggagguguucgcccaggucaagcagaucuacaagacgcccccgaucaaggacuucgggggcuucaacuucagccagauccugcccgaccccuccaagcccagcaagcgguccuucaucgaggaccuccuguucaacaaggugacccuggccgacgccggcuucaucaagcaguacggggacugccucggcgacaucgcggcccgcgaccugaucugcgcccagaaguucaacgggcugaccgugcucccgccccugcugaccgacgagaugaucgcccaguacaccagcgcccuccuggcgggcaccaucacguccggguggaccuucggcgccggcgccgcccugcagauccccuucgcgaugcagauggccuaccgguucaacgggaucggcgucacccagaacgugcucuacgagaaccagaagcugaucgccaaccaguucaacagcgccaucgggaagauccaggacucccugagcuccaccgccagcgcgcucggcaagcugcaggacguggucaaccagaacgcccaggcccugaacacgcucgugaagcagcuguccagcaacuucggggccaucuccagcgugcugaacgacauccucucccgccuggacccgcccgaggccgagguccagaucgaccggcugaucaccggccgccuccagagccugcagaccuacgugacccagcagcugauccgggcggccgagauccgcgccagcgccaaccucgccgcgaccaagauguccgagugcgugcugggccagagcaagcgggucgacuucugcgggaagggcuaccaccugauguccuucccccagagcgcgccccacggggugguguuccuccacgucacguacgugcccgcccaggagaagaacuucaccaccgccccggccaucugccacgacggcaaggcccacuucccccgcgagggggucuucguguccaacggcacccacugguucgugacgcagcggaacuucuacgagccccagaucaucaccaccgacaacaccuucgucagcggcaacugcgacguggugaucgggaucgucaacaacacgguguacgacccccugcagccggagcuggacuccuucaaggaggagcucgacaaguacuucaagaaccacaccagccccgacguggaccugggcgacaucuccgggaucaacgccagcgucgugaacauccagaaggagaucgaccgccugaacgagguggccaagaaccucaacgagucccugaucgaccugcaggagcucggcaaguacgagcaguacaucaaguggcccugguacaucuggcugggcuucaucgccgggcugaucgcgaucgucauggugaccaucaugcucugcugcaugaccagcugcugcuccugccugaagggcugcugcagcugcggguccugcugcaaguucgacgaggacgacagcgagccggugcugaagggcgucaagcuccacuacacgugaggacuaguuauaagacugacuagcccgaugggccucccaacgggcccuccuccccuccuugcaccgagauuaauaaaaaaaaaaaaaaaaaaaaaaaaaaaaaaaaaaaaaaaaaaaaaaaaaaaaaaaaaaaaaaaaugcaucccccccccccccccccccccccccccccccaaaggcucuuuucagagccaccagaauu

SEQ ID NO: 23319 - RNA, 4039 nt, Artificial Sequence
  SARS-CoV-2/Wuhan/WIV05/2019__EPI_ISL_402128 spike protein mRNA gc (1-1273)(K986P_V987P_S477N_D614G)
aggagaaagcuuaccauguucguguuccugguccuccugccccuggugagcucccagugcgugaaccucaccacccgcacgcagcugccgcccgccuacaccaacagcuucacccggggcgucuacuaccccgacaagguguuccgcuccagcgugcugcacuccacccaggaccucuuccugcccuucuucagcaacgucacgugguuccacgccauccacguguccgggaccaacggcaccaagcgguucgacaacccggugcugcccuucaacgacggggucuacuucgcgagcaccgagaaguccaacaucauccgcggcuggaucuucgggacgacccucgacagcaagacccagucccugcugaucgugaacaacgccaccaacguggucaucaaggugugcgaguuccaguucugcaacgaccccuuccucggcguguacuaccacaagaacaacaagagcuggauggaguccgaguuccgggucuacagcuccgccaacaacugcacguucgaguacgugagccagcccuuccugauggaccuggagggcaagcaggggaacuucaagaaccuccgcgaguucguguucaagaacaucgacggcuacuucaagaucuacuccaagcacaccccgaucaaccugguccgggaccugccccagggguucagcgcccucgagccccugguggaccugcccaucggcaucaacaucacccgcuuccagacccuccuggcccugcaccgguccuaccucacgccgggggacagcagcuccggcuggaccgcgggcgccgccgccuacuacgugggguaccugcagccccgcaccuuccugcucaaguacaacgagaacggcaccaucacggacgcggucgacugcgcccuggacccccugagcgagaccaagugcacccucaaguccuucaccguggagaaggggaucuaccagacgagcaacuuccgggugcagcccaccgaguccaucguccgcuucccgaacaucaccaaccugugccccuucggcgagguguucaacgccacccgguucgccagcgucuacgccuggaaccgcaagcggaucuccaacugcguggcggacuacagcgugcuguacaacuccgccagcuucuccacguucaagugcuacggcgucagccccaccaagcucaacgaccugugcuucaccaacguguacgccgacuccuucgugauccgcggggacgagguccggcagaucgcccccggccagaccgggaagaucgccgacuacaacuacaagcugccggacgacuucacgggcugcgugaucgcguggaacagcaacaaccucgacuccaaggucgggggcaacuacaacuaccuguaccgccuguuccgcaagagcaaccucaagcccuucgagcgggacaucuccaccgagaucuaccaggccggcaacacccccugcaacgggguggagggcuucaacugcuacuucccccugcagagcuacggguuccagccgaccaacggcgugggguaccagcccuaccggguggucgugcuguccuucgagcuccugcacgcccccgccacggugugcggccccaagaaguccaccaaccuggucaagaacaagugcgugaacuucaacuucaacggccucaccgggaccggcgugcugaccgagagcaacaagaaguuccugccguuccagcaguucgggcgcgacaucgccgacacgaccgacgcgguccgcgacccccagacccuggagauccucgacaucacccccugcagcuucggcggggugagcgugaucacgccgggcaccaacaccuccaaccaggucgccgugcuguaccagggcgugaacugcaccgagguccccguggccauccacgccgaccagcugacgcccaccuggcggguguacagcaccggguccaacgucuuccagacccgcgccggcugccucaucggggcggagcacgugaacaacagcuacgagugcgacauccccaucggcgccggcaucugcgccuccuaccagacgcagaccaacagcccgcggcgcgcccgguccguggcgagccaguccaucaucgccuacaccaugagccugggggccgagaacuccgucgccuacagcaacaacuccaucgccauccccaccaacuucacgaucagcgugaccaccgagauccugcccguguccaugaccaagacgagcgucgacugcaccauguacaucugcggcgacagcaccgagugcuccaaccuccugcugcaguacgggagcuucugcacccagcucaaccgcgcgcugacgggcaucgccguggagcaggacaagaacacccaggagguguucgcccaggucaagcagaucuacaagacgcccccgaucaaggacuucgggggcuucaacuucucccagauccugcccgaccccagcaagcccuccaagcggagcuucaucgaggaccuccuguucaacaaggugacccuggccgacgccggcuucaucaagcaguacggggacugccucggcgacaucgcggcccgcgaccugaucugcgcccagaaguucaacgggcugaccgugcucccgccccugcugaccgacgagaugaucgcccaguacaccuccgcccuccuggcgggcaccaucacgagcggguggaccuucggcgccggcgccgcccugcagauccccuucgcgaugcagauggccuaccgguucaacgggaucggcgucacccagaacgugcucuacgagaaccagaagcugaucgccaaccaguucaacuccgccaucgggaagauccaggacagccuguccagcaccgccuccgcgcucggcaagcugcaggacguggucaaccagaacgcccaggcccugaacacgcucgugaagcagcugagcuccaacuucggggccaucagcuccgugcugaacgacauccucagccgccuggacccgcccgaggccgagguccagaucgaccggcugaucaccggccgccuccagucccugcagaccuacgugacccagcagcugauccgggcggccgagauccgcgccagcgccaaccucgccgcgaccaagaugagcgagugcgugcugggccaguccaagcgggucgacuucugcgggaagggcuaccaccugaugagcuucccccaguccgcgccccacggggugguguuccuccacgucacguacgugcccgcccaggagaagaacuucaccaccgccccggccaucugccacgacggcaaggcccacuucccccgcgagggggucuucgugagcaacggcacccacugguucgugacgcagcggaacuucuacgagccccagaucaucaccaccgacaacaccuucgucuccggcaacugcgacguggugaucgggaucgucaacaacacgguguacgacccccugcagccggagcuggacagcuucaaggaggagcucgacaaguacuucaagaaccacaccucccccgacguggaccugggcgacaucagcgggaucaacgccuccgucgugaacauccagaaggagaucgaccgccugaacgagguggccaagaaccucaacgagagccugaucgaccugcaggagcucggcaaguacgagcaguacaucaaguggcccugguacaucuggcugggcuucaucgccgggcugaucgcgaucgucauggugaccaucaugcucugcugcaugaccuccugcugcagcugccugaagggcugcugcuccugcgggagcugcugcaaguucgacgaggacgacuccgagccggugcugaagggcgucaagcuccacuacacgugaggacuaguuauaagacugacuagcccgaugggccucccaacgggcccuccuccccuccuugcaccgagauuaauaaaaaaaaaaaaaaaaaaaaaaaaaaaaaaaaaaaaaaaaaaaaaaaaaaaaaaaaaaaaaaaaugcaucccccccccccccccccccccccccccccccaaaggcucuuuucagagccaccagaauu

SEQ ID NO: 23320 - RNA, 4039 nt, Artificial Sequence
  SARS-CoV-2/Wuhan/WIV05/2019__EPI_ISL_402128 spike protein mRNA gc (1-1273)(K986P_V987P_N501Y_D614G)
aggagaaagcuuaccauguucguguuccugguccuccugccccuggugagcucccagugcgugaaccucaccacccgcacgcagcugccgcccgccuacaccaacagcuucacccggggcgucuacuaccccgacaagguguuccgcuccagcgugcugcacuccacccaggaccucuuccugcccuucuucagcaacgucacgugguuccacgccauccacguguccgggaccaacggcaccaagcgguucgacaacccggugcugcccuucaacgacggggucuacuucgcgagcaccgagaaguccaacaucauccgcggcuggaucuucgggacgacccucgacagcaagacccagucccugcugaucgugaacaacgccaccaacguggucaucaaggugugcgaguuccaguucugcaacgaccccuuccucggcguguacuaccacaagaacaacaagagcuggauggaguccgaguuccgggucuacagcuccgccaacaacugcacguucgaguacgugagccagcccuuccugauggaccuggagggcaagcaggggaacuucaagaaccuccgcgaguucguguucaagaacaucgacggcuacuucaagaucuacuccaagcacaccccgaucaaccugguccgggaccugccccagggguucagcgcccucgagccccugguggaccugcccaucggcaucaacaucacccgcuuccagacccuccuggcccugcaccgguccuaccucacgccgggggacagcagcuccggcuggaccgcgggcgccgccgccuacuacgugggguaccugcagccccgcaccuuccugcucaaguacaacgagaacggcaccaucacggacgcggucgacugcgcccuggacccccugagcgagaccaagugcacccucaaguccuucaccguggagaaggggaucuaccagacgagcaacuuccgggugcagcccaccgaguccaucguccgcuucccgaacaucaccaaccugugccccuucggcgagguguucaacgccacccgguucgccagcgucuacgccuggaaccgcaagcggaucuccaacugcguggcggacuacagcgugcuguacaacuccgccagcuucuccacguucaagugcuacggcgucagccccaccaagcucaacgaccugugcuucaccaacguguacgccgacuccuucgugauccgcggggacgagguccggcagaucgcccccggccagaccgggaagaucgccgacuacaacuacaagcugccggacgacuucacgggcugcgugaucgcguggaacagcaacaaccucgacuccaaggucgggggcaacuacaacuaccuguaccgccuguuccgcaagagcaaccucaagcccuucgagcgggacaucuccaccgagaucuaccaggccggcagcacccccugcaacgggguggagggcuucaacugcuacuucccccugcaguccuacggguuccagccgaccuacggcgugggguaccagcccuaccggguggucgugcugagcuucgagcuccugcacgcccccgccacggugugcggccccaagaaguccaccaaccuggucaagaacaagugcgugaacuucaacuucaacggccucaccgggaccggcgugcugaccgagagcaacaagaaguuccugccguuccagcaguucgggcgcgacaucgccgacacgaccgacgcgguccgcgacccccagacccuggagauccucgacaucacccccugcagcuucggcgggguguccgugaucacgccgggcaccaacaccagcaaccaggucgccgugcuguaccagggcgugaacugcaccgagguccccguggccauccacgccgaccagcugacgcccaccuggcggguguacuccaccgggagcaacgucuuccagacccgcgccggcugccucaucggggcggagcacgugaacaacuccuacgagugcgacauccccaucggcgccggcaucugcgccagcuaccagacgcagaccaacuccccgcggcgcgcccggagcguggcgucccagagcaucaucgccuacaccaugucccugggggccgagaacagcgucgccuacuccaacaacagcaucgccauccccaccaacuucacgaucuccgugaccaccgagauccugcccgugagcaugaccaagacgagcgucgacugcaccauguacaucugcggcgacuccaccgagugcagcaaccuccugcugcaguacggguccuucugcacccagcucaaccgcgcgcugacgggcaucgccguggagcaggacaagaacacccaggagguguucgcccaggucaagcagaucuacaagacgcccccgaucaaggacuucgggggcuucaacuucagccagauccugcccgaccccuccaagcccagcaagcgguccuucaucgaggaccuccuguucaacaaggugacccuggccgacgccggcuucaucaagcaguacggggacugccucggcgacaucgcggcccgcgaccugaucugcgcccagaaguucaacgggcugaccgugcucccgccccugcugaccgacgagaugaucgcccaguacaccagcgcccuccuggcgggcaccaucacguccggguggaccuucggcgccggcgccgcccugcagauccccuucgcgaugcagauggccuaccgguucaacgggaucggcgucacccagaacgugcucuacgagaaccagaagcugaucgccaaccaguucaacagcgccaucgggaagauccaggacucccugagcuccaccgccagcgcgcucggcaagcugcaggacguggucaaccagaacgcccaggcccugaacacgcucgugaagcagcuguccagcaacuucggggccaucuccagcgugcugaacgacauccucucccgccuggacccgcccgaggccgagguccagaucgaccggcugaucaccggccgccuccagagccugcagaccuacgugacccagcagcugauccgggcggccgagauccgcgccagcgccaaccucgccgcgaccaagauguccgagugcgugcugggccagagcaagcgggucgacuucugcgggaagggcuaccaccugauguccuucccccagagcgcgccccacggggugguguuccuccacgucacguacgugcccgcccaggagaagaacuucaccaccgccccggccaucugccacgacggcaaggcccacuucccccgcgagggggucuucguguccaacggcacccacugguucgugacgcagcggaacuucuacgagccccagaucaucaccaccgacaacaccuucgucagcggcaacugcgacguggugaucgggaucgucaacaacacgguguacgacccccugcagccggagcuggacuccuucaaggaggagcucgacaaguacuucaagaaccacaccagccccgacguggaccugggcgacaucuccgggaucaacgccagcgucgugaacauccagaaggagaucgaccgccugaacgagguggccaagaaccucaacgagucccugaucgaccugcaggagcucggcaaguacgagcaguacaucaaguggcccugguacaucuggcugggcuucaucgccgggcugaucgcgaucgucauggugaccaucaugcucugcugcaugaccagcugcugcuccugccugaagggcugcugcagcugcggguccugcugcaaguucgacgaggacgacagcgagccggugcugaagggcgucaagcuccacuacacgugaggacuaguuauaagacugacuagcccgaugggccucccaacgggcccuccuccccuccuugcaccgagauuaauaaaaaaaaaaaaaaaaaaaaaaaaaaaaaaaaaaaaaaaaaaaaaaaaaaaaaaaaaaaaaaaaugcaucccccccccccccccccccccccccccccccaaaggcucuuuucagagccaccagaauu

SEQ ID NO: 23321 - RNA, 4033 nt, Artificial Sequence
  SARS-CoV-2/Wuhan/WIV05/2019__EPI_ISL_402128 spike protein mRNA gc (1-1273)(K986P_V987P_H69del_V70del_D614G)
aggagaaagcuuaccauguucguguuccugguccuccugccccuggugagcucccagugcgugaaccucaccacccgcacgcagcugccgcccgccuacaccaacagcuucacccggggcgucuacuaccccgacaagguguuccgcuccagcgugcugcacuccacccaggaccucuuccugcccuucuucagcaacgucacgugguuccacgccaucuccgggaccaacggcaccaagcgguucgacaacccggugcugcccuucaacgacgggguguacuucgcgagcaccgagaaguccaacaucauccgcggcuggaucuucgggacgacccucgacagcaagacccagucccugcugaucgucaacaacgccaccaacguggugaucaaggucugcgaguuccaguucugcaacgaccccuuccucggcguguacuaccacaagaacaacaagagcuggauggaguccgaguuccggguguacagcuccgccaacaacugcacguucgaguacgucagccagcccuuccugauggaccuggagggcaagcaggggaacuucaagaaccuccgcgaguucguguucaagaacaucgacggcuacuucaagaucuacuccaagcacaccccgaucaaccuggugcgggaccugccccagggguucagcgcccucgagccccuggucgaccugcccaucggcaucaacaucacccgcuuccagacccuccuggcccugcaccgguccuaccucacgccgggggacagcagcuccggcuggaccgcgggcgccgccgccuacuacgugggguaccugcagccccgcaccuuccugcucaaguacaacgagaacggcaccaucacggacgcgguggacugcgcccuggacccccugagcgagaccaagugcacccucaaguccuucaccgucgagaaggggaucuaccagacgagcaacuuccgggugcagcccaccgaguccaucgugcgcuucccgaacaucaccaaccugugccccuucggcgaggucuucaacgccacccgguucgccagcguguacgccuggaaccgcaagcggaucuccaacugcgucgcggacuacagcgugcuguacaacuccgccagcuucuccacguucaagugcuacggcgugagccccaccaagcucaacgaccugugcuucaccaacgucuacgccgacuccuucgugauccgcggggacgaggugcggcagaucgcccccggccagaccgggaagaucgccgacuacaacuacaagcugccggacgacuucacgggcugcgucaucgcguggaacagcaacaaccucgacuccaaggucgggggcaacuacaacuaccuguaccgccuguuccgcaagagcaaccucaagcccuucgagcgggacaucuccaccgagaucuaccaggccggcagcacccccugcaacgggguggagggcuucaacugcuacuucccccugcaguccuacggguuccagccgaccaacggcgugggguaccagcccuaccggguggugguccugagcuucgagcuccugcacgcccccgccacggugugcggccccaagaaguccaccaaccuggugaagaacaagugcgucaacuucaacuucaacggccucaccgggaccggcgugcugaccgagagcaacaagaaguuccugccguuccagcaguucgggcgcgacaucgccgacacgaccgacgcggugcgcgacccccagacccuggagauccucgacaucacccccugcagcuucggcggggucuccgugaucacgccgggcaccaacaccagcaaccagguggccguccuguaccagggcgugaacugcaccgaggugcccgucgccauccacgccgaccagcugacgcccaccuggcggguguacuccaccgggagcaacguguuccagacccgcgccggcugccucaucggggcggagcacgucaacaacuccuacgagugcgacauccccaucggcgccggcaucugcgccagcuaccagacgcagaccaacuccccgcggcgcgcccggagcguggcgucccagagcaucaucgccuacaccaugucccugggggccgagaacagcguggccuacuccaacaacagcaucgccauccccaccaacuucacgaucuccgucaccaccgagauccugcccgugagcaugaccaagacgagcguggacugcaccauguacaucugcggcgacuccaccgagugcagcaaccuccugcugcaguacggguccuucugcacccagcucaaccgcgcgcugacgggcaucgccgucgagcaggacaagaacacccaggagguguucgcccaggugaagcagaucuacaagacgcccccgaucaaggacuucgggggcuucaacuucagccagauccugcccgaccccuccaagcccagcaagcgguccuucaucgaggaccuccuguucaacaaggucacccuggccgacgccggcuucaucaagcaguacggggacugccucggcgacaucgcggcccgcgaccugaucugcgcccagaaguucaacgggcugaccgugcucccgccccugcugaccgacgagaugaucgcccaguacaccagcgcccuccuggcgggcaccaucacguccggguggaccuucggcgccggcgccgcccugcagauccccuucgcgaugcagauggccuaccgguucaacgggaucggcgugacccagaacguccucuacgagaaccagaagcugaucgccaaccaguucaacagcgccaucgggaagauccaggacucccugagcuccaccgccagcgcgcucggcaagcugcaggacguggugaaccagaacgcccaggcccugaacacgcucgucaagcagcuguccagcaacuucggggccaucuccagcgugcugaacgacauccucucccgccuggacccgcccgaggccgaggugcagaucgaccggcugaucaccggccgccuccagagccugcagaccuacgucacccagcagcugauccgggcggccgagauccgcgccagcgccaaccucgccgcgaccaagauguccgagugcgugcugggccagagcaagcggguggacuucugcgggaagggcuaccaccugauguccuucccccagagcgcgccccacggggucguguuccuccacgugacguacguccccgcccaggagaagaacuucaccaccgccccggccaucugccacgacggcaaggcccacuucccccgcgaggggguguucgucuccaacggcacccacugguucgugacgcagcggaacuucuacgagccccagaucaucaccaccgacaacaccuucgugagcggcaacugcgacgucgugaucgggaucgugaacaacacggucuacgacccccugcagccggagcuggacuccuucaaggaggagcucgacaaguacuucaagaaccacaccagccccgacguggaccugggcgacaucuccgggaucaacgccagcguggucaacauccagaaggagaucgaccgccugaacgagguggccaagaaccucaacgagucccugaucgaccugcaggagcucggcaaguacgagcaguacaucaaguggcccugguacaucuggcugggcuucaucgccgggcugaucgcgaucgugauggucaccaucaugcucugcugcaugaccagcugcugcuccugccugaagggcugcugcagcugcggguccugcugcaaguucgacgaggacgacagcgagccggugcugaagggcgugaagcuccacuacacgugaggacuaguuauaagacugacuagcccgaugggccucccaacgggcccuccuccccuccuugcaccgagauuaauaaaaaaaaaaaaaaaaaaaaaaaaaaaaaaaaaaaaaaaaaaaaaaaaaaaaaaaaaaaaaaaaugcaucccccccccccccccccccccccccccccccaaaggcucuuuucagagccaccagaauu

SEQ ID NO: 23322 - RNA, 4039 nt, Artificial Sequence
  SARS-CoV-2/Wuhan/WIV05/2019__EPI_ISL_402128 spike protein mRNA gc (1-1273)(K986P_V987P_Y453F_D614G)
aggagaaagcuuaccauguucguguuccugguccuccugccccuggugagcucccagugcgugaaccucaccacccgcacgcagcugccgcccgccuacaccaacagcuucacccggggcgucuacuaccccgacaagguguuccgcuccagcgugcugcacuccacccaggaccucuuccugcccuucuucagcaacgucacgugguuccacgccauccacguguccgggaccaacggcaccaagcgguucgacaacccggugcugcccuucaacgacggggucuacuucgcgagcaccgagaaguccaacaucauccgcggcuggaucuucgggacgacccucgacagcaagacccagucccugcugaucgugaacaacgccaccaacguggucaucaaggugugcgaguuccaguucugcaacgaccccuuccucggcguguacuaccacaagaacaacaagagcuggauggaguccgaguuccgggucuacagcuccgccaacaacugcacguucgaguacgugagccagcccuuccugauggaccuggagggcaagcaggggaacuucaagaaccuccgcgaguucguguucaagaacaucgacggcuacuucaagaucuacuccaagcacaccccgaucaaccugguccgggaccugccccagggguucagcgcccucgagccccugguggaccugcccaucggcaucaacaucacccgcuuccagacccuccuggcccugcaccgguccuaccucacgccgggggacagcagcuccggcuggaccgcgggcgccgccgccuacuacgugggguaccugcagccccgcaccuuccugcucaaguacaacgagaacggcaccaucacggacgcggucgacugcgcccuggacccccugagcgagaccaagugcacccucaaguccuucaccguggagaaggggaucuaccagacgagcaacuuccgggugcagcccaccgaguccaucguccgcuucccgaacaucaccaaccugugccccuucggcgagguguucaacgccacccgguucgccagcgucuacgccuggaaccgcaagcggaucuccaacugcguggcggacuacagcgugcuguacaacuccgccagcuucuccacguucaagugcuacggcgucagccccaccaagcucaacgaccugugcuucaccaacguguacgccgacuccuucgugauccgcggggacgagguccggcagaucgcccccggccagaccgggaagaucgccgacuacaacuacaagcugccggacgacuucacgggcugcgugaucgcguggaacagcaacaaccucgacuccaaggucgggggcaacuacaacuaccuguuccgccuguuccgcaagagcaaccucaagcccuucgagcgggacaucuccaccgagaucuaccaggccggcagcacccccugcaacgggguggagggcuucaacugcuacuucccccugcaguccuacggguuccagccgaccaacggcgugggguaccagcccuaccggguggucgugcugagcuucgagcuccugcacgcccccgccacggugugcggccccaagaaguccaccaaccuggucaagaacaagugcgugaacuucaacuucaacggccucaccgggaccggcgugcugaccgagagcaacaagaaguuccugccguuccagcaguucgggcgcgacaucgccgacacgaccgacgcgguccgcgacccccagacccuggagauccucgacaucacccccugcagcuucggcgggguguccgugaucacgccgggcaccaacaccagcaaccaggucgccgugcuguaccagggcgugaacugcaccgagguccccguggccauccacgccgaccagcugacgcccaccuggcggguguacuccaccgggagcaacgucuuccagacccgcgccggcugccucaucggggcggagcacgugaacaacuccuacgagugcgacauccccaucggcgccggcaucugcgccagcuaccagacgcagaccaacuccccgcggcgcgcccggagcguggcgucccagagcaucaucgccuacaccaugucccugggggccgagaacagcgucgccuacuccaacaacagcaucgccauccccaccaacuucacgaucuccgugaccaccgagauccugcccgugagcaugaccaagacgagcgucgacugcaccauguacaucugcggcgacuccaccgagugcagcaaccuccugcugcaguacggguccuucugcacccagcucaaccgcgcgcugacgggcaucgccguggagcaggacaagaacacccaggagguguucgcccaggucaagcagaucuacaagacgcccccgaucaaggacuucgggggcuucaacuucagccagauccugcccgaccccuccaagcccagcaagcgguccuucaucgaggaccuccuguucaacaaggugacccuggccgacgccggcuucaucaagcaguacggggacugccucggcgacaucgcggcccgcgaccugaucugcgcccagaaguucaacgggcugaccgugcucccgccccugcugaccgacgagaugaucgcccaguacaccagcgcccuccuggcgggcaccaucacguccggguggaccuucggcgccggcgccgcccugcagauccccuucgcgaugcagauggccuaccgguucaacgggaucggcgucacccagaacgugcucuacgagaaccagaagcugaucgccaaccaguucaacagcgccaucgggaagauccaggacucccugagcuccaccgccagcgcgcucggcaagcugcaggacguggucaaccagaacgcccaggcccugaacacgcucgugaagcagcuguccagcaacuucggggccaucuccagcgugcugaacgacauccucucccgccuggacccgcccgaggccgagguccagaucgaccggcugaucaccggccgccuccagagccugcagaccuacgugacccagcagcugauccgggcggccgagauccgcgccagcgccaaccucgccgcgaccaagauguccgagugcgugcugggccagagcaagcgggucgacuucugcgggaagggcuaccaccugauguccuucccccagagcgcgccccacggggugguguuccuccacgucacguacgugcccgcccaggagaagaacuucaccaccgccccggccaucugccacgacggcaaggcccacuucccccgcgagggggucuucguguccaacggcacccacugguucgugacgcagcggaacuucuacgagccccagaucaucaccaccgacaacaccuucgucagcggcaacugcgacguggugaucgggaucgucaacaacacgguguacgacccccugcagccggagcuggacuccuucaaggaggagcucgacaaguacuucaagaaccacaccagccccgacguggaccugggcgacaucuccgggaucaacgccagcgucgugaacauccagaaggagaucgaccgccugaacgagguggccaagaaccucaacgagucccugaucgaccugcaggagcucggcaaguacgagcaguacaucaaguggcccugguacaucuggcugggcuucaucgccgggcugaucgcgaucgucauggugaccaucaugcucugcugcaugaccagcugcugcuccugccugaagggcugcugcagcugcggguccugcugcaaguucgacgaggacgacagcgagccggugcugaagggcgucaagcuccacuacacgugaggacuaguuauaagacugacuagcccgaugggccucccaacgggcccuccuccccuccuugcaccgagauuaauaaaaaaaaaaaaaaaaaaaaaaaaaaaaaaaaaaaaaaaaaaaaaaaaaaaaaaaaaaaaaaaaugcaucccccccccccccccccccccccccccccccaaaggcucuuuucagagccaccagaauu

SEQ ID NO: 23323 - RNA, 4039 nt, Artificial Sequence
  SARS-CoV-2/Wuhan/WIV05/2019__EPI_ISL_402128 spike protein mRNA gc (1-1273)(K986P_V987P_D614G_I692V)
aggagaaagcuuaccauguucguguuccugguccuccugccccuggugagcucccagugcgugaaccucaccacccgcacgcagcugccgcccgccuacaccaacagcuucacccggggcgucuacuaccccgacaagguguuccgcuccagcgugcugcacuccacccaggaccucuuccugcccuucuucagcaacgucacgugguuccacgccauccacguguccgggaccaacggcaccaagcgguucgacaacccggugcugcccuucaacgacggggucuacuucgcgagcaccgagaaguccaacaucauccgcggcuggaucuucgggacgacccucgacagcaagacccagucccugcugaucgugaacaacgccaccaacguggucaucaaggugugcgaguuccaguucugcaacgaccccuuccucggcguguacuaccacaagaacaacaagagcuggauggaguccgaguuccgggucuacagcuccgccaacaacugcacguucgaguacgugagccagcccuuccugauggaccuggagggcaagcaggggaacuucaagaaccuccgcgaguucguguucaagaacaucgacggcuacuucaagaucuacuccaagcacaccccgaucaaccugguccgggaccugccccagggguucagcgcccucgagccccugguggaccugcccaucggcaucaacaucacccgcuuccagacccuccuggcccugcaccgguccuaccucacgccgggggacagcagcuccggcuggaccgcgggcgccgccgccuacuacgugggguaccugcagccccgcaccuuccugcucaaguacaacgagaacggcaccaucacggacgcggucgacugcgcccuggacccccugagcgagaccaagugcacccucaaguccuucaccguggagaaggggaucuaccagacgagcaacuuccgggugcagcccaccgaguccaucguccgcuucccgaacaucaccaaccugugccccuucggcgagguguucaacgccacccgguucgccagcgucuacgccuggaaccgcaagcggaucuccaacugcguggcggacuacagcgugcuguacaacuccgccagcuucuccacguucaagugcuacggcgucagccccaccaagcucaacgaccugugcuucaccaacguguacgccgacuccuucgugauccgcggggacgagguccggcagaucgcccccggccagaccgggaagaucgccgacuacaacuacaagcugccggacgacuucacgggcugcgugaucgcguggaacagcaacaaccucgacuccaaggucgggggcaacuacaacuaccuguaccgccuguuccgcaagagcaaccucaagcccuucgagcgggacaucuccaccgagaucuaccaggccggcagcacccccugcaacgggguggagggcuucaacugcuacuucccccugcaguccuacggguuccagccgaccaacggcgugggguaccagcccuaccggguggucgugcugagcuucgagcuccugcacgcccccgccacggugugcggccccaagaaguccaccaaccuggucaagaacaagugcgugaacuucaacuucaacggccucaccgggaccggcgugcugaccgagagcaacaagaaguuccugccguuccagcaguucgggcgcgacaucgccgacacgaccgacgcgguccgcgacccccagacccuggagauccucgacaucacccccugcagcuucggcgggguguccgugaucacgccgggcaccaacaccagcaaccaggucgccgugcuguaccagggcgugaacugcaccgagguccccguggccauccacgccgaccagcugacgcccaccuggcggguguacuccaccgggagcaacgucuuccagacccgcgccggcugccucaucggggcggagcacgugaacaacuccuacgagugcgacauccccaucggcgccggcaucugcgccagcuaccagacgcagaccaacuccccgcggcgcgcccggagcguggcgucccagagcgucaucgccuacaccaugucccugggggccgagaacagcguggccuacuccaacaacagcaucgccauccccaccaacuucacgaucuccgugaccaccgagauccugcccgucagcaugaccaagacgagcguggacugcaccauguacaucugcggcgacuccaccgagugcagcaaccuccugcugcaguacggguccuucugcacccagcucaaccgcgcgcugacgggcaucgccguggagcaggacaagaacacccaggaggucuucgcccaggugaagcagaucuacaagacgcccccgaucaaggacuucgggggcuucaacuucagccagauccugcccgaccccuccaagcccagcaagcgguccuucaucgaggaccuccuguucaacaaggugacccuggccgacgccggcuucaucaagcaguacggggacugccucggcgacaucgcggcccgcgaccugaucugcgcccagaaguucaacgggcugaccguccucccgccccugcugaccgacgagaugaucgcccaguacaccagcgcccuccuggcgggcaccaucacguccggguggaccuucggcgccggcgccgcccugcagauccccuucgcgaugcagauggccuaccgguucaacgggaucggcgugacccagaacgugcucuacgagaaccagaagcugaucgccaaccaguucaacagcgccaucgggaagauccaggacucccugagcuccaccgccagcgcgcucggcaagcugcaggacgucgugaaccagaacgcccaggcccugaacacgcucgugaagcagcuguccagcaacuucggggccaucuccagcguccugaacgacauccucucccgccuggacccgcccgaggccgaggugcagaucgaccggcugaucaccggccgccuccagagccugcagaccuacgugacccagcagcugauccgggcggccgagauccgcgccagcgccaaccucgccgcgaccaagauguccgagugcguccugggccagagcaagcggguggacuucugcgggaagggcuaccaccugauguccuucccccagagcgcgccccacgggguggucuuccuccacgugacguacguccccgcccaggagaagaacuucaccaccgccccggccaucugccacgacggcaaggcccacuucccccgcgaggggguguucguguccaacggcacccacugguucgucacgcagcggaacuucuacgagccccagaucaucaccaccgacaacaccuucgugagcggcaacugcgacguggucaucgggaucgugaacaacacgguguacgacccccugcagccggagcuggacuccuucaaggaggagcucgacaaguacuucaagaaccacaccagccccgacgucgaccugggcgacaucuccgggaucaacgccagcguggugaacauccagaaggagaucgaccgccugaacgaggucgccaagaaccucaacgagucccugaucgaccugcaggagcucggcaaguacgagcaguacaucaaguggcccugguacaucuggcugggcuucaucgccgggcugaucgcgaucgugauggugaccaucaugcucugcugcaugaccagcugcugcuccugccugaagggcugcugcagcugcggguccugcugcaaguucgacgaggacgacagcgagccgguccugaagggcgugaagcuccacuacacgugaggacuaguuauaagacugacuagcccgaugggccucccaacgggcccuccuccccuccuugcaccgagauuaauaaaaaaaaaaaaaaaaaaaaaaaaaaaaaaaaaaaaaaaaaaaaaaaaaaaaaaaaaaaaaaaaugcaucccccccccccccccccccccccccccccccaaaggcucuuuucagagccaccagaauu

SEQ ID NO: 23324 - RNA, 4039 nt, Artificial Sequence
  SARS-CoV-2/Wuhan/WIV05/2019__EPI_ISL_402128 spike protein mRNA gc (1-1273)(K986P_V987P_D614G_M1229I)
aggagaaagcuuaccauguucguguuccugguccuccugccccuggugagcucccagugcgugaaccucaccacccgcacgcagcugccgcccgccuacaccaacagcuucacccggggcgucuacuaccccgacaagguguuccgcuccagcgugcugcacuccacccaggaccucuuccugcccuucuucagcaacgucacgugguuccacgccauccacguguccgggaccaacggcaccaagcgguucgacaacccggugcugcccuucaacgacggggucuacuucgcgagcaccgagaaguccaacaucauccgcggcuggaucuucgggacgacccucgacagcaagacccagucccugcugaucgugaacaacgccaccaacguggucaucaaggugugcgaguuccaguucugcaacgaccccuuccucggcguguacuaccacaagaacaacaagagcuggauggaguccgaguuccgggucuacagcuccgccaacaacugcacguucgaguacgugagccagcccuuccugauggaccuggagggcaagcaggggaacuucaagaaccuccgcgaguucguguucaagaacaucgacggcuacuucaagaucuacuccaagcacaccccgaucaaccugguccgggaccugccccagggguucagcgcccucgagccccugguggaccugcccaucggcaucaacaucacccgcuuccagacccuccuggcccugcaccgguccuaccucacgccgggggacagcagcuccggcuggaccgcgggcgccgccgccuacuacgugggguaccugcagccccgcaccuuccugcucaaguacaacgagaacggcaccaucacggacgcggucgacugcgcccuggacccccugagcgagaccaagugcacccucaaguccuucaccguggagaaggggaucuaccagacgagcaacuuccgggugcagcccaccgaguccaucguccgcuucccgaacaucaccaaccugugccccuucggcgagguguucaacgccacccgguucgccagcgucuacgccuggaaccgcaagcggaucuccaacugcguggcggacuacagcgugcuguacaacuccgccagcuucuccacguucaagugcuacggcgucagccccaccaagcucaacgaccugugcuucaccaacguguacgccgacuccuucgugauccgcggggacgagguccggcagaucgcccccggccagaccgggaagaucgccgacuacaacuacaagcugccggacgacuucacgggcugcgugaucgcguggaacagcaacaaccucgacuccaaggucgggggcaacuacaacuaccuguaccgccuguuccgcaagagcaaccucaagcccuucgagcgggacaucuccaccgagaucuaccaggccggcagcacccccugcaacgggguggagggcuucaacugcuacuucccccugcaguccuacggguuccagccgaccaacggcgugggguaccagcccuaccggguggucgugcugagcuucgagcuccugcacgcccccgccacggugugcggccccaagaaguccaccaaccuggucaagaacaagugcgugaacuucaacuucaacggccucaccgggaccggcgugcugaccgagagcaacaagaaguuccugccguuccagcaguucgggcgcgacaucgccgacacgaccgacgcgguccgcgacccccagacccuggagauccucgacaucacccccugcagcuucggcgggguguccgugaucacgccgggcaccaacaccagcaaccaggucgccgugcuguaccagggcgugaacugcaccgagguccccguggccauccacgccgaccagcugacgcccaccuggcggguguacuccaccgggagcaacgucuuccagacccgcgccggcugccucaucggggcggagcacgugaacaacuccuacgagugcgacauccccaucggcgccggcaucugcgccagcuaccagacgcagaccaacuccccgcggcgcgcccggagcguggcgucccagagcaucaucgccuacaccaugucccugggggccgagaacagcgucgccuacuccaacaacagcaucgccauccccaccaacuucacgaucuccgugaccaccgagauccugcccgugagcaugaccaagacgagcgucgacugcaccauguacaucugcggcgacuccaccgagugcagcaaccuccugcugcaguacggguccuucugcacccagcucaaccgcgcgcugacgggcaucgccguggagcaggacaagaacacccaggagguguucgcccaggucaagcagaucuacaagacgcccccgaucaaggacuucgggggcuucaacuucagccagauccugcccgaccccuccaagcccagcaagcgguccuucaucgaggaccuccuguucaacaaggugacccuggccgacgccggcuucaucaagcaguacggggacugccucggcgacaucgcggcccgcgaccugaucugcgcccagaaguucaacgggcugaccgugcucccgccccugcugaccgacgagaugaucgcccaguacaccagcgcccuccuggcgggcaccaucacguccggguggaccuucggcgccggcgccgcccugcagauccccuucgcgaugcagauggccuaccgguucaacgggaucggcgucacccagaacgugcucuacgagaaccagaagcugaucgccaaccaguucaacagcgccaucgggaagauccaggacucccugagcuccaccgccagcgcgcucggcaagcugcaggacguggucaaccagaacgcccaggcccugaacacgcucgugaagcagcuguccagcaacuucggggccaucuccagcgugcugaacgacauccucucccgccuggacccgcccgaggccgagguccagaucgaccggcugaucaccggccgccuccagagccugcagaccuacgugacccagcagcugauccgggcggccgagauccgcgccagcgccaaccucgccgcgaccaagauguccgagugcgugcugggccagagcaagcgggucgacuucugcgggaagggcuaccaccugauguccuucccccagagcgcgccccacggggugguguuccuccacgucacguacgugcccgcccaggagaagaacuucaccaccgccccggccaucugccacgacggcaaggcccacuucccccgcgagggggucuucguguccaacggcacccacugguucgugacgcagcggaacuucuacgagccccagaucaucaccaccgacaacaccuucgucagcggcaacugcgacguggugaucgggaucgucaacaacacgguguacgacccccugcagccggagcuggacuccuucaaggaggagcucgacaaguacuucaagaaccacaccagccccgacguggaccugggcgacaucuccgggaucaacgccagcgucgugaacauccagaaggagaucgaccgccugaacgagguggccaagaaccucaacgagucccugaucgaccugcaggagcucggcaaguacgagcaguacaucaaguggcccugguacaucuggcugggcuucaucgccgggcugaucgcgaucgucaucgugaccaucaugcucugcugcaugaccagcugcugcuccugccugaagggcugcugcagcugcggguccugcugcaaguucgacgaggacgacagcgagccggugcugaagggcgucaagcuccacuacacgugaggacuaguuauaagacugacuagcccgaugggccucccaacgggcccuccuccccuccuugcaccgagauuaauaaaaaaaaaaaaaaaaaaaaaaaaaaaaaaaaaaaaaaaaaaaaaaaaaaaaaaaaaaaaaaaaugcaucccccccccccccccccccccccccccccccaaaggcucuuuucagagccaccagaauu

SEQ ID NO: 23325 - RNA, 4033 nt, Artificial Sequence
  SARS-CoV-2/Wuhan/WIV05/2019__EPI_ISL_402128 spike protein mRNA gc (1-1273)(K986P_V987P_H69del_V70del_A222V_Y453F_S477N_D614G_I692V)
aggagaaagcuuaccauguucguguuccugguccuccugccccuggugagcucccagugcgugaaccucaccacccgcacgcagcugccgcccgccuacaccaacagcuucacccggggcgucuacuaccccgacaagguguuccgcuccagcgugcugcacuccacccaggaccucuuccugcccuucuucagcaacgucacgugguuccacgccaucuccgggaccaacggcaccaagcgguucgacaacccggugcugcccuucaacgacgggguguacuucgcgagcaccgagaaguccaacaucauccgcggcuggaucuucgggacgacccucgacagcaagacccagucccugcugaucgucaacaacgccaccaacguggugaucaaggucugcgaguuccaguucugcaacgaccccuuccucggcguguacuaccacaagaacaacaagagcuggauggaguccgaguuccggguguacagcuccgccaacaacugcacguucgaguacgucagccagcccuuccugauggaccuggagggcaagcaggggaacuucaagaaccuccgcgaguucguguucaagaacaucgacggcuacuucaagaucuacuccaagcacaccccgaucaaccuggugcgggaccugccccagggguucagcguccucgagccccugguggaccugcccaucggcaucaacaucacccgcuuccagacccuccuggcccugcaccgguccuaccucacgccgggggacagcagcuccggcuggaccgccggcgcggccgccuacuacgugggguaccugcagccccgcaccuuccugcucaaguacaacgagaacggcaccaucacggacgccgucgacugcgcgcuggacccccugagcgagaccaagugcacccucaaguccuucaccguggagaaggggaucuaccagacgagcaacuuccgggugcagcccaccgaguccaucguccgcuucccgaacaucaccaaccugugccccuucggcgagguguucaacgccacccgguucgccagcgucuacgccuggaaccgcaagcggaucuccaacugcguggccgacuacagcgugcuguacaacuccgcgagcuucuccacguucaagugcuacggcgucagccccaccaagcucaacgaccugugcuucaccaacguguacgccgacuccuucgugauccgcggggacgagguccggcagaucgcccccggccagaccgggaagaucgccgacuacaacuacaagcugccggacgacuucacgggcugcgugaucgccuggaacagcaacaaccucgacuccaaggucgggggcaacuacaacuaccuguuccgccuguuccgcaagagcaaccucaagcccuucgagcgggacaucuccaccgagaucuaccaggcgggcaacacccccugcaacgggguggagggcuucaacugcuacuucccccugcagagcuacggguuccagccgaccaacggcgugggguaccagcccuaccggguggucgugcuguccuucgagcuccugcacgcccccgccacggugugcggccccaagaaguccaccaaccuggucaagaacaagugcgugaacuucaacuucaacggccucaccgggaccggcgugcugaccgagagcaacaagaaguuccugccguuccagcaguucgggcgcgacaucgccgacacgaccgacgccguccgcgacccccagacccuggagauccucgacaucacccccugcagcuucggcggggugagcgugaucacgccgggcaccaacaccuccaaccaggucgcggugcuguaccagggcgugaacugcaccgagguccccguggccauccacgccgaccagcugacgcccaccuggcggguguacagcaccggguccaacgucuuccagacccgcgccggcugccucaucggggccgagcacgugaacaacagcuacgagugcgacauccccaucggcgcgggcaucugcgccuccuaccagacgcagaccaacagcccgcggcgcgcccgguccguggccagccaguccgucaucgcguacaccaugagccugggggccgagaacuccguggccuacagcaacaacuccaucgccauccccaccaacuucacgaucagcgugaccaccgagauccugcccgucuccaugaccaagacgagcguggacugcaccauguacaucugcggcgacagcaccgagugcuccaaccuccugcugcaguacgggagcuucugcacccagcucaaccgcgcccugacgggcaucgcgguggagcaggacaagaacacccaggaggucuucgcccaggugaagcagaucuacaagacgcccccgaucaaggacuucgggggcuucaacuucucccagauccugcccgaccccagcaagcccuccaagcggagcuucaucgaggaccuccuguucaacaaggugacccuggccgacgccggcuucaucaagcaguacggggacugccucggcgacaucgccgcgcgcgaccugaucugcgcccagaaguucaacgggcugaccguccucccgccccugcugaccgacgagaugaucgcccaguacaccuccgcccuccuggccggcaccaucacgagcggguggaccuucggcgcgggcgccgcccugcagauccccuucgccaugcagauggcguaccgguucaacgggaucggcgugacccagaacgugcucuacgagaaccagaagcugaucgccaaccaguucaacuccgccaucgggaagauccaggacagccuguccagcaccgccuccgcccucggcaagcugcaggacgucgugaaccagaacgcgcaggcccugaacacgcucgugaagcagcugagcuccaacuucggggccaucagcuccguccugaacgacauccucagccgccuggacccgcccgaggccgaggugcagaucgaccggcugaucaccggccgccuccagucccugcagaccuacgugacccagcagcugauccgggccgcggagauccgcgccagcgccaaccucgccgccaccaagaugagcgagugcguccugggccaguccaagcggguggacuucugcgggaagggcuaccaccugaugagcuucccccaguccgcgccccacgggguggucuuccuccacgugacguacguccccgcccaggagaagaacuucaccaccgccccggccaucugccacgacggcaaggcgcacuucccccgcgaggggguguucgugagcaacggcacccacugguucgucacgcagcggaacuucuacgagccccagaucaucaccaccgacaacaccuucguguccggcaacugcgacguggucaucgggaucgugaacaacacgguguacgacccccugcagccggagcuggacagcuucaaggaggagcucgacaaguacuucaagaaccacaccucccccgacgucgaccugggcgacaucagcgggaucaacgccuccguggugaacauccagaaggagaucgaccgccugaacgaggucgccaagaaccucaacgagagccugaucgaccugcaggagcucggcaaguacgagcaguacaucaaguggcccugguacaucuggcugggcuucaucgccgggcugaucgccaucgugauggugaccaucaugcucugcugcaugaccuccugcugcagcugccugaagggcugcugcuccugcgggagcugcugcaaguucgacgaggacgacuccgagccgguccugaagggcgugaagcuccacuacacgugaggacuaguuauaagacugacuagcccgaugggccucccaacgggcccuccuccccuccuugcaccgagauuaauaaaaaaaaaaaaaaaaaaaaaaaaaaaaaaaaaaaaaaaaaaaaaaaaaaaaaaaaaaaaaaaaugcaucccccccccccccccccccccccccccccccaaaggcucuuuucagagccaccagaauu

SEQ ID NO: 23326 - RNA, 4033 nt, Artificial Sequence
  SARS-CoV-2/Wuhan/WIV05/2019__EPI_ISL_402128 spike protein mRNA gc (1-1273)(K986P_V987P_H69del_V70del_Y453F_D614G_I692V_M1229I)
aggagaaagcuuaccauguucguguuccugguccuccugccccuggugagcucccagugcgugaaccucaccacccgcacgcagcugccgcccgccuacaccaacagcuucacccggggcgucuacuaccccgacaagguguuccgcuccagcgugcugcacuccacccaggaccucuuccugcccuucuucagcaacgucacgugguuccacgccaucuccgggaccaacggcaccaagcgguucgacaacccggugcugcccuucaacgacgggguguacuucgcgagcaccgagaaguccaacaucauccgcggcuggaucuucgggacgacccucgacagcaagacccagucccugcugaucgucaacaacgccaccaacguggugaucaaggucugcgaguuccaguucugcaacgaccccuuccucggcguguacuaccacaagaacaacaagagcuggauggaguccgaguuccggguguacagcuccgccaacaacugcacguucgaguacgucagccagcccuuccugauggaccuggagggcaagcaggggaacuucaagaaccuccgcgaguucguguucaagaacaucgacggcuacuucaagaucuacuccaagcacaccccgaucaaccuggugcgggaccugccccagggguucagcgcccucgagccccuggucgaccugcccaucggcaucaacaucacccgcuuccagacccuccuggcccugcaccgguccuaccucacgccgggggacagcagcuccggcuggaccgcgggcgccgccgccuacuacgugggguaccugcagccccgcaccuuccugcucaaguacaacgagaacggcaccaucacggacgcgguggacugcgcccuggacccccugagcgagaccaagugcacccucaaguccuucaccgucgagaaggggaucuaccagacgagcaacuuccgggugcagcccaccgaguccaucgugcgcuucccgaacaucaccaaccugugccccuucggcgaggucuucaacgccacccgguucgccagcguguacgccuggaaccgcaagcggaucuccaacugcgucgcggacuacagcgugcuguacaacuccgccagcuucuccacguucaagugcuacggcgugagccccaccaagcucaacgaccugugcuucaccaacgucuacgccgacuccuucgugauccgcggggacgaggugcggcagaucgcccccggccagaccgggaagaucgccgacuacaacuacaagcugccggacgacuucacgggcugcgucaucgcguggaacagcaacaaccucgacuccaaggucgggggcaacuacaacuaccuguuccgccuguuccgcaagagcaaccucaagcccuucgagcgggacaucuccaccgagaucuaccaggccggcagcacccccugcaacgggguggagggcuucaacugcuacuucccccugcaguccuacggguuccagccgaccaacggcgugggguaccagcccuaccggguggugguccugagcuucgagcuccugcacgcccccgccacggugugcggccccaagaaguccaccaaccuggugaagaacaagugcgucaacuucaacuucaacggccucaccgggaccggcgugcugaccgagagcaacaagaaguuccugccguuccagcaguucgggcgcgacaucgccgacacgaccgacgcggugcgcgacccccagacccuggagauccucgacaucacccccugcagcuucggcggggucuccgugaucacgccgggcaccaacaccagcaaccagguggccguccuguaccagggcgugaacugcaccgaggugcccgucgccauccacgccgaccagcugacgcccaccuggcggguguacuccaccgggagcaacguguuccagacccgcgccggcugccucaucggggcggagcacgucaacaacuccuacgagugcgacauccccaucggcgccggcaucugcgccagcuaccagacgcagaccaacuccccgcggcgcgcccggagcguggcgucccagagcgugaucgccuacaccaugucccugggggccgagaacagcgucgccuacuccaacaacagcaucgccauccccaccaacuucacgaucuccgugaccaccgagauccugcccgugagcaugaccaagacgagcgucgacugcaccauguacaucugcggcgacuccaccgagugcagcaaccuccugcugcaguacggguccuucugcacccagcucaaccgcgcgcugacgggcaucgccguggagcaggacaagaacacccaggagguguucgcccaggucaagcagaucuacaagacgcccccgaucaaggacuucgggggcuucaacuucagccagauccugcccgaccccuccaagcccagcaagcgguccuucaucgaggaccuccuguucaacaaggugacccuggccgacgccggcuucaucaagcaguacggggacugccucggcgacaucgcggcccgcgaccugaucugcgcccagaaguucaacgggcugaccgugcucccgccccugcugaccgacgagaugaucgcccaguacaccagcgcccuccuggcgggcaccaucacguccggguggaccuucggcgccggcgccgcccugcagauccccuucgcgaugcagauggccuaccgguucaacgggaucggcgucacccagaacgugcucuacgagaaccagaagcugaucgccaaccaguucaacagcgccaucgggaagauccaggacucccugagcuccaccgccagcgcgcucggcaagcugcaggacguggucaaccagaacgcccaggcccugaacacgcucgugaagcagcuguccagcaacuucggggccaucuccagcgugcugaacgacauccucucccgccuggacccgcccgaggccgagguccagaucgaccggcugaucaccggccgccuccagagccugcagaccuacgugacccagcagcugauccgggcggccgagauccgcgccagcgccaaccucgccgcgaccaagauguccgagugcgugcugggccagagcaagcgggucgacuucugcgggaagggcuaccaccugauguccuucccccagagcgcgccccacggggugguguuccuccacgucacguacgugcccgcccaggagaagaacuucaccaccgccccggccaucugccacgacggcaaggcccacuucccccgcgagggggucuucguguccaacggcacccacugguucgugacgcagcggaacuucuacgagccccagaucaucaccaccgacaacaccuucgucagcggcaacugcgacguggugaucgggaucgucaacaacacgguguacgacccccugcagccggagcuggacuccuucaaggaggagcucgacaaguacuucaagaaccacaccagccccgacguggaccugggcgacaucuccgggaucaacgccagcgucgugaacauccagaaggagaucgaccgccugaacgagguggccaagaaccucaacgagucccugaucgaccugcaggagcucggcaaguacgagcaguacaucaaguggcccugguacaucuggcugggcuucaucgccgggcugaucgcgaucgucaucgugaccaucaugcucugcugcaugaccagcugcugcuccugccugaagggcugcugcagcugcggguccugcugcaaguucgacgaggacgacagcgagccggugcugaagggcgucaagcuccacuacacgugaggacuaguuauaagacugacuagcccgaugggccucccaacgggcccuccuccccuccuugcaccgagauuaauaaaaaaaaaaaaaaaaaaaaaaaaaaaaaaaaaaaaaaaaaaaaaaaaaaaaaaaaaaaaaaaaugcaucccccccccccccccccccccccccccccccaaaggcucuuuucagagccaccagaauu

SEQ ID NO: 23327 - RNA, 4030 nt, Artificial Sequence
  SARS-CoV-2/Wuhan/WIV05/2019__EPI_ISL_402128 spike protein mRNA gc (1-1273)(K986P_V987P_K986P_V987P_H69del_V70del_Y144del_N501Y_A570 D_D614G_P681H_T716I_S982A_D1118H)
aggagaaagcuuaccauguucguguuccugguccuccugccccuggugagcucccagugcgugaaccucaccacccgcacgcagcugccgcccgccuacaccaacagcuucacccggggcgucuacuaccccgacaagguguuccgcuccagcgugcugcacuccacccaggaccucuuccugcccuucuucagcaacgucacgugguuccacgccaucuccgggaccaacggcaccaagcgguucgacaacccggugcugcccuucaacgacgggguguacuucgcgagcaccgagaaguccaacaucauccgcggcuggaucuucgggacgacccucgacagcaagacccagucccugcugaucgucaacaacgccaccaacguggugaucaaggucugcgaguuccaguucugcaacgaccccuuccucggcguguaccacaagaacaacaagagcuggauggaguccgaguuccggguguacagcuccgccaacaacugcacguucgaguacgucagccagcccuuccugauggaccuggagggcaagcaggggaacuucaagaaccuccgcgaguucguguucaagaacaucgacggcuacuucaagaucuacuccaagcacaccccgaucaaccuggugcgggaccugccccagggguucagcgcccucgagccccuggucgaccugcccaucggcaucaacaucacccgcuuccagacccuccuggcccugcaccgguccuaccucacgccgggggacagcagcuccggcuggaccgcgggcgccgccgccuacuacgugggguaccugcagccccgcaccuuccugcucaaguacaacgagaacggcaccaucacggacgcgguggacugcgcccuggacccccugagcgagaccaagugcacccucaaguccuucaccgucgagaaggggaucuaccagacgagcaacuuccgggugcagcccaccgaguccaucgugcgcuucccgaacaucaccaaccugugccccuucggcgaggucuucaacgccacccgguucgccagcguguacgccuggaaccgcaagcggaucuccaacugcgucgcggacuacagcgugcuguacaacuccgccagcuucuccacguucaagugcuacggcgugagccccaccaagcucaacgaccugugcuucaccaacgucuacgccgacuccuucgugauccgcggggacgaggugcggcagaucgcccccggccagaccgggaagaucgccgacuacaacuacaagcugccggacgacuucacgggcugcgucaucgcguggaacagcaacaaccucgacuccaaggucgggggcaacuacaacuaccuguaccgccuguuccgcaagagcaaccucaagcccuucgagcgggacaucuccaccgagaucuaccaggccggcagcacccccugcaacgggguggagggcuucaacugcuacuucccccugcaguccuacggguuccagccgaccuacggcgugggguaccagcccuaccggguggugguccugagcuucgagcuccugcacgcccccgccacggugugcggccccaagaaguccaccaaccuggugaagaacaagugcgucaacuucaacuucaacggccucaccgggaccggcgugcugaccgagagcaacaagaaguuccugccguuccagcaguucgggcgcgacaucgacgacacgaccgacgccgugcgcgacccccagacccuggagauccucgacaucacccccugcagcuucggcggggucuccgugaucacgccgggcaccaacaccagcaaccagguggcgguccuguaccagggcgugaacugcaccgaggugcccgucgccauccacgccgaccagcugacgcccaccuggcggguguacuccaccgggagcaacguguuccagacccgcgccggcugccucaucggggccgagcacgucaacaacuccuacgagugcgacauccccaucggcgcgggcaucugcgccagcuaccagacgcagaccaacucccaccggcgcgcccggagcguggccucccagagcaucaucgcguacaccaugucccugggggccgagaacagcguggccuacuccaacaacagcaucgccaucccgaucaacuucaccaucuccgucacgaccgagauccugcccgugagcaugaccaagaccagcguggacugcacgauguacaucugcggcgacuccaccgagugcagcaaccuccugcugcaguacggguccuucugcacccagcucaaccgcgcccugaccggcaucgcggucgagcaggacaagaacacgcaggagguguucgcccaggugaagcagaucuacaagaccccgcccaucaaggacuucgggggcuucaacuucagccagauccugcccgaccccuccaagcccagcaagcgguccuucaucgaggaccuccuguucaacaaggucacccuggccgacgccggcuucaucaagcaguacggggacugccucggcgacaucgccgcgcgcgaccugaucugcgcccagaaguucaacgggcugaccgugcugcccccgcuccugacggacgagaugaucgcccaguacaccagcgcccuccuggccggcaccaucaccuccggguggacguucggcgcgggcgccgcccugcagauccccuucgccaugcagauggcguaccgguucaacgggaucggcgugacccagaacguccucuacgagaaccagaagcugaucgccaaccaguucaacagcgccaucgggaagauccaggacucccugagcuccaccgccagcgcccucggcaagcugcaggacguggugaaccagaacgcgcaggcccugaacacccucgucaagcagcuguccagcaacuucggggccaucuccagcgugcugaacgacauccucgcccgccuggacccgcccgaggccgaggugcagaucgaccggcugaucacgggccgccuccagucccugcagaccuacgucacccagcagcugauccgggcggccgagauccgcgccagcgccaaccucgccgcgaccaagaugagcgagugcgugcugggccaguccaagcggguggacuucugcgggaagggcuaccaccugaugagcuucccccaguccgcgccccacggggucguguuccuccacgugaccuacguccccgcccaggagaagaacuucacgaccgcccccgccaucugccacgacggcaaggcccacuucccgcgcgaggggguguucgucagcaacggcacccacugguucgugacccagcggaacuucuacgagccccagaucaucacgacccacaacaccuucguguccggcaacugcgacgucgugaucgggaucgugaacaacaccgucuacgacccccugcagcccgagcuggacagcuucaaggaggagcucgacaaguacuucaagaaccacacguccccggacguggaccugggcgacaucagcgggaucaacgccuccguggucaacauccagaaggagaucgaccgccugaacgagguggccaagaaccucaacgagagccugaucgaccugcaggagcucggcaaguacgagcaguacaucaaguggcccugguacaucuggcugggcuucaucgccgggcugaucgcgaucgugauggucaccaucaugcucugcugcaugaccuccugcugcagcugccugaagggcugcugcuccugcgggagcugcugcaaguucgacgaggacgacuccgagcccgugcugaagggcgugaagcuccacuacaccugaggacuaguuauaagacugacuagcccgaugggccucccaacgggcccuccuccccuccuugcaccgagauuaauaaaaaaaaaaaaaaaaaaaaaaaaaaaaaaaaaaaaaaaaaaaaaaaaaaaaaaaaaaaaaaaaugcaucccccccccccccccccccccccccccccccaaaggcucuuuucagagccaccagaauu

SEQ ID NO: 23328 - RNA, 4039 nt, Artificial Sequence
  SARS-CoV-2/Wuhan/WIV05/2019__EPI_ISL_402128 spike protein mRNA gc (1-1273)(K986P_V987P_K986P_V987P_K417N_E484K_N501Y_D614G)
aggagaaagcuuaccauguucguguuccugguccuccugccccuggugagcucccagugcgugaaccucaccacccgcacgcagcugccgcccgccuacaccaacagcuucacccggggcgucuacuaccccgacaagguguuccgcuccagcgugcugcacuccacccaggaccucuuccugcccuucuucagcaacgucacgugguuccacgccauccacguguccgggaccaacggcaccaagcgguucgacaacccggugcugcccuucaacgacggggucuacuucgcgagcaccgagaaguccaacaucauccgcggcuggaucuucgggacgacccucgacagcaagacccagucccugcugaucgugaacaacgccaccaacguggucaucaaggugugcgaguuccaguucugcaacgaccccuuccucggcguguacuaccacaagaacaacaagagcuggauggaguccgaguuccgggucuacagcuccgccaacaacugcacguucgaguacgugagccagcccuuccugauggaccuggagggcaagcaggggaacuucaagaaccuccgcgaguucguguucaagaacaucgacggcuacuucaagaucuacuccaagcacaccccgaucaaccugguccgggaccugccccagggguucagcgcccucgagccccugguggaccugcccaucggcaucaacaucacccgcuuccagacccuccuggcccugcaccgguccuaccucacgccgggggacagcagcuccggcuggaccgcgggcgccgccgccuacuacgugggguaccugcagccccgcaccuuccugcucaaguacaacgagaacggcaccaucacggacgcggucgacugcgcccuggacccccugagcgagaccaagugcacccucaaguccuucaccguggagaaggggaucuaccagacgagcaacuuccgggugcagcccaccgaguccaucguccgcuucccgaacaucaccaaccugugccccuucggcgagguguucaacgccacccgguucgccagcgucuacgccuggaaccgcaagcggaucuccaacugcguggcggacuacagcgugcuguacaacuccgccagcuucuccacguucaagugcuacggcgucagccccaccaagcucaacgaccugugcuucaccaacguguacgccgacuccuucgugauccgcggggacgagguccggcagaucgcccccggccagaccgggaacaucgccgacuacaacuacaagcugccggacgacuucacgggcugcgugaucgcguggaacagcaacaaccucgacuccaaggucgggggcaacuacaacuaccuguaccgccuguuccgcaagagcaaccucaagcccuucgagcgggacaucuccaccgagaucuaccaggccggcagcacccccugcaacggggugaagggcuucaacugcuacuucccccugcaguccuacggguuccagccgaccuacggcgugggguaccagcccuaccggguggucgugcugagcuucgagcuccugcacgcccccgccacggugugcggccccaagaaguccaccaaccuggucaagaacaagugcgugaacuucaacuucaacggccucaccgggaccggcgugcugaccgagagcaacaagaaguuccugccguuccagcaguucgggcgcgacaucgccgacacgaccgacgcgguccgcgacccccagacccuggagauccucgacaucacccccugcagcuucggcgggguguccgugaucacgccgggcaccaacaccagcaaccaggucgccgugcuguaccagggcgugaacugcaccgagguccccguggccauccacgccgaccagcugacgcccaccuggcggguguacuccaccgggagcaacgucuuccagacccgcgccggcugccucaucggggcggagcacgugaacaacuccuacgagugcgacauccccaucggcgccggcaucugcgccagcuaccagacgcagaccaacuccccgcggcgcgcccggagcguggcgucccagagcaucaucgccuacaccaugucccugggggccgagaacagcgucgccuacuccaacaacagcaucgccauccccaccaacuucacgaucuccgugaccaccgagauccugcccgugagcaugaccaagacgagcgucgacugcaccauguacaucugcggcgacuccaccgagugcagcaaccuccugcugcaguacggguccuucugcacccagcucaaccgcgcgcugacgggcaucgccguggagcaggacaagaacacccaggagguguucgcccaggucaagcagaucuacaagacgcccccgaucaaggacuucgggggcuucaacuucagccagauccugcccgaccccuccaagcccagcaagcgguccuucaucgaggaccuccuguucaacaaggugacccuggccgacgccggcuucaucaagcaguacggggacugccucggcgacaucgcggcccgcgaccugaucugcgcccagaaguucaacgggcugaccgugcucccgccccugcugaccgacgagaugaucgcccaguacaccagcgcccuccuggcgggcaccaucacguccggguggaccuucggcgccggcgccgcccugcagauccccuucgcgaugcagauggccuaccgguucaacgggaucggcgucacccagaacgugcucuacgagaaccagaagcugaucgccaaccaguucaacagcgccaucgggaagauccaggacucccugagcuccaccgccagcgcgcucggcaagcugcaggacguggucaaccagaacgcccaggcccugaacacgcucgugaagcagcuguccagcaacuucggggccaucuccagcgugcugaacgacauccucucccgccuggacccgcccgaggccgagguccagaucgaccggcugaucaccggccgccuccagagccugcagaccuacgugacccagcagcugauccgggcggccgagauccgcgccagcgccaaccucgccgcgaccaagauguccgagugcgugcugggccagagcaagcgggucgacuucugcgggaagggcuaccaccugauguccuucccccagagcgcgccccacggggugguguuccuccacgucacguacgugcccgcccaggagaagaacuucaccaccgccccggccaucugccacgacggcaaggcccacuucccccgcgagggggucuucguguccaacggcacccacugguucgugacgcagcggaacuucuacgagccccagaucaucaccaccgacaacaccuucgucagcggcaacugcgacguggugaucgggaucgucaacaacacgguguacgacccccugcagccggagcuggacuccuucaaggaggagcucgacaaguacuucaagaaccacaccagccccgacguggaccugggcgacaucuccgggaucaacgccagcgucgugaacauccagaaggagaucgaccgccugaacgagguggccaagaaccucaacgagucccugaucgaccugcaggagcucggcaaguacgagcaguacaucaaguggcccugguacaucuggcugggcuucaucgccgggcugaucgcgaucgucauggugaccaucaugcucugcugcaugaccagcugcugcuccugccugaagggcugcugcagcugcggguccugcugcaaguucgacgaggacgacagcgagccggugcugaagggcgucaagcuccacuacacgugaggacuaguuauaagacugacuagcccgaugggccucccaacgggcccuccuccccuccuugcaccgagauuaauaaaaaaaaaaaaaaaaaaaaaaaaaaaaaaaaaaaaaaaaaaaaaaaaaaaaaaaaaaaaaaaaugcaucccccccccccccccccccccccccccccccaaaggcucuuuucagagccaccagaauu

SEQ ID NO: 23329 - RNA, 4030 nt, Artificial Sequence
  SARS-CoV-2/Wuhan/WIV05/2019__EPI_ISL_402128 spike protein mRNA gc (1-1273)(K986P_V987P_K986P_V987P_L18F_D80A_D215G_L242del_A243del_ L244del_R246I_K417N_E484K_N501Y_D614G_A701V)
aggagaaagcuuaccauguucguguuccugguccuccugccccuggugagcucccagugcgugaacuucaccacccgcacgcagcucccgcccgccuacaccaacagcuucacccggggcgucuacuaccccgacaagguguuccgcuccagcgugcugcacuccacccaggaccuguuccuccccuucuucagcaacgucacgugguuccacgccauccacguguccgggaccaacggcaccaagcgguucgcgaacccggugcugcccuucaacgacggggucuacuucgccagcaccgagaaguccaacaucauccgcggcuggaucuucgggacgacccuggacagcaagacccagucccuccugaucgugaacaacgccaccaacguggucaucaaggugugcgaguuccaguucugcaacgaccccuuccugggcguguacuaccacaagaacaacaagagcuggauggaguccgaguuccgggucuacagcuccgccaacaacugcacguucgaguacgugagccagcccuuccucauggaccuggagggcaagcaggggaacuucaagaaccugcgcgaguucguguucaagaacaucgacggcuacuucaagaucuacuccaagcacaccccgaucaaccucguccgggggcugccccagggcuucagcgcccuggagccccucguggaccugcccaucgggaucaacaucacccgcuuccagacccugcacaucuccuaccucacgccgggcgacagcagcuccggcuggaccgcgggggccgccgccuacuacgugggcuaccugcagccccggaccuuccugcucaaguacaacgagaacgggaccaucacggacgcggucgacugcgcccuggacccccugagcgagaccaagugcacccucaaguccuucaccguggagaagggcaucuaccagacgagcaacuuccgcgugcagcccaccgaguccaucguccgguucccgaacaucaccaaccugugccccuucggcgagguguucaacgccacccgcuucgccagcgucuacgccuggaaccggaagcgcaucuccaacugcguggcggacuacagcgugcuguacaacuccgccagcuucuccacguucaagugcuacggggucagccccaccaagcucaacgaccugugcuucaccaacguguacgccgacuccuucgugauccggggcgacgagguccgccagaucgcccccgggcagaccggcaacaucgccgacuacaacuacaagcugccggacgacuucacggggugcgugaucgcguggaacagcaacaaccucgacuccaaggugggcggcaacuacaacuaccuguaccggcuguuccgcaagagcaaccucaagcccuucgagcgggacaucuccaccgagaucuaccaggccgggagcacccccugcaacggcgucaagggguucaacugcuacuucccccugcaguccuacggcuuccagccgaccuacggggugggcuaccagcccuaccgcguggucgugcugagcuucgagcuccugcacgcccccgccacggugugcggccccaagaaguccaccaaccuggucaagaacaagugcgugaacuucaacuucaacgggcucaccggcaccggggugcugaccgagagcaacaagaaguuccugccguuccagcaguucggccgggacaucgccgacacgaccgacgcgguccgcgacccccagacccucgagauccuggacaucacccccugcagcuucgggggcguguccgugaucacgccgggcaccaacaccagcaaccaggucgccgugcuguaccagggggugaacugcaccgagguccccguggccauccacgccgaccagcugacgcccaccuggcgcguguacuccaccggcagcaacgucuuccagacccgggccgggugccucaucggcgcggagcacgugaacaacuccuacgagugcgacauccccaucggcgccgggaucugcgccagcuaccagacgcagaccaacuccccgcgccgggcccgcagcguggcgucccagagcaucaucgccuacaccaugucccugggcgucgagaacagcguggccuacuccaacaacagcaucgccauccccaccaacuucacgaucuccgugaccaccgagauccugcccgucagcaugaccaagacgagcguggacugcaccauguacaucugcggggacuccaccgagugcagcaaccuccugcugcaguacggcuccuucugcacccagcucaaccgggcccugacggggaucgcgguggagcaggacaagaacacccaggaggucuucgcccaggugaagcagaucuacaagacgcccccgaucaaggacuucggcggcuucaacuucagccagauccugcccgaccccuccaagcccagcaagcgcuccuucaucgaggaccuccuguucaacaaggugacccuggccgacgccggguucaucaagcaguacggcgacugccucggggacaucgccgcgcgggaccugaucugcgcccagaaguucaacggccugaccguccucccgccccugcugaccgacgagaugaucgcccaguacaccagcgcccuccuggccgggaccaucacguccggcuggaccuucggcgcgggggccgcccugcagauccccuucgccaugcagauggcguaccgcuucaacggcaucggggugacccagaacgugcucuacgagaaccagaagcugaucgccaaccaguucaacagcgccaucggcaagauccaggacucccugagcuccaccgccagcgcccucgggaagcugcaggacgucgugaaccagaacgcgcaggcccugaacacgcucgugaagcagcuguccagcaacuucggcgccaucuccagcguccugaacgacauccucucccggcuggacccgcccgaggccgaggugcagaucgaccgccugaucaccggccggcuccagagccugcagaccuacgugacccagcagcugauccgcgccgcggagauccgggccagcgccaaccucgccgccaccaagauguccgagugcguccuggggcagagcaagcgcguggacuucugcggcaagggguaccaccugauguccuucccccagagcgcgccccacggcguggucuuccuccacgugacguacguccccgcccaggagaagaacuucaccaccgccccggccaucugccacgacgggaaggcgcacuucccccgggagggcguguucguguccaacggcacccacugguucgucacgcagcgcaacuucuacgagccccagaucaucaccaccgacaacaccuucgugagcgggaacugcgacguggucaucggcaucgugaacaacacgguguacgacccccugcagccggagcuggacuccuucaaggaggagcucgacaaguacuucaagaaccacaccagccccgacgucgaccugggggacaucuccggcaucaacgccagcguggugaacauccagaaggagaucgaccggcugaacgaggucgccaagaaccucaacgagucccugaucgaccugcaggagcucggcaaguacgagcaguacaucaaguggcccugguacaucuggcugggguucaucgccggccugaucgccaucgugauggugaccaucaugcucugcugcaugaccagcugcugcuccugccugaaggggugcugcagcugcggcuccugcugcaaguucgacgaggacgacagcgagccgguccugaagggggugaagcuccacuacacgugaggacuaguuauaagacugacuagcccgaugggccucccaacgggcccuccuccccuccuugcaccgagauuaauaaaaaaaaaaaaaaaaaaaaaaaaaaaaaaaaaaaaaaaaaaaaaaaaaaaaaaaaaaaaaaaaugcaucccccccccccccccccccccccccccccccaaaggcucuuuucagagccaccagaauu

SEQ ID NO: 23330 - RNA, 4039 nt, Artificial Sequence
  SARS-CoV-2/Wuhan/WIV05/2019__EPI_ISL_402128 spike protein mRNA gc (1-1273)(K986P_V987P_K986P_V987P_E484K_D614G)
aggagaaagcuuaccauguucguguuccugguccuccugccccuggugagcucccagugcgugaaccucaccacccgcacgcagcugccgcccgccuacaccaacagcuucacccggggcgucuacuaccccgacaagguguuccgcuccagcgugcugcacuccacccaggaccucuuccugcccuucuucagcaacgucacgugguuccacgccauccacguguccgggaccaacggcaccaagcgguucgacaacccggugcugcccuucaacgacggggucuacuucgcgagcaccgagaaguccaacaucauccgcggcuggaucuucgggacgacccucgacagcaagacccagucccugcugaucgugaacaacgccaccaacguggucaucaaggugugcgaguuccaguucugcaacgaccccuuccucggcguguacuaccacaagaacaacaagagcuggauggaguccgaguuccgggucuacagcuccgccaacaacugcacguucgaguacgugagccagcccuuccugauggaccuggagggcaagcaggggaacuucaagaaccuccgcgaguucguguucaagaacaucgacggcuacuucaagaucuacuccaagcacaccccgaucaaccugguccgggaccugccccagggguucagcgcccucgagccccugguggaccugcccaucggcaucaacaucacccgcuuccagacccuccuggcccugcaccgguccuaccucacgccgggggacagcagcuccggcuggaccgcgggcgccgccgccuacuacgugggguaccugcagccccgcaccuuccugcucaaguacaacgagaacggcaccaucacggacgcggucgacugcgcccuggacccccugagcgagaccaagugcacccucaaguccuucaccguggagaaggggaucuaccagacgagcaacuuccgggugcagcccaccgaguccaucguccgcuucccgaacaucaccaaccugugccccuucggcgagguguucaacgccacccgguucgccagcgucuacgccuggaaccgcaagcggaucuccaacugcguggcggacuacagcgugcuguacaacuccgccagcuucuccacguucaagugcuacggcgucagccccaccaagcucaacgaccugugcuucaccaacguguacgccgacuccuucgugauccgcggggacgagguccggcagaucgcccccggccagaccgggaagaucgccgacuacaacuacaagcugccggacgacuucacgggcugcgugaucgcguggaacagcaacaaccucgacuccaaggucgggggcaacuacaacuaccuguaccgccuguuccgcaagagcaaccucaagcccuucgagcgggacaucuccaccgagaucuaccaggccggcagcacccccugcaacggggugaagggcuucaacugcuacuucccccugcaguccuacggguuccagccgaccaacggcgugggguaccagcccuaccggguggucgugcugagcuucgagcuccugcacgcccccgccacggugugcggccccaagaaguccaccaaccuggucaagaacaagugcgugaacuucaacuucaacggccucaccgggaccggcgugcugaccgagagcaacaagaaguuccugccguuccagcaguucgggcgcgacaucgccgacacgaccgacgcgguccgcgacccccagacccuggagauccucgacaucacccccugcagcuucggcgggguguccgugaucacgccgggcaccaacaccagcaaccaggucgccgugcuguaccagggcgugaacugcaccgagguccccguggccauccacgccgaccagcugacgcccaccuggcggguguacuccaccgggagcaacgucuuccagacccgcgccggcugccucaucggggcggagcacgugaacaacuccuacgagugcgacauccccaucggcgccggcaucugcgccagcuaccagacgcagaccaacuccccgcggcgcgcccggagcguggcgucccagagcaucaucgccuacaccaugucccugggggccgagaacagcgucgccuacuccaacaacagcaucgccauccccaccaacuucacgaucuccgugaccaccgagauccugcccgugagcaugaccaagacgagcgucgacugcaccauguacaucugcggcgacuccaccgagugcagcaaccuccugcugcaguacggguccuucugcacccagcucaaccgcgcgcugacgggcaucgccguggagcaggacaagaacacccaggagguguucgcccaggucaagcagaucuacaagacgcccccgaucaaggacuucgggggcuucaacuucagccagauccugcccgaccccuccaagcccagcaagcgguccuucaucgaggaccuccuguucaacaaggugacccuggccgacgccggcuucaucaagcaguacggggacugccucggcgacaucgcggcccgcgaccugaucugcgcccagaaguucaacgggcugaccgugcucccgccccugcugaccgacgagaugaucgcccaguacaccagcgcccuccuggcgggcaccaucacguccggguggaccuucggcgccggcgccgcccugcagauccccuucgcgaugcagauggccuaccgguucaacgggaucggcgucacccagaacgugcucuacgagaaccagaagcugaucgccaaccaguucaacagcgccaucgggaagauccaggacucccugagcuccaccgccagcgcgcucggcaagcugcaggacguggucaaccagaacgcccaggcccugaacacgcucgugaagcagcuguccagcaacuucggggccaucuccagcgugcugaacgacauccucucccgccuggacccgcccgaggccgagguccagaucgaccggcugaucaccggccgccuccagagccugcagaccuacgugacccagcagcugauccgggcggccgagauccgcgccagcgccaaccucgccgcgaccaagauguccgagugcgugcugggccagagcaagcgggucgacuucugcgggaagggcuaccaccugauguccuucccccagagcgcgccccacggggugguguuccuccacgucacguacgugcccgcccaggagaagaacuucaccaccgccccggccaucugccacgacggcaaggcccacuucccccgcgagggggucuucguguccaacggcacccacugguucgugacgcagcggaacuucuacgagccccagaucaucaccaccgacaacaccuucgucagcggcaacugcgacguggugaucgggaucgucaacaacacgguguacgacccccugcagccggagcuggacuccuucaaggaggagcucgacaaguacuucaagaaccacaccagccccgacguggaccugggcgacaucuccgggaucaacgccagcgucgugaacauccagaaggagaucgaccgccugaacgagguggccaagaaccucaacgagucccugaucgaccugcaggagcucggcaaguacgagcaguacaucaaguggcccugguacaucuggcugggcuucaucgccgggcugaucgcgaucgucauggugaccaucaugcucugcugcaugaccagcugcugcuccugccugaagggcugcugcagcugcggguccugcugcaaguucgacgaggacgacagcgagccggugcugaagggcgucaagcuccacuacacgugaggacuaguuauaagacugacuagcccgaugggccucccaacgggcccuccuccccuccuugcaccgagauuaauaaaaaaaaaaaaaaaaaaaaaaaaaaaaaaaaaaaaaaaaaaaaaaaaaaaaaaaaaaaaaaaaugcaucccccccccccccccccccccccccccccccaaaggcucuuuucagagccaccagaauu

SEQ ID NO: 23331 - RNA, 4039 nt, Artificial Sequence
  SARS-CoV-2/Wuhan/WIV05/2019__EPI_ISL_402128 spike protein mRNA gc (1-1273)(K986P_V987P_K986P_V987P_L18F_T20N_P26S_D138Y_R190S_K417T _E484K_N501Y_D614G_H655Y_T1027I)
aggagaaagcuuaccauguucguguuccugguccuccugccccuggugagcucccagugcgugaacuucaccaaccgcacccagcucccgagcgccuacacgaacuccuucacccggggcgucuacuaccccgacaagguguuccgcagcuccgugcugcacagcacccaggaccuguuccuccccuucuucuccaacgucaccugguuccacgccauccacgugagcgggacgaacggcaccaagcgguucgacaaccccgugcugccguucaacgacggggucuacuucgcguccaccgagaaguccaacaucauccgcggcuggaucuucgggaccacgcuggacuccaagacccagagccuccugaucgugaacaacgccaccaacguggucaucaaggugugcgaguuccaguucugcaacuaccccuuccugggcguguacuaccacaagaacaacaaguccuggauggagagcgaguuccgggucuacuccagcgccaacaacugcaccuucgaguacgugucccagcccuuccucauggaccuggagggcaagcaggggaacuucaagaaccugagcgaguucguguucaagaacaucgacggcuacuucaagaucuacuccaagcacacgcccaucaaccucguccgcgaccugccgcagggguucagcgcccuggagccccucguggaccugcccaucggcaucaacaucacccgguuccagacccugcucgcccugcaccgcagcuaccugacccccggggacuccagcuccggcuggacggcgggcgccgccgccuacuacgugggguaccuccagccgcggaccuuccugcugaaguacaacgagaacggcaccaucaccgacgcggucgacugcgcccucgacccccugagcgagacgaagugcacccugaaguccuucaccguggagaaggggaucuaccagaccagcaacuuccgcgugcagcccacggaguccaucguccgguuccccaacaucaccaaccucugcccguucggcgagguguucaacgccacccgcuucgccagcgucuacgccuggaaccggaagcgcaucuccaacugcguggcggacuacagcgugcuguacaacuccgccagcuucuccaccuucaagugcuacggcgucagccccacgaagcugaacgaccucugcuucaccaacguguacgccgacuccuucgugauccgcggggacgagguccggcagaucgcccccggccagaccgggaccaucgccgacuacaacuacaagcugcccgacgacuucacgggcugcgugaucgcguggaacagcaacaaccuggacuccaaggucgggggcaacuacaacuaccucuaccggcuguuccgcaagagcaaccugaagccguucgagcgggacaucuccaccgagaucuaccaggccggcagcacccccugcaacggggugaagggcuucaacugcuacuucccccuccagagcuacggguuccagcccaccuacggcgugggguaccagccguaccgcguggucgugcuguccuucgagcugcuccacgcccccgccacggugugcggccccaagaaguccaccaaccuggucaagaacaagugcgugaacuucaacuucaacggccugaccgggaccggcgugcucaccgagagcaacaagaaguuccugcccuuccagcaguucgggcgggacaucgccgacacgaccgacgcgguccgcgacccgcagacccuggagauccuggacaucacccccugcagcuucggcgggguguccgugaucacgcccggcaccaacaccagcaaccaggucgccgugcucuaccagggcgugaacugcaccgaggucccgguggccauccacgccgaccagcugacgcccaccuggcgcguguacuccaccgggagcaacgucuuccagacccgggccggcugccugaucggggcggaguacgugaacaacuccuacgagugcgacauccccaucggcgccggcaucugcgccagcuaccagacgcagaccaacagcccccgccgggcccgcagcguggcgucccagagcaucaucgccuacaccaugucccucggggccgagaacagcgucgccuacuccaacaacagcaucgccaucccgaccaacuucacgaucagcgugaccaccgagauccugcccguguccaugaccaagacgagcgucgacugcaccauguacaucugcggcgacuccaccgagugcagcaaccugcuccugcaguacggguccuucugcacccagcugaaccgggcgcucacgggcaucgccguggagcaggacaagaacacccaggagguguucgcccaggucaagcagaucuacaagaccccgcccaucaaggacuucgggggcuucaacuucagccagauccugcccgaccccuccaagcccagcaagcgcuccuucaucgaggaccuccuguucaacaaggugacccuggccgacgccggcuucaucaagcaguacggggacugccugggcgacaucgcggcccgggaccucaucugcgcccagaaguucaacgggcugacggugcugcccccgcuccugaccgacgagaugaucgcccaguacaccagcgcccugcucgcgggcaccaucacguccggguggaccuucggcgccggcgccgcccugcagauccccuucgcgaugcagauggccuaccgcuucaacgggaucggcgucacccagaacgugcuguacgagaaccagaagcucaucgccaaccaguucaacagcgccaucgggaagauccaggacucccugagcuccaccgccagcgcgcugggcaagcuccaggacguggucaaccagaacgcccaggcccugaacacgcuggugaagcagcucuccagcaacuucggggccaucuccagcgugcugaacgacauccugagccggcucgacccgcccgaggccgagguccagaucgaccgccugaucaccggccggcugcagucccuccagaccuacgugacccagcagcugauccgcgcggccgagauccgggccagcgccaaccuggccgcgaucaagauguccgagugcgugcucggccagagcaagcgcgucgacuucugcgggaagggcuaccaccugauguccuucccccagagcgcgccccacggggugguguuccugcacgucaccuacgugcccgcccaggagaagaacuucacgaccgcccccgccaucugccacgacggcaaggcccacuucccgcgggagggggucuucguguccaacggcacccacugguucgugacccagcgcaacuucuacgagccccagaucaucacgaccgacaacaccuucgucagcggcaacugcgacguggugaucgggaucgucaacaacaccguguacgacccccuccagcccgagcuggacuccuucaaggaggagcuggacaaguacuucaagaaccacacgagcccggacguggaccucggcgacaucuccgggaucaacgccagcgucgugaacauccagaaggagaucgaccggcugaacgagguggccaagaaccugaacgagucccucaucgaccugcaggagcugggcaaguacgagcaguacaucaaguggcccugguacaucuggcucggcuucaucgccgggcugaucgcgaucgucauggugaccaucaugcugugcugcaugaccagcugcugcuccugccucaagggcugcugcagcugcggguccugcugcaaguucgacgaggacgacagcgagcccgugcugaagggcgucaagcugcacuacaccugaggacuaguuauaagacugacuagcccgaugggccucccaacgggcccuccuccccuccuugcaccgagauuaauaaaaaaaaaaaaaaaaaaaaaaaaaaaaaaaaaaaaaaaaaaaaaaaaaaaaaaaaaaaaaaaaugcaucccccccccccccccccccccccccccccccaaaggcucuuuucagagccaccagaauu

SEQ ID NO: 23332 - RNA, 4039 nt, Artificial Sequence
  SARS-CoV-2/Wuhan/WIV05/2019__EPI_ISL_402128 spike protein mRNA gc (1-1273)(K986P_V987P_K986P_V987P_S13I_W152C_L452R_D614G)
aggagaaagcuuaccauguucguguuccugguccuccugccccuggugagcauccagugcgugaaccucaccacccgcacgcagcugccgcccgccuacaccaacuccuucacccggggcgucuacuaccccgacaagguguuccgcagcuccgugcugcacagcacccaggaccucuuccugcccuucuucuccaacgucacgugguuccacgccauccacgugagcgggaccaacggcaccaagcgguucgacaacccggugcugcccuucaacgacggggucuacuucgcguccaccgagaaguccaacaucauccgcggcuggaucuucgggacgacccucgacagcaagacccagagccugcugaucgugaacaacgccaccaacguggucaucaaggugugcgaguuccaguucugcaacgaccccuuccucggcguguacuaccacaagaacaacaaguccugcauggagagcgaguuccgggucuacuccagcgccaacaacugcacguucgaguacgugucccagcccuuccugauggaccuggagggcaagcaggggaacuucaagaaccuccgcgaguucguguucaagaacaucgacggcuacuucaagaucuacagcaagcacaccccgaucaaccugguccgggaccugccccagggguucuccgcccucgagccccugguggaccugcccaucggcaucaacaucacccgcuuccagacccuccuggcccugcaccggagcuaccucacgccgggggacuccagcagcggcuggaccgcgggcgccgccgccuacuacgugggguaccugcagccccgcaccuuccugcucaaguacaacgagaacggcaccaucacggacgcggucgacugcgcccuggacccccuguccgagaccaagugcacccucaagagcuucaccguggagaaggggaucuaccagacguccaacuuccgggugcagcccaccgagagcaucguccgcuucccgaacaucaccaaccugugccccuucggcgagguguucaacgccacccgguucgccuccgucuacgccuggaaccgcaagcggaucagcaacugcguggcggacuacuccgugcuguacaacagcgccuccuucagcacguucaagugcuacggcgucucccccaccaagcucaacgaccugugcuucaccaacguguacgccgacagcuucgugauccgcggggacgagguccggcagaucgcccccggccagaccgggaagaucgccgacuacaacuacaagcugccggacgacuucacgggcugcgugaucgcguggaacuccaacaaccucgacagcaaggucgggggcaacuacaacuaccgcuaccggcuguuccgcaaguccaaccugaagcccuucgagcgggacaucagcaccgagaucuaccaggccggcuccacccccugcaacgggguggagggcuucaacugcuacuucccccuccagagcuacggguuccagccgaccaacggcgugggguaccagcccuaccgcguggucgugcuguccuucgagcugcuccacgcccccgccacggugugcggccccaagaaguccaccaaccuggucaagaacaagugcgugaacuucaacuucaacggccugaccgggaccggcgugcucaccgagagcaacaagaaguuccugccguuccagcaguucgggcgcgacaucgccgacacgaccgacgcgguccgggacccccagacccuggagauccuggacaucacccccugcagcuucggcggggugagcgugaucacgccgggcaccaacaccuccaaccaggucgccgugcucuaccagggcgugaacugcaccgagguccccguggccauccacgccgaccagcugacgcccaccuggcgcguguacagcaccggguccaacgucuuccagacccgggccggcugccugaucggggcggagcacgugaacaacagcuacgagugcgacauccccaucggcgccggcaucugcgccuccuaccagacgcagaccaacagcccgcgccgggcccgcuccguggcgagccaguccaucaucgccuacaccaugagccucggggccgagaacuccgucgccuacagcaacaacuccaucgccauccccaccaacuucacgaucagcgugaccaccgagauccugcccguguccaugaccaagacgagcgucgacugcaccauguacaucugcggcgacagcaccgagugcuccaaccugcuccugcaguacgggagcuucugcacccagcugaaccgggcgcucacgggcaucgccguggagcaggacaagaacacccaggagguguucgcccaggucaagcagaucuacaagacgcccccgaucaaggacuucgggggcuucaacuucucccagauccugcccgaccccagcaagcccuccaagcgcagcuucaucgaggaccuccuguucaacaaggugacccuggccgacgccggcuucaucaagcaguacggggacugccugggcgacaucgcggcccgggaccucaucugcgcccagaaguucaacgggcugaccgugcugccgccccuccugaccgacgagaugaucgcccaguacaccuccgcccugcucgcgggcaccaucacgagcggguggaccuucggcgccggcgccgcccugcagauccccuucgcgaugcagauggccuaccgcuucaacgggaucggcgucacccagaacgugcuguacgagaaccagaagcucaucgccaaccaguucaacuccgccaucgggaagauccaggacagccuguccagcaccgccuccgcgcugggcaagcuccaggacguggucaaccagaacgcccaggcccugaacacgcuggugaagcagcucagcuccaacuucggggccaucagcuccgugcugaacgacauccugagccggcucgacccgcccgaggccgagguccagaucgaccgccugaucaccggccggcugcagucccuccagaccuacgugacccagcagcugauccgcgcggccgagauccgggccagcgccaaccuggccgcgaccaagaugagcgagugcgugcucggccaguccaagcgcgucgacuucugcgggaagggcuaccaccugaugagcuucccccaguccgcgccccacggggugguguuccugcacgucacguacgugcccgcccaggagaagaacuucaccaccgccccggccaucugccacgacggcaaggcccacuucccccgggagggggucuucgugagcaacggcacccacugguucgugacgcagcgcaacuucuacgagccccagaucaucaccaccgacaacaccuucgucuccggcaacugcgacguggugaucgggaucgucaacaacacgguguacgacccccuccagccggagcuggacagcuucaaggaggagcuggacaaguacuucaagaaccacaccucccccgacguggaccucggcgacaucagcgggaucaacgccuccgucgugaacauccagaaggagaucgaccggcugaacgagguggccaagaaccugaacgagagccucaucgaccugcaggagcugggcaaguacgagcaguacaucaaguggcccugguacaucuggcucggcuucaucgccgggcugaucgcgaucgucauggugaccaucaugcugugcugcaugaccuccugcugcagcugccucaagggcugcugcuccugcgggagcugcugcaaguucgacgaggacgacuccgagccggugcugaagggcgucaagcugcacuacacgugaggacuaguuauaagacugacuagcccgaugggccucccaacgggcccuccuccccuccuugcaccgagauuaauaaaaaaaaaaaaaaaaaaaaaaaaaaaaaaaaaaaaaaaaaaaaaaaaaaaaaaaaaaaaaaaaugcaucccccccccccccccccccccccccccccccaaaggcucuuuucagagccaccagaauu

SEQ ID NO: 23333 - RNA, 4039 nt, Artificial Sequence
  SARS-CoV-2/Wuhan/WIV05/2019__EPI_ISL_402128 spike protein mRNA gc (1-1273)(K986P_V987P)
aggagaaagcuuaccauguucguguuccuggugcugcugccccuggugagcagccagugcgugaaccugaccacccggacccagcugccaccagccuacaccaacagcuucacccggggcgucuacuaccccgacaagguguuccggagcagcguccugcacagcacccaggaccuguuccugcccuucuucagcaacgugaccugguuccacgccauccacgugagcggcaccaacggcaccaagcgguucgacaaccccgugcugcccuucaacgacggcguguacuucgccagcaccgagaagagcaacaucauccggggcuggaucuucggcaccacccuggacagcaagacccagagccugcugaucgugaauaacgccaccaacguggugaucaaggugugcgaguuccaguucugcaacgaccccuuccugggcguguacuaccacaagaacaacaagagcuggauggagagcgaguuccggguguacagcagcgccaacaacugcaccuucgaguacgugagccagcccuuccugauggaccuggagggcaagcagggcaacuucaagaaccugcgggaguucguguucaagaacaucgacggcuacuucaagaucuacagcaagcacaccccaaucaaccuggugcgggaucugccccagggcuucucagcccuggagccccugguggaccugcccaucggcaucaacaucacccgguuccagacccugcuggcccugcaccggagcuaccugaccccaggcgacagcagcagcggguggacagcaggcgcggcugcuuacuacgugggcuaccugcagccccggaccuuccugcugaaguacaacgagaacggcaccaucaccgacgccguggacugcgcccuggacccucugagcgagaccaagugcacccugaagagcuucaccguggagaagggcaucuaccagaccagcaacuuccgggugcagcccaccgagagcaucgugcgguuccccaacaucaccaaccugugccccuucggcgagguguucaacgccacccgguucgccagcguguacgccuggaaccggaagcggaucagcaacugcguggccgacuacagcgugcuguacaacagcgccagcuucagcaccuucaagugcuacggcgugagccccaccaagcugaacgaccugugcuucaccaacguguacgccgacagcuucgugauccguggcgacgaggugcggcagaucgcacccggccagacaggcaagaucgccgacuacaacuacaagcugcccgacgacuucaccggcugcgugaucgccuggaacagcaacaaccucgacagcaaggugggcggcaacuacaacuaccuguaccggcuguuccggaagagcaaccugaagcccuucgagcgggacaucagcaccgagaucuaccaagccggcuccaccccuugcaacggcguggagggcuucaacugcuacuucccucugcagagcuacggcuuccagcccaccaacggcgugggcuaccagcccuaccgggugguggugcugagcuucgagcugcugcacgccccagccaccguguguggccccaagaagagcaccaaccuggugaagaacaagugcgugaacuucaacuucaacggccuuaccggcaccggcgugcugaccgagagcaacaagaaauuccugcccuuucagcaguucggccgggacaucgccgacaccaccgacgcugugcgggauccccagacccuggagauccuggacaucaccccuugcagcuucggcggcgugagcgugaucaccccaggcaccaacaccagcaaccagguggccgugcuguaccaggacgugaacugcaccgaggugcccguggccauccacgccgaccagcugacacccaccuggcgggucuacagcaccggcagcaacguguuccagacccgggccgguugccugaucggcgccgagcacgugaacaacagcuacgagugcgacauccccaucggcgccggcaucugugccagcuaccagacccagaccaauucaccccggagggcaaggagcguggccagccagagcaucaucgccuacaccaugagccugggcgccgagaacagcguggccuacagcaacaacagcaucgccauccccaccaacuucaccaucagcgugaccaccgagauucugcccgugagcaugaccaagaccagcguggacugcaccauguacaucugcggcgacagcaccgagugcagcaaccugcugcugcaguacggcagcuucugcacccagcugaaccgggcccugaccggcaucgccguggagcaggacaagaacacccaggagguguucgcccaggugaagcagaucuacaagaccccucccaucaaggacuucggcggcuucaacuucagccagauccugcccgaccccagcaagcccagcaagcggagcuucaucgaggaccugcuguucaacaaggugacccuagccgacgccggcuucaucaagcaguacggcgacugccucggcgacauagccgcccgggaccugaucugcgcccagaaguucaacggccugaccgugcugccuccccugcugaccgacgagaugaucgcccaguacaccagcgcccuguuagccggaaccaucaccagcggcuggacuuucggcgcuggagccgcucugcagauccccuucgccaugcagauggccuaccgguucaacggcaucggcgugacccagaacgugcuguacgagaaccagaagcugaucgccaaccaguucaacagcgccaucggcaagauccaggacagccugagcagcaccgcuagcgcccugggcaagcugcaggacguggugaaccagaacgcccaggcccugaacacccuggugaagcagcugagcagcaacuucggcgccaucagcagcgugcugaacgacauccugagccggcuggacccucccgaggccgaggugcagaucgaccggcugaucacuggccggcugcagagccugcagaccuacgugacccagcagcugauccgggccgccgagauucgggccagcgccaaccuggccgccaccaagaugagcgagugcgugcugggccagagcaagcggguggacuucugcggcaagggcuaccaccugaugagcuuuccccagagcgcaccccacggagugguguuccugcacgugaccuacgugcccgcccaggagaagaacuucaccaccgccccagccaucugccacgacggcaaggcccacuuuccccgggagggcguguucgugagcaacggcacccacugguucgugacccagcggaacuucuacgagccccagaucaucaccaccgacaacaccuucgugagcggcaacugcgacguggugaucggcaucgugaacaacaccguguacgauccccugcagcccgagcuggacagcuucaaggaggagcuggacaaguacuucaagaaucacaccagccccgacguggaccugggcgacaucagcggcaucaacgccagcguggugaacauccagaaggagaucgaucggcugaacgagguggccaagaaccugaacgagagccugaucgaccugcaggagcugggcaaguacgagcaguacaucaaguggcccugguacaucuggcugggcuucaucgccggccugaucgccaucgugauggugaccaucaugcugugcugcaugaccagcugcugcagcugccugaagggcuguugcagcugcggcagcugcugcaaguucgacgaggacgacagcgagcccgugcugaagggcgugaagcugcacuacaccugaggacuaguuauaagacugacuagcccgaugggccucccaacgggcccuccuccccuccuugcaccgagauuaauaaaaaaaaaaaaaaaaaaaaaaaaaaaaaaaaaaaaaaaaaaaaaaaaaaaaaaaaaaaaaaaaugcaucccccccccccccccccccccccccccccccaaaggcucuuuucagagccaccagaauu

SEQ ID NO: 23334 - RNA, 4039 nt, Artificial Sequence
  SARS-CoV-2/Wuhan/WIV05/2019__EPI_ISL_402128 spike protein mRNA gc (1-1273)(K986P_V987P_ D614G)
aggagaaagcuuaccauguucguguuccuggugcugcugccccuggugagcagccagugcgugaaccugaccacccggacccagcugccaccagccuacaccaacagcuucacccggggcgucuacuaccccgacaagguguuccggagcagcguccugcacagcacccaggaccuguuccugcccuucuucagcaacgugaccugguuccacgccauccacgugagcggcaccaacggcaccaagcgguucgacaaccccgugcugcccuucaacgacggcguguacuucgccagcaccgagaagagcaacaucauccggggcuggaucuucggcaccacccuggacagcaagacccagagccugcugaucgugaauaacgccaccaacguggugaucaaggugugcgaguuccaguucugcaacgaccccuuccugggcguguacuaccacaagaacaacaagagcuggauggagagcgaguuccggguguacagcagcgccaacaacugcaccuucgaguacgugagccagcccuuccugauggaccuggagggcaagcagggcaacuucaagaaccugcgggaguucguguucaagaacaucgacggcuacuucaagaucuacagcaagcacaccccaaucaaccuggugcgggaucugccccagggcuucucagcccuggagccccugguggaccugcccaucggcaucaacaucacccgguuccagacccugcuggcccugcaccggagcuaccugaccccaggcgacagcagcagcggguggacagcaggcgcggcugcuuacuacgugggcuaccugcagccccggaccuuccugcugaaguacaacgagaacggcaccaucaccgacgccguggacugcgcccuggacccucugagcgagaccaagugcacccugaagagcuucaccguggagaagggcaucuaccagaccagcaacuuccgggugcagcccaccgagagcaucgugcgguuccccaacaucaccaaccugugccccuucggcgagguguucaacgccacccgguucgccagcguguacgccuggaaccggaagcggaucagcaacugcguggccgacuacagcgugcuguacaacagcgccagcuucagcaccuucaagugcuacggcgugagccccaccaagcugaacgaccugugcuucaccaacguguacgccgacagcuucgugauccguggcgacgaggugcggcagaucgcacccggccagacaggcaagaucgccgacuacaacuacaagcugcccgacgacuucaccggcugcgugaucgccuggaacagcaacaaccucgacagcaaggugggcggcaacuacaacuaccuguaccggcuguuccggaagagcaaccugaagcccuucgagcgggacaucagcaccgagaucuaccaagccggcuccaccccuugcaacggcguggagggcuucaacugcuacuucccucugcagagcuacggcuuccagcccaccaacggcgugggcuaccagcccuaccgggugguggugcugagcuucgagcugcugcacgccccagccaccguguguggccccaagaagagcaccaaccuggugaagaacaagugcgugaacuucaacuucaacggccuuaccggcaccggcgugcugaccgagagcaacaagaaauuccugcccuuucagcaguucggccgggacaucgccgacaccaccgacgcugugcgggauccccagacccuggagauccuggacaucaccccuugcagcuucggcggcgugagcgugaucaccccaggcaccaacaccagcaaccagguggccgugcuguaccagggcgugaacugcaccgaggugcccguggccauccacgccgaccagcugacacccaccuggcgggucuacagcaccggcagcaacguguuccagacccgggccgguugccugaucggcgccgagcacgugaacaacagcuacgagugcgacauccccaucggcgccggcaucugugccagcuaccagacccagaccaauucaccccggagggcaaggagcguggccagccagagcaucaucgccuacaccaugagccugggcgccgagaacagcguggccuacagcaacaacagcaucgccauccccaccaacuucaccaucagcgugaccaccgagauucugcccgugagcaugaccaagaccagcguggacugcaccauguacaucugcggcgacagcaccgagugcagcaaccugcugcugcaguacggcagcuucugcacccagcugaaccgggcccugaccggcaucgccguggagcaggacaagaacacccaggagguguucgcccaggugaagcagaucuacaagaccccucccaucaaggacuucggcggcuucaacuucagccagauccugcccgaccccagcaagcccagcaagcggagcuucaucgaggaccugcuguucaacaaggugacccuagccgacgccggcuucaucaagcaguacggcgacugccucggcgacauagccgcccgggaccugaucugcgcccagaaguucaacggccugaccgugcugccuccccugcugaccgacgagaugaucgcccaguacaccagcgcccuguuagccggaaccaucaccagcggcuggacuuucggcgcuggagccgcucugcagauccccuucgccaugcagauggccuaccgguucaacggcaucggcgugacccagaacgugcuguacgagaaccagaagcugaucgccaaccaguucaacagcgccaucggcaagauccaggacagccugagcagcaccgcuagcgcccugggcaagcugcaggacguggugaaccagaacgcccaggcccugaacacccuggugaagcagcugagcagcaacuucggcgccaucagcagcgugcugaacgacauccugagccggcuggacccucccgaggccgaggugcagaucgaccggcugaucacuggccggcugcagagccugcagaccuacgugacccagcagcugauccgggccgccgagauucgggccagcgccaaccuggccgccaccaagaugagcgagugcgugcugggccagagcaagcggguggacuucugcggcaagggcuaccaccugaugagcuuuccccagagcgcaccccacggagugguguuccugcacgugaccuacgugcccgcccaggagaagaacuucaccaccgccccagccaucugccacgacggcaaggcccacuuuccccgggagggcguguucgugagcaacggcacccacugguucgugacccagcggaacuucuacgagccccagaucaucaccaccgacaacaccuucgugagcggcaacugcgacguggugaucggcaucgugaacaacaccguguacgauccccugcagcccgagcuggacagcuucaaggaggagcuggacaaguacuucaagaaucacaccagccccgacguggaccugggcgacaucagcggcaucaacgccagcguggugaacauccagaaggagaucgaucggcugaacgagguggccaagaaccugaacgagagccugaucgaccugcaggagcugggcaaguacgagcaguacaucaaguggcccugguacaucuggcugggcuucaucgccggccugaucgccaucgugauggugaccaucaugcugugcugcaugaccagcugcugcagcugccugaagggcuguugcagcugcggcagcugcugcaaguucgacgaggacgacagcgagcccgugcugaagggcgugaagcugcacuacaccugaggacuaguuauaagacugacuagcccgaugggccucccaacgggcccuccuccccuccuugcaccgagauuaauaaaaaaaaaaaaaaaaaaaaaaaaaaaaaaaaaaaaaaaaaaaaaaaaaaaaaaaaaaaaaaaaugcaucccccccccccccccccccccccccccccccaaaggcucuuuucagagccaccagaauu

SEQ ID NO: 23335 - RNA, 4039 nt, Artificial Sequence
  SARS-CoV-2/Wuhan/WIV05/2019__EPI_ISL_402128 spike protein mRNA gc (1-1273)(K986P_V987P_A222V_D614G)
aggagaaagcuuaccauguucguguuccuggugcugcugccccuggugagcagccagugcgugaaccugaccacccggacccagcugccaccagccuacaccaacagcuucacccggggcgucuacuaccccgacaagguguuccggagcagcguccugcacagcacccaggaccuguuccugcccuucuucagcaacgugaccugguuccacgccauccacgugagcggcaccaacggcaccaagcgguucgacaaccccgugcugcccuucaacgacggcguguacuucgccagcaccgagaagagcaacaucauccggggcuggaucuucggcaccacccuggacagcaagacccagagccugcugaucgugaauaacgccaccaacguggugaucaaggugugcgaguuccaguucugcaacgaccccuuccugggcguguacuaccacaagaacaacaagagcuggauggagagcgaguuccggguguacagcagcgccaacaacugcaccuucgaguacgugagccagcccuuccugauggaccuggagggcaagcagggcaacuucaagaaccugcgggaguucguguucaagaacaucgacggcuacuucaagaucuacagcaagcacaccccaaucaaccuggugcgggaucugccccagggcuucucagugcuggagccccugguggaccugcccaucggcaucaacaucacccgguuccagacccugcuggcccugcaccggagcuaccugaccccaggcgacagcagcagcggguggacagcaggcgcggcugcuuacuacgugggcuaccugcagccccggaccuuccugcugaaguacaacgagaacggcaccaucaccgacgccguggacugcgcccuggacccucugagcgagaccaagugcacccugaagagcuucaccguggagaagggcaucuaccagaccagcaacuuccgggugcagcccaccgagagcaucgugcgguuccccaacaucaccaaccugugccccuucggcgagguguucaacgccacccgguucgccagcguguacgccuggaaccggaagcggaucagcaacugcguggccgacuacagcgugcuguacaacagcgccagcuucagcaccuucaagugcuacggcgugagccccaccaagcugaacgaccugugcuucaccaacguguacgccgacagcuucgugauccguggcgacgaggugcggcagaucgcacccggccagacaggcaagaucgccgacuacaacuacaagcugcccgacgacuucaccggcugcgugaucgccuggaacagcaacaaccucgacagcaaggugggcggcaacuacaacuaccuguaccggcuguuccggaagagcaaccugaagcccuucgagcgggacaucagcaccgagaucuaccaagccggcuccaccccuugcaacggcguggagggcuucaacugcuacuucccucugcagagcuacggcuuccagcccaccaacggcgugggcuaccagcccuaccgggugguggugcugagcuucgagcugcugcacgccccagccaccguguguggccccaagaagagcaccaaccuggugaagaacaagugcgugaacuucaacuucaacggccuuaccggcaccggcgugcugaccgagagcaacaagaaauuccugcccuuucagcaguucggccgggacaucgccgacaccaccgacgcugugcgggauccccagacccuggagauccuggacaucaccccuugcagcuucggcggcgugagcgugaucaccccaggcaccaacaccagcaaccagguggccgugcuguaccagggcgugaacugcaccgaggugcccguggccauccacgccgaccagcugacacccaccuggcgggucuacagcaccggcagcaacguguuccagacccgggccgguugccugaucggcgccgagcacgugaacaacagcuacgagugcgacauccccaucggcgccggcaucugugccagcuaccagacccagaccaauucaccccggagggcaaggagcguggccagccagagcaucaucgccuacaccaugagccugggcgccgagaacagcguggccuacagcaacaacagcaucgccauccccaccaacuucaccaucagcgugaccaccgagauucugcccgugagcaugaccaagaccagcguggacugcaccauguacaucugcggcgacagcaccgagugcagcaaccugcugcugcaguacggcagcuucugcacccagcugaaccgggcccugaccggcaucgccguggagcaggacaagaacacccaggagguguucgcccaggugaagcagaucuacaagaccccucccaucaaggacuucggcggcuucaacuucagccagauccugcccgaccccagcaagcccagcaagcggagcuucaucgaggaccugcuguucaacaaggugacccuagccgacgccggcuucaucaagcaguacggcgacugccucggcgacauagccgcccgggaccugaucugcgcccagaaguucaacggccugaccgugcugccuccccugcugaccgacgagaugaucgcccaguacaccagcgcccuguuagccggaaccaucaccagcggcuggacuuucggcgcuggagccgcucugcagauccccuucgccaugcagauggccuaccgguucaacggcaucggcgugacccagaacgugcuguacgagaaccagaagcugaucgccaaccaguucaacagcgccaucggcaagauccaggacagccugagcagcaccgcuagcgcccugggcaagcugcaggacguggugaaccagaacgcccaggcccugaacacccuggugaagcagcugagcagcaacuucggcgccaucagcagcgugcugaacgacauccugagccggcuggacccucccgaggccgaggugcagaucgaccggcugaucacuggccggcugcagagccugcagaccuacgugacccagcagcugauccgggccgccgagauucgggccagcgccaaccuggccgccaccaagaugagcgagugcgugcugggccagagcaagcggguggacuucugcggcaagggcuaccaccugaugagcuuuccccagagcgcaccccacggagugguguuccugcacgugaccuacgugcccgcccaggagaagaacuucaccaccgccccagccaucugccacgacggcaaggcccacuuuccccgggagggcguguucgugagcaacggcacccacugguucgugacccagcggaacuucuacgagccccagaucaucaccaccgacaacaccuucgugagcggcaacugcgacguggugaucggcaucgugaacaacaccguguacgauccccugcagcccgagcuggacagcuucaaggaggagcuggacaaguacuucaagaaucacaccagccccgacguggaccugggcgacaucagcggcaucaacgccagcguggugaacauccagaaggagaucgaucggcugaacgagguggccaagaaccugaacgagagccugaucgaccugcaggagcugggcaaguacgagcaguacaucaaguggcccugguacaucuggcugggcuucaucgccggccugaucgccaucgugauggugaccaucaugcugugcugcaugaccagcugcugcagcugccugaagggcuguugcagcugcggcagcugcugcaaguucgacgaggacgacagcgagcccgugcugaagggcgugaagcugcacuacaccugaggacuaguuauaagacugacuagcccgaugggccucccaacgggcccuccuccccuccuugcaccgagauuaauaaaaaaaaaaaaaaaaaaaaaaaaaaaaaaaaaaaaaaaaaaaaaaaaaaaaaaaaaaaaaaaaugcaucccccccccccccccccccccccccccccccaaaggcucuuuucagagccaccagaauu
